United States Patent Application Publication US 2024/0066114 A1 - sequence listing, part 4

SEQ ID NO: 5023 - protein, 1379 aa, Artificial Sequence
  SARS-CoV-2/USA/UT-00034/2020__EPI_ISL_417977 spike protein (1-1211)(I712C_T1077C) Ferritin construct
MFVFLVLLPLVSSQCVNLTTRTQLPPAYTNSFTRGVYYPDKVFRSSVLHSTQDLFLPFFSNVTWFHAIHVSGTNGTKRFDNPVLPFNDGVYFASTEKSNIIRGWIFGTTLDSKTQSLLIVNNATNVVIKVCEFQFCNDPFLGVYYYKNNKSWMESEFRVYSSANNCTFEYVSQPFLMDLEGKQGNFKNLREFVFKNIDGYFKIYSKHTPINLVRDLPQGFSALEPLVDLPIGINITRFQTLLALHRSYLTPGDSSSGWTAGAAAYYVGYLQPRTFLLKYNENGTITDAVDCALDPLSETKCTLKSFTVEKGIYQTSNFRVQPTESIVRFPNITNLCPFGEVFNATRFASVYAWNRKRISNCVADYSVLYNSASFSTFKCYGVSPTKLNDLCFTNVYADSFVIRGDEVRQIAPGQTGKIADYNYKLPDDFTGCVIAWNSNNLDSKVGGNYNYLYRLFRKSNLKPFERDISTEIYQAGSTPCNGVEGFNCYFPLQSYGFQPTNGVGYQPYRVVVLSFELLHAPATVCGPKKSTNLVKNKCVNFNFNGLTGTGVLTESNKKFLPFQQFGRDIADTTDAVRDPQTLEILDITPCSFGGVSVITPGTNTSNQVAVLYQGVNCTEVPVAIHADQLTPTWRVYSTGSNVFQTRAGCLIGAEHVNNSYECDIPIGAGICASYQTQTNSPRRARSVASQSIIAYTMSLGAENSVAYSNNSCAIPTNFTISVTTEILPVSMTKTSVDCTMYICGDSTECSNLLLQYGSFCTQLNRALTGIAVEQDKNTQEVFAQVKQIYKTPPIKDFGGFNFSQILPDPSKPSKRSFIEDLLFNKVTLADAGFIKQYGDCLGDIAARDLICAQKFNGLTVLPPLLTDEMIAQYTSALLAGTITSGWTFGAGAALQIPFAMQMAYRFNGIGVTQNVLYENQKLIANQFNSAIGKIQDSLSSTASALGKLQDVVNQNAQALNTLVKQLSSNFGAISSVLNDILSRLDKVEAEVQIDRLITGRLQSLQTYVTQQLIRAAEIRASANLAATKMSECVLGQSKRVDFCGKGYHLMSFPQSAPHGVVFLHVTYVPAQEKNFTCAPAICHDGKAHFPREGVFVSNGTHWFVTQRNFYEPQIITTDNTFVSGNCDVVIGIVNNTVYDPLQPELDSFKEELDKYFKNHTSPDVDLGDISGINASVVNIQKEIDRLNEVAKNLNESLIDLQELGKYEQYIKGGGGSDIIKLLNEQVNKEMQSSNLYMSMSSWCYTHSLDGAGLFLFDHAAEEYEHAKKLIIFLNENNVPVQLTSISAPEHKFEGLTQIFQKAYEHEQHISESINNIVDHAIKSKDHATFNFLQWYVAEQHEEEVLFKDILDKIELIGNENHGLYLADQYVKGIAKSRKS

SEQ ID NO: 5024 - protein, 1379 aa, Artificial Sequence
  SARS-CoV-2/USA/UT-00033/2020__EPI_ISL_417976 spike protein (1-1211)(I712C_T1077C) Ferritin construct
MFVFLVLLPLVSSQCVNLTTRTQLPPAYTNSFTRGVYYPDKVFRSSVLHSTQDLFLPFFSNVTWFHAIHVSGTNGTKRFDNPVLPFNDGVYFASTEKSNIIRGWIFGTTLDSKTQSLLIVNNATNVVIKVCEFQFCNDPFLGVYYHKNNKSWMESEFRVYSSANNCTFEYVSQPFLMDLEGKQGNFKNLREFVFKNIDGYFKIYSKHTPINLVRDLPQGFSALEPLVDLPIGINITRFQTLLALHRSYLTPGDSSSGLTAGAAAYYVGYLQPRTFLLKYNENGTITDAVDCALDPLSETKCTLKSFTVEKGIYQTSNFRVQPTESIVRFPNITNLCPFGEVFNATRFASVYAWNRKRISNCVADYSVLYNSASFSTFKCYGVSPTKLNDLCFTNVYADSFVIRGDEVRQIAPGQTGKIADYNYKLPDDFTGCVIAWNSNNLDSKVGGNYNYLYRLFRKSNLKPFERDISTEIYQAGSTPCNGVEGFNCYFPLQSYGFQPTNGVGYQPYRVVVLSFELLHAPATVCGPKKSTNLVKNKCVNFNFNGLTGTGVLTESNKKFLPFQQFGRDIADTTDAVRDPQTLEILDITPCSFGGVSVITPGTNTSNQVAVLYQGVNCTEVPVAIHADQLTPTWRVYSTGSNVFQTRAGCLIGAEHVNNSYECDIPIGAGICASYQTQTNSPRRARSVASQSIIAYTMSLGAENSVAYSNNSCAIPTNFTISVTTEILPVSMTKTSVDCTMYICGDSTECSNLLLQYGSFCTQLNRALTGIAVEQDKNTQEVFAQVKQIYKTPPIKDFGGFNFSQILPDPSKPSKRSFIEDLLFNKVTLADAGFIKQYGDCLGDIAARDLICAQKFNGLTVLPPLLTDEMIAQYTSALLAGTITSGWTFGAGAALQIPFAMQMAYRFNGIGVTQNVLYENQKLIANQFNSAIGKIQDSLSSTASALGKLQDVVNQNAQALNTLVKQLSSNFGAISSVLNDILSRLDKVEAEVQIDRLITGRLQSLQTYVTQQLIRAAEIRASANLAATKMSECVLGQSKRVDFCGKGYHLMSFPQSAPHGVVFLHVTYVPAQEKNFTCAPAICHDGKAHFPREGVFVSNGTHWFVTQRNFYEPQIITTDNTFVSGNCDVVIGIVNNTVYDPLQPELDSFKEELDKYFKNHTSPDVDLGDISGINASVVNIQKEIDRLNEVAKNLNESLIDLQELGKYEQYIKGGGGSDIIKLLNEQVNKEMQSSNLYMSMSSWCYTHSLDGAGLFLFDHAAEEYEHAKKLIIFLNENNVPVQLTSISAPEHKFEGLTQIFQKAYEHEQHISESINNIVDHAIKSKDHATFNFLQWYVAEQHEEEVLFKDILDKIELIGNENHGLYLADQYVKGIAKSRKS

SEQ ID NO: 5025 - protein, 1379 aa, Artificial Sequence
  SARS-CoV-2/USA/WI-13/2020__EPI_ISL_417516 spike protein (1-1211)(I712C_T1077C) Ferritin construct
MFVFLVLLPLVSSQCVNLTTRTQLPPAYTNSFTRGVYYPDKVFRSSVLHSTQDLFLPFFSNVTWFHAIHVSGTNGTKRFDNPVLPFNDGVYFASTEKSNIIRGWIFGTTLDSKTQSLLIVNNATNVVIKVCEFQFCNDPFLGVYYHKNNKSWMESEFRVYSSANNCTFEYVSQPFLMDLEGKQGNFKNLREFVFKNIDGYFKIYSKHTPINLVRDLPQGFSALEPLVDLPIGINITRFQTLLALHRSYLTPGDSSSGWTAGAAAYYVGYLQPRTFLLKYNENGTITDAVDCALDPLSETKCTLKSFTVEKGIYQTSNFRVLPTESIVRFPNITNLCPFGEVFNATRFASVYAWNRKRISNCVADYSVLYNSASFSTFKCYGVSPTKLNDLCFTNVYADSFVIRGDEVRQIAPGQTGKIADYNYKLPDDFTGCVIAWNSNNLDSKVGGNYNYLYRLFRKSNLKPFERDISTEIYQAGSTPCNGVEGFNCYFPLQSYGFQPTNGVGYQPYRVVVLSFELLHAPATVCGPKKSTNLVKNKCVNFNFNGLTGTGVLTESNKKFLPFQQFGRDIADTTDAVRDPQTLEILDITPCSFGGVSVITPGTNTSNQVAVLYQGVNCTEVPVAIHADQLTPTWRVYSTGSNVFQTRAGCLIGAEHVNNSYECDIPIGAGICASYQTQTNSPRRARSVASQSIIAYTMSLGAENSVAYSNNSCAIPTNFTISVTTEILPVSMTKTSVDCTMYICGDSTECSNLLLQYGSFCTQLNRALTGIAVEQDKNTQEVFAQVKQIYKTPPIKDFGGFNFSQILPDPSKPSKRSFIEDLLFNKVTLADAGFIKQYGDCLGDIAARDLICAQKFNGLTVLPPLLTDEMIAQYTSALLAGTITSGWTFGAGAALQIPFAMQMAYRFNGIGVTQNVLYENQKLIANQFNSAIGKIQDSLSSTASALGKLQDVVNQNAQALNTLVKQLSSNFGAISSVLNDILSRLDKVEAEVQIDRLITGRLQSLQTYVTQQLIRAAEIRASANLAATKMSECVLGQSKRVDFCGKGYHLMSFPQSAPHGVVFLHVTYVPAQEKNFTCAPAICHDGKAHFPREGVFVSNGTHWFVTQRNFYEPQIITTDNTFVSGNCDVVIGIVNNTVYDPLQPELDSFKEELDKYFKNHTSPDVDLGDISGINASVVNIQKEIDRLNEVAKNLNESLIDLQELGKYEQYIKGGGGSDIIKLLNEQVNKEMQSSNLYMSMSSWCYTHSLDGAGLFLFDHAAEEYEHAKKLIIFLNENNVPVQLTSISAPEHKFEGLTQIFQKAYEHEQHISESINNIVDHAIKSKDHATFNFLQWYVAEQHEEEVLFKDILDKIELIGNENHGLYLADQYVKGIAKSRKS

SEQ ID NO: 5026 - protein, 1378 aa, Artificial Sequence
  SARS-CoV-2/India/1-27/2020__EPI_ISL_413522 spike protein (1-1210)(I711C_T1076C) Ferritin construct
MFVFLVLLPLVSSQCVNLTTRTQLPPAYTNSFTRGVYYPDKVFRSSVLHSTQDLFLPFFSNVTWFHAIHVSGTNGTKRFDNPVLPFNDGVYFASTEKSNIIRGWIFGTTLDSKTQSLLIVNNATNVVIKVCEFQFCNDPFLGVYHKNNKSWMESEFRVYSSANNCTFEYVSQPFLMDLEGKQGNFKNLREFVFKNIDGYFKIYSKHTPINLVRDLPQGFSALEPLVDLPIGINITRFQTLLALHRSYLTPGDSSSGWTAGAAAYYVGYLQPRTFLLKYNENGTITDAVDCALDPLSETKCTLKSFTVEKGIYQTSNFRVQPTESIVRFPNITNLCPFGEVFNATRFASVYAWNRKRISNCVADYSVLYNSASFSTFKCYGVSPTKLNDLCFTNVYADSFVIRGDEVIQIAPGQTGKIADYNYKLPDDFTGCVIAWNSNNLDSKVGGNYNYLYRLFRKSNLKPFERDISTEIYQAGSTPCNGVEGFNCYFPLQSYGFQPTNGVGYQPYRVVVLSFELLHAPATVCGPKKSTNLVKNKCVNFNFNGLTGTGVLTESNKKFLPFQQFGRDIADTTDAVRDPQTLEILDITPCSFGGVSVITPGTNTSNQVAVLYQDVNCTEVPVAIHADQLTPTWRVYSTGSNVFQTRAGCLIGAEHVNNSYECDIPIGAGICASYQTQTNSPRRARSVASQSIIAYTMSLGAENSVAYSNNSCAIPTNFTISVTTEILPVSMTKTSVDCTMYICGDSTECSNLLLQYGSFCTQLNRALTGIAVEQDKNTQEVFAQVKQIYKTPPIKDFGGFNFSQILPDPSKPSKRSFIEDLLFNKVTLADAGFIKQYGDCLGDIAARDLICAQKFNGLTVLPPLLTDEMIAQYTSALLAGTITSGWTFGAGAALQIPFAMQMAYRFNGIGVTQNVLYENQKLIANQFNSAIGKIQDSLSSTASALGKLQDVVNQNAQALNTLVKQLSSNFGAISSVLNDILSRLDKVEAEVQIDRLITGRLQSLQTYVTQQLIRAAEIRASANLAATKMSECVLGQSKRVDFCGKGYHLMSFPQSAPHGVVFLHVTYVPAQEKNFTCAPAICHDGKAHFPREGVFVSNGTHWFVTQRNFYEPQIITTDNTFVSGNCDVVIGIVNNTVYDPLQPELDSFKEELDKYFKNHTSPDVDLGDISGINASVVNIQKEIDRLNEVAKNLNESLIDLQELGKYEQYIKGGGGSDIIKLLNEQVNKEMQSSNLYMSMSSWCYTHSLDGAGLFLFDHAAEEYEHAKKLIIFLNENNVPVQLTSISAPEHKFEGLTQIFQKAYEHEQHISESINNIVDHAIKSKDHATFNFLQWYVAEQHEEEVLFKDILDKIELIGNENHGLYLADQYVKGIAKSRKS

SEQ ID NO: 5027 - protein, 1373 aa, Artificial Sequence
  SARS-CoV-2/pangolin/Guangxi/P4L/2017__EPI_ISL_410538 spike protein (1-1205)(I706C_T1071C) Ferritin construct
MFVFLFVLPLVSSQCVNLTTRTGIPPGYTNSSTRGVYYPDKVFRSSILHLTQDLFLPFFSNVTWFNTINYQGGFKKFDNPVLPFNDGVYFASTEKSNIIRGWIFGTTLDARTQSLLIVNNATNVVIKVCEFQFCTDPFLGVYYHNNNKTWVENEFRVYSSANNCTFEYISQPFLMDLEGKQGNFKNLREFVFKNVDGYFKIYSKHTPIDLVRDLPRGFAALEPLVDLPIGINITRFQTLLALHRSYLTPGNLESGWTTGAAAYYVGYLQQRTFLLSYNQNGTITDAVDCSLDPLSETKCTLKSLTVEKGIYQTSNFRVQPTISIVRFPNITNLCPFGEVFNASKFASVYAWNRKRISNCVADYSVLYNSTSFSTFKCYGVSPTKLNDLCFTNVYADSFVVKGDEVRQIAPGQTGVIADYNYKLPDDFTGCVIAWNSVKQDALTGGNYGYLYRLFRKSKLKPFERDISTEIYQAGSTPCNGQVGLNCYYPLERYGFHPTTGVNYQPFRVVVLSFELLNGPATVCGPKLSTTLVKDKCVNFNFNGLTGTGVLTTSKKQFLPFQQFGRDISDTTDAVRDPQTLEILDITPCSFGGVSVITPGTNTSNQVAVLYQDVNCTEVPMAIHAEQLTPAWRVYSAGANVFQTRAGCLVGAEHVNNSYECDIPVGAGICASYHSMSSLRSVNQRSIIAYTMSLGAENSVAYSNNSCAIPTNFTISVTTEILPVSMTKTSVDCTMYICGDSIECSNLLLQYGSFCTQLNRALTGIAVEQDKNTQEVFAQVKQIYKTPPIKDFGGFNFSQILPDPSKPSKRSFIEDLLFNKVTLADAGFIKQYGDCLGDIAARDLICAQKFNGLTVLPPLLTDEMIAQYTSALLAGTITSGWTFGAGAALQIPFAMQMAYRFNGIGVTQNVLYENQKLIANQFNSAIGKIQDSLSSTASALGKLQDVVNQNAQALNTLVKQLSSNFGAISSVLNDILSRLDKVEAEVQIDRLITGRLQSLQTYVTQQLIRAAEIRASANLAATKMSECVLGQSKRVDFCGKGYHLMSFPQSAPHGVVFLHVTYVPAQEKNFTCAPAICHEGKAHFPREGVFVSNGTHWFITQRNFYEPQIITTDNTFVSGSCDVVIGIVNNTVYDPLQPELDSFKEELDKYFKNHTSPDVDLGDISGINASVVNIQKEIDRLNEVAKNLNESPIDLQELGKYEQYIKGGGGSDIIKLLNEQVNKEMQSSNLYMSMSSWCYTHSLDGAGLFLFDHAAEEYEHAKKLIIFLNENNVPVQLTSISAPEHKFEGLTQIFQKAYEHEQHISESINNIVDHAIKSKDHATFNFLQWYVAEQHEEEVLFKDILDKIELIGNENHGLYLADQYVKGIAKSRKS

SEQ ID NO: 5028 - protein, 1373 aa, Artificial Sequence
  SARS-CoV-2/pangolin/Guangxi/P5L/2017__EPI_ISL_410540 spike protein (1-1205)(I706C_T1071C) Ferritin construct
MFVFLFVLPLVSSQCVNLTTRTGIPPGYTNSSTRGVYYPDKVFRSSILHLTQDLFLPFFSNVTWFNTINYQGGFKKFDNPVLPFNDGVYFASTEKSNIIRGWIFGTTLDARTQSLLIVNNATNVVIKVCEFQFCTDPFLGVYYHNNNKTWVENEFRVYSSANNCTFEYISQPFLMDLEGKQGNFKNLREFVFKNVDGYFKIYSKHTPIDLVRDLPRGFAALEPLVDLPIGINITRFQTLLALHRSYLTPGKLESGWTTGAAAYYVGYLQQRTFLLSYNQNGTITDAVDCSLDPLSETKCTLKSLTVEKGIYQTSNFRVQPTISIVRFPNITNLCPFGEVFNASKFASVYAWNRKRISNCVADYSVLYNSTSFSTFKCYGVSPTKLNDLCFTNVYADSFVVKGDEVRQIAPGQTGVIADYNYKLPDDFTGCVIAWNSVKQDALTGGNYGYLYRLFRKSKLKPFERDISTEIYQAGSTPCNGQVGLNCYYPLERYGFHPTTGVNYQPFRVVVLSFELLNGPATVCGPKLSTTLVKDKCVNFNFNGLTGTGVLTTSKKQFLPFQQFGRDISDTTDAVRDPQTLEILDITPCSFGGVSVITPGTNTSNQVAVLYQDVNCTEVPMAIHAEQLTPAWRVYSAGANVFQTRAGCLVGAEHVNNSYECDIPVGAGICASYHSMSSFRSVNQRSIIAYTMSLGAENSVAYSNNSCAIPTNFTISVTTEILPVSMTKTSVDCTMYICGDSIECSNLLLQYGSFCTQLNRALTGIAVEQDKNTQEVFAQVKQIYKTPPIKDFGGFNFSQILPDPSKPSKRSFIEDLLFNKVTLADAGFIKQYGDCLGDIAARDLICAQKFNGLTVLPPLLTDEMIAQYTSALLAGTITSGWTFGAGAALQIPFAMQMAYRFNGIGVTQNVLYENQKLIANQFNSAIGKIQDSLSSTASALGKLQDVVNQNAQALNTLVKQLSSNFGAISSVLNDILSRLDKVEAEVQIDRLITGRLQSLQTYVTQQLIRAAEIRASANLAATKMSECVLGQSKRVDFCGKGYHLMSFPQSAPHGVVFLHVTYVPAQEKNFTCAPAICHEGKAHFPREGVFVSNGTHWFITQRNFYEPQIITTDNTFVSGSCDVVIGIVNNTVYDPLQPELDSFKEELDKYFKNHTSPDVDLGDISGINASVVNIQKEIDRLNEVAKNLNESLIDLQELGKYEQYIKGGGGSDIIKLLNEQVNKEMQSSNLYMSMSSWCYTHSLDGAGLFLFDHAAEEYEHAKKLIIFLNENNVPVQLTSISAPEHKFEGLTQIFQKAYEHEQHISESINNIVDHAIKSKDHATFNFLQWYVAEQHEEEVLFKDILDKIELIGNENHGLYLADQYVKGIAKSRKS

SEQ ID NO: 5029 - protein, 1373 aa, Artificial Sequence
  SARS-CoV-2/pangolin/Guangxi/P5E/2017__EPI_ISL_410541 spike protein (1-1205)(I706C_T1071C) Ferritin construct
MFVFLFVLPLVSSQCVNLTTRTGIPPGYTNSSTRGVYYPDKVFRSSILHLTQDLFLPFFSNVTWFNTITYQGGSKKFDNPVLPFNDGVYFASTEKSNIIRGWIFGTTLDARTQSLLIVNNATNVVIKVCEFQFCTDPFLGVYYHNNNKTWVENEFRVYSSANNCTFEYISQPFLMDLEGKQGNFKNLREFVFKNVDGYFKIYSKHTPIDLVRDLPRGFAALEPLVDLPIGINITRFQTLLALHRSYLTPGKLESGWTTGAAAYYVGYLQQRTFLLSYNQNGTITDAVDCSLDPLSETKCTLKSLTVEKGIYQTSNFRVQPTISIVRFPNITNLCPFGEVFNASKFASVYAWNRKRISNCVADYSVLYNSTSFSTFKCYGVSPTKLNDLCFTNVYADSFVVKGDEVRQIAPGQTGVIADYNYKLPDDFTGCVIAWNSVKQDALTGDNYGYLYRLFRKSKLKPFERDISTEIYQAGSTPCNGQVGLNCYYPLERYGFHPTTGVNYQPFRVVVLSFELLNGPATVCGPKLSTTLVKDKCVNFNFNGLTGTGVLTTSKKQFLPFQQFGRDISDTTDAVRDPQTLEILDITPCSFGGVSVITPGTNTSNQVAVLYQDVNCTEVPMAIHAEQLTPAWRVYSAGANVFQTRAGCLVGAEHVNNSYECDIPVGAGICASYHSMSSFRSVNQRSIIAYTMSLGAENSVAYSNNSCAIPTNFTISVTTEILPVSMTKTSVDCTMYICGDSIECSNLLLQYGSFCTQLNRALTGIAVEQDKNTQEVFAQVKQIYKTPPIKDFGGFNFSQILPDPSKPSKRSFIEDLLFNKVTLADAGFIKQYGDCLGDIAARDLICAQKFNGLTVLPPLLTDEMIAQYTSALLAGTITSGWTFGAGAALQIPFAMQMAYRFNGIGVTQNVLYENQKLIANQFNSAIGKIQDSLSSTASALGKLQDVVNQNAQALNTLVKQLSSNFGAISSVLNDILSRLDKVEAEVQIDRLITGRLQSLQTYVTQQLIRAAEIRASANLAATKMSECVLGQSKRVDFCGKGYHLMSFPQSAPHGVVFLHVTYVPAQEKNFTCAPAICHEGKAHFPREGVFVSNGTHWFITQRNFYEPQIITTDNTFVSGSCDVVIGIVNNTVYDPLQPELDSFKEELDKYFKNHTSPDVDLGDISGINASVVNIQKEIDRLNEVAKNLNESLIDLQELGKYEQYIKGGGGSDIIKLLNEQVNKEMQSSNLYMSMSSWCYTHSLDGAGLFLFDHAAEEYEHAKKLIIFLNENNVPVQLTSISAPEHKFEGLTQIFQKAYEHEQHISESINNIVDHAIKSKDHATFNFLQWYVAEQHEEEVLFKDILDKIELIGNENHGLYLADQYVKGIAKSRKS

SEQ ID NO: 5030 - protein, 1371 aa, Artificial Sequence
  SARS-CoV-2/pangolin/Guangxi/P1E/2017__EPI_ISL_410539 spike protein (1-1203)(I704C_T1069C) Ferritin construct
MFVFLFVLPLVSSQCVNLTTRTGIQPGYTNSSTRGVYYPDKVFRSSILHLTQDLFLPFFSNVTWFNTINYQGGFKKFDNPVLPFNDGVYFASTEKSNIIRGWIFGTTLDARTQSLLIVNNATNVVIKVCEFQFCTDPFLGVYYHNNNKTWVENEFRVYSSANNCTFEYISQPFLMDLEGKQGNFKNLREFVFKNVDGYFKIYSKHTPIDLVRDLPRGFAALEPLVDLPIGINITRFQTLLALHRSYLTPGKLESGWTTGAAAYYVGYLQQRTFLLSYNQNGTITDAVDCSLDPLSETKCTLKSLTVEKGIYQTSNFRVQPTISIVRFPNITNLCPFGEVFNASKFASVYAWNRKRISNCVADYSVLYNSTSFSTFKCYGVSPTKLNDLCFTNVYADSFVVKGDEVRQIAPGQTGVIADYNYKLPDDFTGCVIAWNSVKQDALTGGNYLYRLFRKSKLKPFERDISTEIYQAGSTPCNGQVGLNCYYPLERYGFHPTTGVNYQPFRVVVLSFELLNGPATVCGPKLSTTLVKDKCVNFNFNGLTGTGVLTTSKKQFLPFQQFGRDISDTTDAVRDPQTLEILDITPCSFGGVSVITPGTNTSNQVAVLYQDVNCTEVPMAIHAEQLTPAWRVYSAGANVFQTRAGCLVGAEHVNNSYECDIPVGAGICASYHSMSSLRSVNQRSIIAYTMSLGAENSVAYSNNSCAIPTNFTISVTTEILPVSMTKTSVDCTMYICGDSIECSNLLLQYGSFCTQLNRALTGIAVEQDKNTQEVFAQVKQIYKTPPIKDFGGFNFSQILPDPSKPSKRSFIEDLLFNKVTLADAGFIKQYGDCLGDIAARDLICAQKFNGLTVLPPLLTDEMIAQYTSALLAGTITSGWTFGAGAALQIPFAMQMAYRFNGIGVTQNVLYENQKLIANQFNSAIGKIQDSLSSTASALGKLQDVVNQNAQALNTLVKQLSSNFGAISSVLNDILSRLDKVEAEVQIDRLITGRLQSLQTYVTQQLIRAAEIRASANLAATKMSECVLGQSKRVDFCGKGYHLMSFPQSAPHGVVFLHVTYVPAQEKNFTCAPAICHEGKAHFPREGVFVSNGTHWFITQRNFYEPQIITTDNTFVSGSCDVVIGIVNNTVYDPLQPELDSFKEELDKYFKNHTSPDVDLGDISGINASVVNIQKEIDRLNEVAKNLNESLIDLQELGKYEQYIKGGGGSDIIKLLNEQVNKEMQSSNLYMSMSSWCYTHSLDGAGLFLFDHAAEEYEHAKKLIIFLNENNVPVQLTSISAPEHKFEGLTQIFQKAYEHEQHISESINNIVDHAIKSKDHATFNFLQWYVAEQHEEEVLFKDILDKIELIGNENHGLYLADQYVKGIAKSRKS

SEQ ID NO: 5031 - protein, 1379 aa, Artificial Sequence
  SARS-CoV-2/Wuhan/WIV05/2019__EPI_ISL_402128 spike protein (1-1211)(I714C_Y1110C) Ferritin construct
MFVFLVLLPLVSSQCVNLTTRTQLPPAYTNSFTRGVYYPDKVFRSSVLHSTQDLFLPFFSNVTWFHAIHVSGTNGTKRFDNPVLPFNDGVYFASTEKSNIIRGWIFGTTLDSKTQSLLIVNNATNVVIKVCEFQFCNDPFLGVYYHKNNKSWMESEFRVYSSANNCTFEYVSQPFLMDLEGKQGNFKNLREFVFKNIDGYFKIYSKHTPINLVRDLPQGFSALEPLVDLPIGINITRFQTLLALHRSYLTPGDSSSGWTAGAAAYYVGYLQPRTFLLKYNENGTITDAVDCALDPLSETKCTLKSFTVEKGIYQTSNFRVQPTESIVRFPNITNLCPFGEVFNATRFASVYAWNRKRISNCVADYSVLYNSASFSTFKCYGVSPTKLNDLCFTNVYADSFVIRGDEVRQIAPGQTGKIADYNYKLPDDFTGCVIAWNSNNLDSKVGGNYNYLYRLFRKSNLKPFERDISTEIYQAGSTPCNGVEGFNCYFPLQSYGFQPTNGVGYQPYRVVVLSFELLHAPATVCGPKKSTNLVKNKCVNFNFNGLTGTGVLTESNKKFLPFQQFGRDIADTTDAVRDPQTLEILDITPCSFGGVSVITPGTNTSNQVAVLYQDVNCTEVPVAIHADQLTPTWRVYSTGSNVFQTRAGCLIGAEHVNNSYECDIPIGAGICASYQTQTNSPRRARSVASQSIIAYTMSLGAENSVAYSNNSIACPTNFTISVTTEILPVSMTKTSVDCTMYICGDSTECSNLLLQYGSFCTQLNRALTGIAVEQDKNTQEVFAQVKQIYKTPPIKDFGGFNFSQILPDPSKPSKRSFIEDLLFNKVTLADAGFIKQYGDCLGDIAARDLICAQKFNGLTVLPPLLTDEMIAQYTSALLAGTITSGWTFGAGAALQIPFAMQMAYRFNGIGVTQNVLYENQKLIANQFNSAIGKIQDSLSSTASALGKLQDVVNQNAQALNTLVKQLSSNFGAISSVLNDILSRLDKVEAEVQIDRLITGRLQSLQTYVTQQLIRAAEIRASANLAATKMSECVLGQSKRVDFCGKGYHLMSFPQSAPHGVVFLHVTYVPAQEKNFTTAPAICHDGKAHFPREGVFVSNGTHWFVTQRNFCEPQIITTDNTFVSGNCDVVIGIVNNTVYDPLQPELDSFKEELDKYFKNHTSPDVDLGDISGINASVVNIQKEIDRLNEVAKNLNESLIDLQELGKYEQYIKGGGGSDIIKLLNEQVNKEMQSSNLYMSMSSWCYTHSLDGAGLFLFDHAAEEYEHAKKLIIFLNENNVPVQLTSISAPEHKFEGLTQIFQKAYEHEQHISESINNIVDHAIKSKDHATFNFLQWYVAEQHEEEVLFKDILDKIELIGNENHGLYLADQYVKGIAKSRKS

SEQ ID NO: 5032 - protein, 1375 aa, Artificial Sequence
  SARS-CoV-2/bat/Yunnan/RaTG13/2013__EPI_ISL_402131 spike protein (1-1207)(I710C_Y1106C) Ferritin construct
MFVFLVLLPLVSSQCVNLTTRTQLPPAYTNSSTRGVYYPDKVFRSSVLHLTQDLFLPFFSNVTWFHAIHVSGTNGIKRFDNPVLPFNDGVYFASTEKSNIIRGWIFGTTLDSKTQSLLIVNNATNVVIKVCEFQFCNDPFLGVYYHKNNKSWMESEFRVYSSANNCTFEYVSQPFLMDLEGKQGNFKNLREFVFKNIDGYFKIYSKHTPINLVRDLPPGFSALEPLVDLPIGINITRFQTLLALHRSYLTPGDSSSGWTAGAAAYYVGYLQPRTFLLKYNENGTITDAVDCALDPLSETKCTLKSFTVEKGIYQTSNFRVQPTDSIVRFPNITNLCPFGEVFNATTFASVYAWNRKRISNCVADYSVLYNSTSFSTFKCYGVSPTKLNDLCFTNVYADSFVITGDEVRQIAPGQTGKIADYNYKLPDDFTGCVIAWNSKHIDAKEGGNFNYLYRLFRKANLKPFERDISTEIYQAGSKPCNGQTGLNCYYPLYRYGFYPTDGVGHQPYRVVVLSFELLNAPATVCGPKKSTNLVKNKCVNFNFNGLTGTGVLTESNKKFLPFQQFGRDIADTTDAVRDPQTLEILDITPCSFGGVSVITPGTNASNQVAVLYQDVNCTEVPVAIHADQLTPTWRVYSTGSNVFQTRAGCLIGAEHVNNSYECDIPIGAGICASYQTQTNSRSVASQSIIAYTMSLGAENSVAYSNNSIACPTNFTISVTTEILPVSMTKTSVDCTMYICGDSTECSNLLLQYGSFCTQLNRALTGIAVEQDKNTQEVFAQVKQIYKTPPIKDFGGFNFSQILPDPSKPSKRSFIEDLLFNKVTLADAGFIKQYGDCLGDIAARDLICAQKFNGLTVLPPLLTDEMIAQYTSALLAGTITSGWTFGAGAALQIPFAMQMAYRFNGIGVTQNVLYENQKLIANQFNSAIGKIQDSLSSTASALGKLQDVVNQNAQALNTLVKQLSSNFGAISSVLNDILSRLDKVEAEVQIDRLITGRLQSLQTYVTQQLIRAAEIRASANLAATKMSECVLGQSKRVDFCGKGYHLMSFPQSAPHGVVFLHVTYVPAQEKNFTTAPAICHDGKAHFPREGVFVSNGTHWFVTQRNFCEPQIITTDNTFVSGSCDVVIGIVNNTVYDPLQPELDSFKEELDKYFKNHTSPDVDLGDISGINASVVNIQKEIDRLNEVAKNLNESLIDLQELGKYEQYIKGGGGSDIIKLLNEQVNKEMQSSNLYMSMSSWCYTHSLDGAGLFLFDHAAEEYEHAKKLIIFLNENNVPVQLTSISAPEHKFEGLTQIFQKAYEHEQHISESINNIVDHAIKSKDHATFNFLQWYVAEQHEEEVLFKDILDKIELIGNENHGLYLADQYVKGIAKSRKS

SEQ ID NO: 5033 - protein, 1379 aa, Artificial Sequence
  SARS-CoV-2/Wuhan/HBCDC-HB-01/2019__EPI_ISL_402132 spike protein (1-1211)(I714C_Y1110C) Ferritin construct
MFVFLVLLPLVSSQCVNLTTRTQLPPAYTNSITRGVYYPDKVFRSSVLHSTQDLFLPFFSNVTWFHAIHVSGTNGTKRFDNPVLPFNDGVYFASTEKSNIIRGWIFGTTLDSKTQSLLIVNNATNVVIKVCEFQFCNDPFLGVYYHKNNKSWMESEFRVYSSANNCTFEYVSQPFLMDLEGKQGNFKNLREFVFKNIDGYFKIYSKHTPINLVRDLPQGFSALEPLVDLPIGINITRFQTLLALHRSYLTPGDSSSGWTAGAAAYYVGYLQPRTFLLKYNENGTITDAVDCALDPLSETKCTLKSFTVEKGIYQTSNFRVQPTESIVRFPNITNLCPFGEVFNATRFASVYAWNRKRISNCVADYSVLYNSASFSTFKCYGVSPTKLNDLCFTNVYADSFVIRGDEVRQIAPGQTGKIADYNYKLPDDFTGCVIAWNSNNLDSKVGGNYNYLYRLFRKSNLKPFERDISTEIYQAGSTPCNGVEGFNCYFPLQSYGFQPTNGVGYQPYRVVVLSFELLHAPATVCGPKKSTNLVKNKCVNFNFNGLTGTGVLTESNKKFLPFQQFGRDIADTTDAVRDPQTLEILDITPCSFGGVSVITPGTNTSNQVAVLYQDVNCTEVPVAIHADQLTPTWRVYSTGSNVFQTRAGCLIGAEHVNNSYECDIPIGAGICASYQTQTNSPRRARSVASQSIIAYTMSLGAENSVAYSNNSIACPTNFTISVTTEILPVSMTKTSVDCTMYICGDSTECSNLLLQYGSFCTQLNRALTGIAVEQDKNTQEVFAQVKQIYKTPPIKDFGGFNFSQILPDPSKPSKRSFIEDLLFNKVTLADAGFIKQYGDCLGDIAARDLICAQKFNGLTVLPPLLTDEMIAQYTSALLAGTITSGWTFGAGAALQIPFAMQMAYRFNGIGVTQNVLYENQKLIANQFNSAIGKIQDSLSSTASALGKLQDVVNQNAQALNTLVKQLSSNFGAISSVLNDILSRLDKVEAEVQIDRLITGRLQSLQTYVTQQLIRAAEIRASANLAATKMSECVLGQSKRVDFCGKGYHLMSFPQSAPHGVVFLHVTYVPAQEKNFTTAPAICHDGKAHFPREGVFVSNGTHWFVTQRNFCEPQIITTDNTFVSGNCDVVIGIVNNTVYDPLQPELDSFKEELDKYFKNHTSPDVDLGDISGINASVVNIQKEIDRLNEVAKNLNESLIDLQELGKYEQYIKGGGGSDIIKLLNEQVNKEMQSSNLYMSMSSWCYTHSLDGAGLFLFDHAAEEYEHAKKLIIFLNENNVPVQLTSISAPEHKFEGLTQIFQKAYEHEQHISESINNIVDHAIKSKDHATFNFLQWYVAEQHEEEVLFKDILDKIELIGNENHGLYLADQYVKGIAKSRKS

SEQ ID NO: 5034 - protein, 1379 aa, Artificial Sequence
  SARS-CoV-2/Guangdong/20SF028/2020__EPI_ISL_403936 spike protein (1-1211)(I714C_Y1110C) Ferritin construct
MFVFLVLLPLVSSQCVNLTTRTQLPPAYTNSFTRGVYYPDKVFRSSVLYSTQDLFLPFFSNVTWFHAIHVSGTNGTKRFDNPVLPFNDGVYFASTEKSNIIRGWIFGTTLDSKTQSLLIVNNATNVVIKVCEFQFCNDPFLGVYYHKNNKSWMESEFRVYSSANNCTFEYVSQPFLMDLEGKQGNFKNLREFVFKNIDGYFKIYSKHTPINLVRDLPQGFSALEPLVDLPIGINITRFQTLLALHRSYLTPGDSSSGWTAGAAAYYVGYLQPRTFLLKYNENGTITDAVDCALDPLSETKCTLKSFTVEKGIYQTSNFRVQPTESIVRFPNITNLCPFGEVFNATRFASVYAWNRKRISNCVADYSVLYNSASFSTFKCYGVSPTKLNDLCFTNVYADSFVIRGDEVRQIAPGQTGKIADYNYKLPDDFTGCVIAWNSNNLDSKVGGNYNYLYRLFRKSNLKPFERDISTEIYQAGSTPCNGVEGFNCYFPLQSYGFQPTNGVGYQPYRVVVLSFELLHAPATVCGPKKSTNLVKNKCVNFNFNGLTGTGVLTESNKKFLPFQQFGRDIADTTDAVRDPQTLEILDITPCSFGGVSVITPGTNTSNQVAVLYQDVNCTEVPVAIHADQLTPTWRVYSTGSNVFQTRAGCLIGAEHVNNSYECDIPIGAGICASYQTQTNSPRRARSVASQSIIAYTMSLGAENSVAYSNNSIACPTNFTISVTTEILPVSMTKTSVDCTMYICGDSTECSNLLLQYGSFCTQLNRALTGIAVEQDKNTQEVFAQVKQIYKTPPIKDFGGFNFSQILPDPSKPSKRSFIEDLLFNKVTLADAGFIKQYGDCLGDIAARDLICAQKFNGLTVLPPLLTDEMIAQYTSALLAGTITSGWTFGAGAALQIPFAMQMAYRFNGIGVTQNVLYENQKLIANQFNSAIGKIQDSLSSTASALGKLQDVVNQNAQALNTLVKQLSSNFGAISSVLNDILSRLDKVEAEVQIDRLITGRLQSLQTYVTQQLIRAAEIRASANLAATKMSECVLGQSKRVDFCGKGYHLMSFPQSAPHGVVFLHVTYVPAQEKNFTTAPAICHDGKAHFPREGVFVSNGTHWFVTQRNFCEPQIITTDNTFVSGNCDVVIGIVNNTVYDPLQPELDSFKEELDKYFKNHTSPDVDLGDISGINASVVNIQKEIDRLNEVAKNLNESLIDLQELGKYEQYIKGGGGSDIIKLLNEQVNKEMQSSNLYMSMSSWCYTHSLDGAGLFLFDHAAEEYEHAKKLIIFLNENNVPVQLTSISAPEHKFEGLTQIFQKAYEHEQHISESINNIVDHAIKSKDHATFNFLQWYVAEQHEEEVLFKDILDKIELIGNENHGLYLADQYVKGIAKSRKS

SEQ ID NO: 5035 - protein, 1379 aa, Artificial Sequence
  SARS-CoV-2/Shenzhen/SZTH-001/2020__EPI_ISL_406592 spike protein (1-1211)(I714C_Y1110C) Ferritin construct
MFVFLVLLPLVSSQCVNLTTRTQLPPAYTNSFTRGVYYPDKVFRSSVLHSTQDLFLPFFSNVTWFHAIHVSGTNGTKRFDNPVLPFNDGVYFASTEKSNIIRGWIFGTTLDSKTQSLLIVNNATNVVIKVCEFQFCNDPFLGVYYHKNNKSWMESEFRVYSSANNCTFEYVSQPFLMDLEGKQGNFKNLREFVFKNIDGYFKIYSKHTPINLVRDLPQGFSALEPLVDLPIGINITRFQTLLALHRSYLTPGDSSSGWTAGAAAYYVGYLQPRTFLLKYNENGTITDAVDCALDPLSETKCTLKSFTVEKGIYQTSNFRVQPTESIVRFPNITNLCPFGEVFNATRFASVYAWNRKRISNCVADYSVLYNSASFSTFKCYGVSPTKLNDLCFTNVYADSFVIRGDEVRQIAPGQTGKIADYNYKLPDDFTGCVIAWNSNNLDSKVGGNYNYLYRLFRKSNLKPFERDISTEIYQAGSTPCNGVEGFNCYFPLQSYGFQPTNGVGYQPYRVVVLSFELLHAPATVCGPKKSTNLVKNKCVNFNFNGLTGTGVLTESNKKFLPFQQFGRDIADTTDAVRDPQTLEILDITPCSFGGVSVITPGTNTSNQVAVLYQDVNCTEVPVAIHADQLTPTWRVYSTGSNVFQTRAGCLIGAEHVNNSYECDIPIGAGICASYQTQTNSPRRARSVASQSIIAYTMSLGAENSVAYSNNSIACPTNFTISVTTEILPVSMTKTSVDCTMYICGDSTECSNLLLQYGSFCTQLNRALTGIAVEQDKNTQEVFAQVKQIYKTPPIKDFGGFNFSQILPDPSKPSKRSFIEDLLFNKVTLADAGFIKQYGDCLGDIAARDLICAQKFNGLTVLPPLLTDEMIAQYTSALLAGTITSGWTFGAGAALQIPFAMQMAYRFNGIGVTQNVLYENQKLIANQFNSAIGKIQDSLSSTASALGKLQDVVNQNAQALNTLVKQLSSNFGAISSVLNDILSRLDKVEAEVQIDRLITGRLQSLQTYVTQQLIRAAEIRASANLAATKMSECVLGQSKRVDFCGKGYHLMSFPQSAPHGVVFLHVTYVPAQEKNFTTAPAICHDGKAHFPREGVFVSNGTHWFVTQRNFCEPQIITTDNTFVSGNCDVLIGIVNNTVYDPLQPELDSFKEELDKYFKNHTSPDVDLGDISGINASVVNIQKEIDRLNEVAKNLNESLIDLQELGKYEQYIKGGGGSDIIKLLNEQVNKEMQSSNLYMSMSSWCYTHSLDGAGLFLFDHAAEEYEHAKKLIIFLNENNVPVQLTSISAPEHKFEGLTQIFQKAYEHEQHISESINNIVDHAIKSKDHATFNFLQWYVAEQHEEEVLFKDILDKIELIGNENHGLYLADQYVKGIAKSRKS

SEQ ID NO: 5036 - protein, 1379 aa, Artificial Sequence
  SARS-CoV-2/Shenzhen/SZTH-004/2020__EPI_ISL_406595 spike protein (1-1211)(I714C_Y1110C) Ferritin construct
MFVFLVLLPLVSSQCVNLTTRTQLPPAYTNSFTRGVYYPDKVFRSSVLHSTQDLFLPFFSNVTWFHAIHVSGTNGTKRFDNPVLPFNDGVYFASTEKSNIIRGWIFGTTLDSKTQSLLIVNNATNVVIKVCEFQFCNDPFLGVYYHKNNKSWMESEFRVYSSANNCTFEYVSQPFLMDLEGKQGNFKNLREFVFKNIDGYFKIYSKHTPINLVRDLPQGFSALEPLVDLPIGINITRFQTLLALHRSYLTPGDSSSGWTAGAAAYYVGYLQPRTFLLKYNENGTITDAVDCALDPLSETKCTLKSFTVEKGIYQTSNFRVQPTESIVRFPNITNLCPFGEVFNATRFASVYAWDRKRISNCVAYYSVLYNSASFSTFKCYGVSPTKLNDLCFTNVYADSFVIRGDEVRQIAPGQTGKIADYNYKLPDDFTGCVIAWNSNNLDSKVGGNYNYLYRLFRKSNLKPFERDISTEIYQAGSTPCNGVEGFNCYFPLQSYGFQPTNGVGYQPYRVVVLSFELLHAPATVCGPKKSTNLVKNKCVNFNFNGLTGTGVLTESNKKFLPFQQFGRDIADTTDAVRDPQTLEILDITPCSFGGVSVITPGTNTSNQVAVLYQDVNCTEVPVAIHADQLTPTWRVYSTGSNVFQTRAGCLIGAEHVNNSYECDIPIGAGICASYQTQTNSPRRARSVASQSIIAYTMSLGAENSVAYSNNSIACPTNFTISVTTEILPVSMTKTSVDCTMYICGDSTECSNLLLQYGSFCTQLNRALTGIAVEQDKNTQEVFAQVKQIYKTPPIKDFGGFNFSQILPDPSKPSKRSFIEDLLFNKVTLADAGFIKQYGDCLGDIAARDLICAQKFNGLTVLPPLLTDEMIAQYTSALLAGTITSGWTFGAGAALQIPFAMQMAYRFNGIGVTQNVLYENQKLIANQFNSAIGKIQDSLSSTASALGKLQDVVNQNAQALNTLVKQLSSNFGAISSVLNDILSRLDKVEAEVQIDRLITGRLQSLQTYVTQQLIRAAEIRASANLAATKMSECVLGQSKRVDFCGKGYHLMSFPQSAPHGVVFLHVTYVPAQEKNFTTAPAICHDGKAHFPREGVFVSNGTHWFVTQRNFCEPQIITTDNTFVSGNCDVVIGIVNNTVYDPLQPELDSFKEELDKYFKNHTSPDVDLGDISGINASVVNIQKEIDRLNEVAKNLNESLIDLQELGKYEQYIKGGGGSDIIKLLNEQVNKEMQSSNLYMSMSSWCYTHSLDGAGLFLFDHAAEEYEHAKKLIIFLNENNVPVQLTSISAPEHKFEGLTQIFQKAYEHEQHISESINNIVDHAIKSKDHATFNFLQWYVAEQHEEEVLFKDILDKIELIGNENHGLYLADQYVKGIAKSRKS

SEQ ID NO: 5037 - protein, 1379 aa, Artificial Sequence
  SARS-CoV-2/France/IDF0372/2020__EPI_ISL_406596 spike protein (1-1211)(I714C_Y1110C) Ferritin construct
MFVFLVLLPLVSSQCVNLTTRTQLPPAYTNSFTRGVYYPDKVFRSSVLHSTQDLFLPFFSNVTWFHAIHVSGTNGTKRFDNPVLPFNDGVYFASTEKSNIIRGWIFGTTLDSKTQSLLIVNNATNVVIKVCEFQFCNDPFLGVYYHKNNKSWMESEFRVYSSANNCTFEYVSQPFLMDLEGKQGNFKNLREFVFKNIDGYFKIYSKHTPINLVRDLPQGFSALEPLVDLPIGINITRFQTLLALHRSYLTPGDSSSGWTAGAAAYYVGYLQPRTFLLKYNENGTITDAVDCALDPLSETKCTLKSFTVEKGIYQTSNFRVQPTESIVRFPNITNLCPFGEVFNATRFASVYAWNRKRISNCVADYSFLYNSASFSTFKCYGVSPTKLNDLCFTNVYADSFVIRGDEVRQIAPGQTGKIADYNYKLPDDFTGCVIAWNSNNLDSKVGGNYNYLYRLFRKSNLKPFERDISTEIYQAGSTPCNGVEGFNCYFPLQSYGFQPTNGVGYQPYRVVVLSFELLHAPATVCGPKKSTNLVKNKCVNFNFNGLTGTGVLTESNKKFLPFQQFGRDIADTTDAVRDPQTLEILDITPCSFGGVSVITPGTNTSNQVAVLYQDVNCTEVPVAIHADQLTPTWRVYSTGSNVFQTRAGCLIGAEHVNNSYECDIPIGAGICASYQTQTNSPRRARSVASQSIIAYTMSLGAENSVAYSNNSIACPTNFTISVTTEILPVSMTKTSVDCTMYICGDSTECSNLLLQYGSFCTQLNRALTGIAVEQDKNTQEVFAQVKQIYKTPPIKDFGGFNFSQILPDPSKPSKRSFIEDLLFNKVTLADAGFIKQYGDCLGDIAARDLICAQKFNGLTVLPPLLTDEMIAQYTSALLAGTITSGWTFGAGAALQIPFAMQMAYRFNGIGVTQNVLYENQKLIANQFNSAIGKIQDSLSSTASALGKLQDVVNQNAQALNTLVKQLSSNFGAISSVLNDILSRLDKVEAEVQIDRLITGRLQSLQTYVTQQLIRAAEIRASANLAATKMSECVLGQSKRVDFCGKGYHLMSFPQSAPHGVVFLHVTYVPAQEKNFTTAPAICHDGKAHFPREGVFVSNGTHWFVTQRNFCEPQIITTDNTFVSGNCDVVIGIVNNTVYDPLQPELDSFKEELDKYFKNHTSPDVDLGDISGINASVVNIQKEIDRLNEVAKNLNESLIDLQELGKYEQYIKGGGGSDIIKLLNEQVNKEMQSSNLYMSMSSWCYTHSLDGAGLFLFDHAAEEYEHAKKLIIFLNENNVPVQLTSISAPEHKFEGLTQIFQKAYEHEQHISESINNIVDHAIKSKDHATFNFLQWYVAEQHEEEVLFKDILDKIELIGNENHGLYLADQYVKGIAKSRKS

SEQ ID NO: 5038 - protein, 1379 aa, Artificial Sequence
  SARS-CoV-2/Australia/VIC01/2020__EPI_ISL_406844 spike protein (1-1211)(I714C_Y1110C) Ferritin construct
MFVFLVLLPLVSSQCVNLTTRTQLPPAYTNSFTRGVYYPDKVFRSSVLHSTQDLFLPFFSNVTWFHAIHVSGTNGTKRFDNPVLPFNDGVYFASTEKSNIIRGWIFGTTLDSKTQSLLIVNNATNVVIKVCEFQFCNDPFLGVYYHKNNKSWMESEFRVYSSANNCTFEYVSQPFLMDLEGKQGNFKNLREFVFKNIDGYFKIYSKHTPINLVRDLPQGFSALEPLVDLPIGINITRFQTLLALHRRYLTPGDSSSGWTAGAAAYYVGYLQPRTFLLKYNENGTITDAVDCALDPLSETKCTLKSFTVEKGIYQTSNFRVQPTESIVRFPNITNLCPFGEVFNATRFASVYAWNRKRISNCVADYSVLYNSASFSTFKCYGVSPTKLNDLCFTNVYADSFVIRGDEVRQIAPGQTGKIADYNYKLPDDFTGCVIAWNSNNLDSKVGGNYNYLYRLFRKSNLKPFERDISTEIYQAGSTPCNGVEGFNCYFPLQSYGFQPTNGVGYQPYRVVVLSFELLHAPATVCGPKKSTNLVKNKCVNFNFNGLTGTGVLTESNKKFLPFQQFGRDIADTTDAVRDPQTLEILDITPCSFGGVSVITPGTNTSNQVAVLYQDVNCTEVPVAIHADQLTPTWRVYSTGSNVFQTRAGCLIGAEHVNNSYECDIPIGAGICASYQTQTNSPRRARSVASQSIIAYTMSLGAENSVAYSNNSIACPTNFTISVTTEILPVSMTKTSVDCTMYICGDSTECSNLLLQYGSFCTQLNRALTGIAVEQDKNTQEVFAQVKQIYKTPPIKDFGGFNFSQILPDPSKPSKRSFIEDLLFNKVTLADAGFIKQYGDCLGDIAARDLICAQKFNGLTVLPPLLTDEMIAQYTSALLAGTITSGWTFGAGAALQIPFAMQMAYRFNGIGVTQNVLYENQKLIANQFNSAIGKIQDSLSSTASALGKLQDVVNQNAQALNTLVKQLSSNFGAISSVLNDILSRLDKVEAEVQIDRLITGRLQSLQTYVTQQLIRAAEIRASANLAATKMSECVLGQSKRVDFCGKGYHLMSFPQSAPHGVVFLHVTYVPAQEKNFTTAPAICHDGKAHFPREGVFVSNGTHWFVTQRNFCEPQIITTDNTFVSGNCDVVIGIVNNTVYDPLQPELDSFKEELDKYFKNHTSPDVDLGDISGINASVVNIQKEIDRLNEVAKNLNESLIDLQELGKYEQYIKGGGGSDIIKLLNEQVNKEMQSSNLYMSMSSWCYTHSLDGAGLFLFDHAAEEYEHAKKLIIFLNENNVPVQLTSISAPEHKFEGLTQIFQKAYEHEQHISESINNIVDHAIKSKDHATFNFLQWYVAEQHEEEVLFKDILDKIELIGNENHGLYLADQYVKGIAKSRKS

SEQ ID NO: 5039 - protein, 1379 aa, Artificial Sequence
  SARS-CoV-2/Germany/BavPat1/2020__EPI_ISL_406862 spike protein (1-1211)(I714C_Y1110C) Ferritin construct
MFVFLVLLPLVSSQCVNLTTRTQLPPAYTNSFTRGVYYPDKVFRSSVLHSTQDLFLPFFSNVTWFHAIHVSGTNGTKRFDNPVLPFNDGVYFASTEKSNIIRGWIFGTTLDSKTQSLLIVNNATNVVIKVCEFQFCNDPFLGVYYHKNNKSWMESEFRVYSSANNCTFEYVSQPFLMDLEGKQGNFKNLREFVFKNIDGYFKIYSKHTPINLVRDLPQGFSALEPLVDLPIGINITRFQTLLALHRSYLTPGDSSSGWTAGAAAYYVGYLQPRTFLLKYNENGTITDAVDCALDPLSETKCTLKSFTVEKGIYQTSNFRVQPTESIVRFPNITNLCPFGEVFNATRFASVYAWNRKRISNCVADYSVLYNSASFSTFKCYGVSPTKLNDLCFTNVYADSFVIRGDEVRQIAPGQTGKIADYNYKLPDDFTGCVIAWNSNNLDSKVGGNYNYLYRLFRKSNLKPFERDISTEIYQAGSTPCNGVEGFNCYFPLQSYGFQPTNGVGYQPYRVVVLSFELLHAPATVCGPKKSTNLVKNKCVNFNFNGLTGTGVLTESNKKFLPFQQFGRDIADTTDAVRDPQTLEILDITPCSFGGVSVITPGTNTSNQVAVLYQGVNCTEVPVAIHADQLTPTWRVYSTGSNVFQTRAGCLIGAEHVNNSYECDIPIGAGICASYQTQTNSPRRARSVASQSIIAYTMSLGAENSVAYSNNSIACPTNFTISVTTEILPVSMTKTSVDCTMYICGDSTECSNLLLQYGSFCTQLNRALTGIAVEQDKNTQEVFAQVKQIYKTPPIKDFGGFNFSQILPDPSKPSKRSFIEDLLFNKVTLADAGFIKQYGDCLGDIAARDLICAQKFNGLTVLPPLLTDEMIAQYTSALLAGTITSGWTFGAGAALQIPFAMQMAYRFNGIGVTQNVLYENQKLIANQFNSAIGKIQDSLSSTASALGKLQDVVNQNAQALNTLVKQLSSNFGAISSVLNDILSRLDKVEAEVQIDRLITGRLQSLQTYVTQQLIRAAEIRASANLAATKMSECVLGQSKRVDFCGKGYHLMSFPQSAPHGVVFLHVTYVPAQEKNFTTAPAICHDGKAHFPREGVFVSNGTHWFVTQRNFCEPQIITTDNTFVSGNCDVVIGIVNNTVYDPLQPELDSFKEELDKYFKNHTSPDVDLGDISGINASVVNIQKEIDRLNEVAKNLNESLIDLQELGKYEQYIKGGGGSDIIKLLNEQVNKEMQSSNLYMSMSSWCYTHSLDGAGLFLFDHAAEEYEHAKKLIIFLNENNVPVQLTSISAPEHKFEGLTQIFQKAYEHEQHISESINNIVDHAIKSKDHATFNFLQWYVAEQHEEEVLFKDILDKIELIGNENHGLYLADQYVKGIAKSRKS

SEQ ID NO: 5040 - protein, 1379 aa, Artificial Sequence
  SARS-CoV-2/Wuhan/HBCDC-HB-02/2020__EPI_ISL_412978 spike protein (1-1211)(I714C_Y1110C) Ferritin construct
MFVFLVLLPLVSSQCVNLTTRTQLPPAYTNSFTRGVYYPDKVFRSSVLHSTQDLFLPFFSNVTWFHAIHVSGTNGTKRFDNPVLPFNDGVYFASTEKSNIIRGWIFGTTLDSKTQSLLIVNNATNVVIKVCEFQFCNDPFLGVYYHKNNKSWMESEFRVYSSANNCTFEYVSQPFLMDLEGKQGNFKNLREFVFKNIDGYFKIYSKHTPINLVRDLPQGFSALEPLVDLPIGINITRFQTLLALHRSYLTPGDSSSGWTAGAAAYYVGYLQPRTFLLKYNENGTITDAVDCALDPLSETKCTLKSFTVEKGIYQTSNFRVQPTESIVRFPNITNLCPFGEVFNATRFASVYAWNRKRISNCVADYSVLYNSASFSTFKCYGVSPTKLNDLCFTNVYADSFVIRGDEVRQIAPGQTGKIADYNYKLPDDFTGCVIAWNSNNLDSKVGGNYNYLYRLFRKSNLKPFERDISTEIYQAGSTPCNGVEGFNCYFPLQSYGFQPTNGVGYQPYRVVVLSFELLHAPATVCGPKKSTNLVKNKCVNFNFNGLTGTGVLTESNKKFLPFQQFGRDIADTTDAVRDPQTLEILDITPCSFGGVSVITPGTNTSNQVAVLYQDVNCTEVPVAIHADQLTPTWRVYSTGSNVFQTRAGCLIGAEHVNNSYECDIPIGAGICASYQTQTNSPRRARSVASQSIIAYTMSLGAENSVAYSNNSIACPTNFTISVTTEILPVSMTKTSVDCTMYICGDSTECSNFLLQYGSFCTQLNRALTGIAVEQDKNTQEVFAQVKQIYKTPPIKDFGGFNFSQILPDPSKPSKRSFIEDLLFNKVTLADAGFIKQYGDCLGDIAARDLICAQKFNGLTVLPPLLTDEMIAQYTSALLAGTITSGWTFGAGAALQIPFAMQMAYRFNGIGVTQNVLYENQKLIANQFNSAIGKIQDSLSSTASALGKLQDVVNQNAQALNTLVKQLSSNFGAISSVLNDILSRLDKVEAEVQIDRLITGRLQSLQTYVTQQLIRAAEIRASANLAATKMSECVLGQSKRVDFCGKGYHLMSFPQSAPHGVVFLHVTYVPAQEKNFTTAPAICHDGKAHFPREGVFVSNGTHWFVTQRNFCEPQIITTDNTFVSGNCDVVIGIVNNTVYDPLQPELDSFKEELDKYFKNHTSPDVDLGDISGINASVVNIQKEIDRLNEVAKNLNESLIDLQELGKYEQYIKGGGGSDIIKLLNEQVNKEMQSSNLYMSMSSWCYTHSLDGAGLFLFDHAAEEYEHAKKLIIFLNENNVPVQLTSISAPEHKFEGLTQIFQKAYEHEQHISESINNIVDHAIKSKDHATFNFLQWYVAEQHEEEVLFKDILDKIELIGNENHGLYLADQYVKGIAKSRKS

SEQ ID NO: 5041 - protein, 1379 aa, Artificial Sequence
  SARS-CoV-2/Australia/QLD02/2020__EPI_ISL_407896 spike protein (1-1211)(I714C_Y1110C) Ferritin construct
MFVFLVLLPLVSSQCVNLTTRTQLPPAYTNSFTRGVYYPDKVFRSSVLHSTQDLFLPFFSNVTWFHAIHVSGTNGTKRFDNPVLPFNDGVYFASTEKSNIIRGWIFGTTLDSKTQSLLIVNNATNVVIKVCEFQFCNDPFLGVYYHKNNKSWMESEFRVYSSANNCTFEYVSQPFLMDLEGKQGNFKNLREFVFKNIDGYFKIYSKHTPINLVRDLPQGFSALEPLVDLPIGINITRFQTLLALHRSYLTPGDSSSGWTAGAAAYYVGYLQPRTFLLKYNENGTITDAVDCALDPLSETKCTLKSFTVEKGIYQTSNFRVQPTESIVRFPNITNLCPFGEVFNATRFASVYAWNRKRISNCVADYSVLYNSASFSTFKCYGVSPTKLNDLCFTNVYADSFVIRGDEVRQIAPGQTGKIADYNYKLPDDFTGCVIAWNSNNLDSKVGGNYNYLYRLFRKSNLKPFERDISTEIYQAGSTPCNGVEGFNCYFPLQSYGFQPTNGVGYQPYRVVVLSFELLHAPATVCGPKKSTNLVKNKCVNFNFNGLTGTGVLTESNKKFLPFQQFGRDIADTTDAVRDPQTLEILDITPCSFGGVSVITPGTNTSNQVAVLYQDVNCTEVPVAIHADQLTPTWRVYSTGSNVFQTRAGCLIGAEHVNNSYECDIPIGAGICASYQTQTNSPRRARSVASQSIIAYTMSLGAENSVAYSNNSIACPTNFTISVTTEILPVSMTKTSVDCTMYICGDSTECSNLLLQYGSFCTQLNRALTGIAVEQDKNTQEVFAQVKQIYKTPPIKDFGGFNFSQILPDPSKPSKRSFIEDLLFNKVTLADAGFIKQYGDCLGDIAARDLICAQKFNGLTVLPPLLTDEMIAQYTSALLAGTITSGWTFGAGAALQIPFAMQMAYRFNGIGVTQNVLYENQKLIANQFNSAIGKIQDSLSSTASALGKLQDVVNQNAQALNTLVKQLSSNFGAISSVLNDILSRLDKVEAEVQIDRLITGRLQSLQTYVTQQLIRAAEIRASANLAATKMSECVLGQSKRVDFCGKGYHLMSFPQSAPHGVVFLHVTYVPAQEKNFTTAPAICHDGKAHFPREGVFVSNGTHWFVTQRNFCEPQIITTDNTFVSGNCDVVIGIVNNTVYDPLQLELDSFKEELDKYFKNHTSPDVDLGDISGINASVVNIQKEIDRLNEVAKNLNESLIDLQELGKYEQYIKGGGGSDIIKLLNEQVNKEMQSSNLYMSMSSWCYTHSLDGAGLFLFDHAAEEYEHAKKLIIFLNENNVPVQLTSISAPEHKFEGLTQIFQKAYEHEQHISESINNIVDHAIKSKDHATFNFLQWYVAEQHEEEVLFKDILDKIELIGNENHGLYLADQYVKGIAKSRKS

SEQ ID NO: 5042 - protein, 1379 aa, Artificial Sequence
  SARS-CoV-2/India/1-31/2020__EPI_ISL_413523 spike protein (1-1211)(I714C_Y1110C) Ferritin construct
MFVFLVLLPLVSSQCVNLTTRTQLPPAYTNSFTRGVYYPDKVFRSSVLHSTQDLFLPFFSNVTWFHAIHVSGTNGTKRFDNPVLPFNDGVYFASTEKSNIIRGWIFGTTLDSKTQSLLIVNNATNVVIKVCEFQFCNDPFLGVYYHKNNKSWMESEFRVYSSANNCTFEYVSQPFLMDLEGKQGNFKNLREFVFKNIDGYFKIYSKHTPINLVRDLPQGFSALEPLVDLPIGINITRFQTLLALHRSYLTPGDSSSGWTAGAAAYYVGYLQPRTFLLKYNENGTITDAVDCALDPLSETKCTLKSFTVEKGIYQTSNFRVQPTESIVRFPNITNLCPFGEVFNATRFASVYAWNRKRISNCVADYSVLYNSASFSTFKCYGVSPTKLNDLCFTNVYADSFVIRGDEVRQIAPGQTGKIADYNYKLPDDFTGCVIAWNSNNLDSKVGGNYNYLYRLFRKSNLKPFERDISTEIYQAGSTPCNGVEGFNCYFPLQSYGFQPTNGVGYQPYRVVVLSFELLHAPATVCGPKKSTNLVKNKCVNFNFNGLTGTGVLTESNKKFLPFQQFGRDIADTTDAVRDPQTLEILDITPCSFGGVSVITPGTNTSNQVAVLYQDVNCTEVPVAIHADQLTPTWRVYSTGSNVFQTRAGCLIGAEHVNNSYECDIPIGAGICASYQTQTNSPRRARSVASQSIIAYTMSLGAENSVAYSNNSIACPTNFTISVTTEILPVSMTKTSVDCTMYICGDSTECSNLLLQYGSFCTQLNRALTGIAVEQDKNTQEVFAQVKQIYKTPPIKDFGGFNFSQILPDPSKPSKRSFIEDLLFNKVTLADAGFIKQYGDCLGDIAARDLICAQKFNGLTVLPPLLTDEMIAQYTSALLAGTITSGWTFGAGAALQIPFAMQMAYRFNGIGVTQNVLYENQKLIANQFNSVIGKIQDSLSSTASALGKLQDVVNQNAQALNTLVKQLSSNFGAISSVLNDILSRLDKVEAEVQIDRLITGRLQSLQTYVTQQLIRAAEIRASANLAATKMSECVLGQSKRVDFCGKGYHLMSFPQSAPHGVVFLHVTYVPAQEKNFTTAPAICHDGKAHFPREGVFVSNGTHWFVTQRNFCEPQIITTDNTFVSGNCDVVIGIVNNTVYDPLQPELDSFKEELDKYFKNHTSPDVDLGDISGINASVVNIQKEIDRLNEVAKNLNESLIDLQELGKYEQYIKGGGGSDIIKLLNEQVNKEMQSSNLYMSMSSWCYTHSLDGAGLFLFDHAAEEYEHAKKLIIFLNENNVPVQLTSISAPEHKFEGLTQIFQKAYEHEQHISESINNIVDHAIKSKDHATFNFLQWYVAEQHEEEVLFKDILDKIELIGNENHGLYLADQYVKGIAKSRKS

SEQ ID NO: 5043 - protein, 1379 aa, Artificial Sequence
  SARS-CoV-2/Guangdong/GD2020087-P0008/2020__EPI_ISL_413863 spike protein (1-1211)(I714C_Y1110C) Ferritin construct
MFVFLVLLPLVSSQCVNLTTRTQLPPAYTNSFTRGVYYPDKVFRSSVLHSTQDLFLPFFSNVTWFHAIHVSGTNGTKRFDNPVLPFNDGVYFASTEKSNIIRGWIFGTTLDSKTQSLLIVNNATNVVIKVCEFQFCNDPFLGVYYHKNNKSWMESEFRVYSSANNCTFEYVSQPFLMDLEGKQGNFKNLREFVFKNIDGYFKIYSKHTPINLVRDLPQGFSALEPLVDLPIGINITRFQTLLALHRSYLTPGDSSSGWTAGAAAYYVGYLQPRTFLLKYNENGTITDAVDCALDPLSETKCTLKSFTVEKGIYQTSNFRVQPTESIVRFPNITNLCPFGEVFNATRFASVYAWNRKRISNCVADYSVLYNSASFSTFKCYGVSPTKLNDLCFTNVYADSFVIRGDEVREIAPGQTGKIADYNYKLPDDFTGCVIAWNSNNLDSKVGGNYNYLYRLFRKSNLKPFERDISTEIYQAGSTPCNGVEGFNCYFPLQSYGFQPTNGVGYQPYRVVVLSFELLHAPATVCGPKKSTNLVKNKCVNFNFNGLTGTGVLTESNKKFLPFQQFGRDIADTTDAVRDPQTLEILDITPCSFGGVSVITPGTNTSNQVAVLYQDVNCTEVPVAIHADQLTPTWRVYSTGSNVFQTRAGCLIGAEHVNNSYECDIPIGAGICASYQTQTNSPRRARSVASQSIIAYTMSLGAENSVAYSNNSIACPTNFTISVTTEILPVSMTKTSVDCTMYICGDSTECSNLLLQYGSFCTQLNRALTGIAVEQDKNTQEVFAQVKQIYKTPPIKDFGGFNFSQILPDPSKPSKRSFIEDLLFNKVTLADAGFIKQYGDCLGDIAARDLICAQKFNGLTVLPPLLTDEMIAQYTSALLAGTITSGWTFGAGAALQIPFAMQMAYRFNGIGVTQNVLYENQKLIANQFNSAIGKIQDSLSSTASALGKLQDVVNQNAQALNTLVKQLSSNFGAISSVLNDILSRLDKVEAEVQIDRLITGRLQSLQTYVTQQLIRAAEIRASANLAATKMSECVLGQSKRVDFCGKGYHLMSFPQSAPHGVVFLHVTYVPAQEKNFTTAPAICHDGKAHFPREGVFVSNGTHWFVTQRNFCEPQIITTDNTFVSGNCDVVIGIVNNTVYDPLQPELDSFKEELDKYFKNHTSPDVDLGDISGINASVVNIQKEIDRLNEVAKNLNESLIDLQELGKYEQYIKGGGGSDIIKLLNEQVNKEMQSSNLYMSMSSWCYTHSLDGAGLFLFDHAAEEYEHAKKLIIFLNENNVPVQLTSISAPEHKFEGLTQIFQKAYEHEQHISESINNIVDHAIKSKDHATFNFLQWYVAEQHEEEVLFKDILDKIELIGNENHGLYLADQYVKGIAKSRKS

SEQ ID NO: 5044 - protein, 1379 aa, Artificial Sequence
  SARS-CoV-2/Sweden/01/2020__EPI_ISL_411951 spike protein (1-1211)(I714C_Y1110C) Ferritin construct
MFVFLVLLPLVSSQCVNLTTRTQLPPAYTNSFTRGVYYPDKVFRSSVLHSTQDLFLPFFSNVTWFHAIHVSGTNGTKRFDNPVLPFNDGVYFASTEKSNIIRGWIFGTTLDSKTQSLLIVNNATNVVIKVCEFQFCNDPFLGVYYHKNNKSWMESEFRVYSSANNCTFEYVSQPFLMDLEGKQGNFKNLREFVFKNIDGYFKIYSKHTPINLVRDLPQGFSALEPLVDLPIGINITRFQTLLALHRSYLTPGDSSSGWTAGAAAYYVGYLQPRTFLLKYNENGTITDAVDCALDPLSETKCTLKSFTVEKGIYQTSNFRVQPTESIVRFPNITNLCPFGEVFNATRFASVYAWNRKRISNCVADYSVLYNSASFSTFKCYGVSPTKLNDLCFTNVYADSFVIRGDEVRQIAPGQTGKIADYNYKLPDDFTGCVIAWNSNNLDSKVGGNYNYLYRLFRKSNLKPFERDISTEIYQAGSTPCNGVEGFNCYFPLQSYGFQPTNGVGYQPYRVVVLSFELLHAPATVCGPKKSTNLVKNKCVNFNFNGLTGTGVLTESNKKFLPFQQFGRDIADTTDAVRDPQTLEILDITPCSFGGVSVITPGTNTSNQVAVLYQDVNCTEVPVAIHADQLTPTWRVYSTGSNVFQTRAGCLIGAEHVNNSYECDIPIGAGICASYQTQTNSPRRARSVASQSIIAYTMSLGAENSVAYSNNSIACPTNFTISVTTEILPVSMTKTSVDCTMYICGDSTECSNLLLQYGSFCTQLNRALTGIAVEQDKNTQEVFAQVKQIYKTPPIKDCGGFNFSQILPDPSKPSKRSFIEDLLFNKVTLADAGFIKQYGDCLGDIAARDLICAQKFNGLTVLPPLLTDEMIAQYTSALLAGTITSGWTFGAGAALQIPFAMQMAYRFNGIGVTQNVLYENQKLIANQFNSAIGKIQDSLSSTASALGKLQDVVNQNAQALNTLVKQLSSNFGAISSVLNDILSRLDKVEAEVQIDRLITGRLQSLQTYVTQQLIRAAEIRASANLAATKMSECVLGQSKRVDFCGKGYHLMSFPQSAPHGVVFLHVTYVPAQEKNFTTAPAICHDGKAHFPREGVFVSNGTHWFVTQRNFCEPQIITTDNTFVSGNCDVVIGIVNNTVYDPLQPELDSFKEELDKYFKNHTSPDVDLGDISGINASVVNIQKEIDRLNEVAKNLNESLIDLQELGKYEQYIKGGGGSDIIKLLNEQVNKEMQSSNLYMSMSSWCYTHSLDGAGLFLFDHAAEEYEHAKKLIIFLNENNVPVQLTSISAPEHKFEGLTQIFQKAYEHEQHISESINNIVDHAIKSKDHATFNFLQWYVAEQHEEEVLFKDILDKIELIGNENHGLYLADQYVKGIAKSRKS

SEQ ID NO: 5045 - protein, 1379 aa, Artificial Sequence
  SARS-CoV-2/Tianmen/HBCDC-HB-07/2020__EPI_ISL_412983 spike protein (1-1211)(I714C_Y1110C) Ferritin construct
MFVFLVLLPLVSSQCVNLTTRTQLPPAYTNSFTRGVYYPDKVFRSSVLHSTQDLFLPFFSNVTWFHAIHVSGTNGTKRFDNPVLPFNDGVYFASTEKSNIIRGWIFGTTLDSKTQSLLIVNNATNVVIKVCEFQFCNDPFLGVYYHKNNKSWMESEFRVYSSANNCTFEYVSQPFLMDLEGKQGNFKNLREFVFKNIDGYFKIYSKHTPINLVRDLPQGFSALEPLVDLPIGINITRFQTLLALHRSYLTPGDSSSGWTAGAAAYYVGYLQPRTFLLKYNENGTITDAVDCALDPLSETKCTLKSFTVEKGIYQTSNFRVQPTESIVRFPNITNLCPFGEVFNATRFASVYAWNRKRISNCVADYSVLYNSASFSTFKCYGVSPTKLNDLCFTNVYADSFVIRGDEVRQIAPGQTGKIADYNYKLPDDFTGCVIAWNSNNLDSKVGGNYNYLYRLFRKSNLKPFERDISTEIYQAGSTPCNGVEGFNCYFPLQSYGFQPTNGVGYQPYRVVVLSFELLHAPATVCGPKKSTNLVKNKCVNFNFNGLTGTGVLTESNKKFLPFQQFGRDIADTTDAVRDPQTLEILDITPCSFGGVSVITPGTNTSNQVAVLYQDLNCTEVPVAIHADQLTPTWRVYSTGSNVFQTRAGCLIGAEHVNNSYECDIPIGAGICASYQTQTNSPRRARSVASQSIIAYTMSLGAENSVAYSNNSIACPTNFTISVTTEILPVSMTKTSVDCTMYICGDSTECSNLLLQYGSFCTQLNRALTGIAVEQDKNTQEVFAQVKQIYKTPPIKDFGGFNFSQILPDPSKPSKRSFIEDLLFNKVTLADAGFIKQYGDCLGDIAARDLICAQKFNGLTVLPPLLTDEMIAQYTSALLAGTITSGWTFGAGAALQIPFAMQMAYRFNGIGVTQNVLYENQKLIANQFNSAIGKIQDSLSSTASALGKLQDVVNQNAQALNTLVKQLSSNFGAISSVLNDILSRLDKVEAEVQIDRLITGRLQSLQTYVTQQLIRAAEIRASANLAATKMSECVLGQSKRVDFCGKGYHLMSFPQSAPHGVVFLHVTYVPAQEKNFTTAPAICHDGKAHFPREGVFVSNGTHWFVTQRNFCEPQIITTDNTFVSGNCDVVIGIVNNTVYDPLQPELDSFKEELDKYFKNHTSPDVDLGDISGINASVVNIQKEIDRLNEVAKNLNESLIDLQELGKYEQYIKGGGGSDIIKLLNEQVNKEMQSSNLYMSMSSWCYTHSLDGAGLFLFDHAAEEYEHAKKLIIFLNENNVPVQLTSISAPEHKFEGLTQIFQKAYEHEQHISESINNIVDHAIKSKDHATFNFLQWYVAEQHEEEVLFKDILDKIELIGNENHGLYLADQYVKGIAKSRKS

SEQ ID NO: 5046 - protein, 1379 aa, Artificial Sequence
  SARS-CoV-2/Hong Kong/case42_VM20002493/2020__EPI_ISL_414527 spike protein (1-1211)(I714C_Y1110C) Ferritin construct
MFVFLVLLPLVSSQCVNLTTRTQLPPAYTNSFTRGVYYPDKVFRSSVLHSTQDLFLPFFSNVTWFHAIHVSGTNGTKRFDNPVLPFNDGVYFASTEKSNIIRGWIFGTTLDSKTQSLLIVNNATNVVIKVCEFQFCNDPFLGVYYHKNNKSWMESEFRVYSSANNCTFEYVSQPFLMDLEGKQGNFKNLREFVFKNIDGYFKIYSKHTPINLVRDLPQGFSALEPLVDLPIGINITRFQTLLALHRSYLTPGDSSSGWTAGAAAYYVGYLQPRTFLLKYNENGTITDAVDCALDPLSETKCTLKSFTVEKGIYQTSNFRVQPTESIVRFPNITNLCPFGEVFNATRFASVYAWNRKRISNCVADYSVLYNSASFSTFKCYGVSPTKLNDLCFTNVYADSFVIRGDEVRQIAPGQTGKIADYNYKLPDDFTGCVIAWNSNNLDSKVGGNYNYLYRLFRKSNLKPFERDISTEIYQAGSTPCNGVEGFNCYFPLQSYGFQPTNGVGYQPYRVVVLSFELLHAPATVCGPKKSTNLVKNKCVNFNFNGLTGTGVLTESNKKFLPFQQFGRDIADTTDAVRDPQTLEILDITPCSFGGVSVITPGTNTSNQVAVLYQDVNCTEVPVAIHADQLTPTWRVYSTGSNVFQTRAGCLIGAEHVNNSYECDIPIGAGICASYQTQTNSPRRARSVASQSIIAYTMSLGAENSVAYSNNSIACPTNFAISVTTEILPVSMTKTSVDCTMYICGDSTECSNLLLQYGSFCTQLNRALTGIAVEQDKNTQEVFAQVKQIYKTPPIKDFGGFNFSQILPDPSKPSKRSFIEDLLFNKVTLADAGFIKQYGDCLGDIAARDLICAQKFNGLTVLPPLLTDEMIAQYTSALLAGTITSGWTFGAGAALQIPFAMQMAYRFNGIGVTQNVLYENQKLIANQFNSAIGKIQDSLSSTASALGKLQDVVNQNAQALNTLVKQLSSNFGAISSVLNDILSRLDKVEAEVQIDRLITGRLQSLQTYVTQQLIRAAEIRASANLAATKMSECVLGQSKRVDFCGKGYHLMSFPQSAPHGVVFLHVTYVPAQEKNFTTAPAICHDGKAHFPREGVFVSNGTHWFVTQRNFCEPQIITTDNTFVSGNCDVVIGIVNNTVYDPLQPELDSFKEELDKYFKNHTSPDVDLGDISGINASVVNIQKEIDRLNEVAKNLNESLIDLQELGKYEQYIKGGGGSDIIKLLNEQVNKEMQSSNLYMSMSSWCYTHSLDGAGLFLFDHAAEEYEHAKKLIIFLNENNVPVQLTSISAPEHKFEGLTQIFQKAYEHEQHISESINNIVDHAIKSKDHATFNFLQWYVAEQHEEEVLFKDILDKIELIGNENHGLYLADQYVKGIAKSRKS

SEQ ID NO: 5047 - protein, 1379 aa, Artificial Sequence
  SARS-CoV-2/USA/CruiseA-23/2020__EPI_ISL_414482 spike protein (1-1211)(I714C_Y1110C) Ferritin construct
MFVFLVLLPLVSSQCVNLTTRTQLPPAYTNSFTRGVYYPDKVFRSSVLHSTQDLFLPFFSNVTWFHAIHVSGTNGTKRFDNPVLPFNDGVYFASTEKSNIIRGWIFGTTLDSKTQSLLIVNNATNVVIKVCEFQFCNDPFLGVYYHKNNKSWMESEFRVYSSANNCTFEYVSQPFLMDLEVKQGNFKNLREFVFKNIDGYFKIYSKHTPINLVRDLPQGFSALEPLVDLPIGINITRFQTLLALHRSYLTPGDSSSGWTAGAAAYYVGYLQPRTFLLKYNENGTITDAVDCALDPLSETKCTLKSFTVEKGIYQTSNFRVQPTESIVRFPNITNLCPFGEVFNATRFASVYAWNRKRISNCVADYSVLYNSASFSTFKCYGVSPTKLNDLCFTNVYADSFVIRGDEVRQIAPGQTGKIADYNYKLPDDFTGCVIAWNSNNLDSKVGGNYNYLYRLFRKSNLKPFERDISTEIYQAGSTPCNGVEGFNCYFPLQSYGFQPTNGVGYQPYRVVVLSFELLHAPATVCGPKKSTNLVKNKCVNFNFNGLTGTGVLTESNKKFLPFQQFGRDIADTTDAVRDPQTLEILDITPCSFGGVSVITPGTNTSNQVAVLYQDVNCTEVPVAIHADQLTPTWRVYSTGSNVFQTRAGCLIGAEHVNNSYECDIPIGAGICASYQTQTNSPRRARSVASQSIIAYTMSLGAENSVAYSNNSIACPTNFTISVTTEILPVSMTKTSVDCTMYICGDSTECSNLLLQYGSFCTQLNRALTGIAVEQDKNTQEVFAQVKQIYKTPPIKDFGGFNFSQILPDPSKPSKRSFIEDLLFNKVTLADAGFIKQYGDCLGDIAARDLICAQKFNGLTVLPPLLTDEMIAQYTSALLAGTITSGWTFGAGAALQIPFAMQMAYRFNGIGVTQNVLYENQKLIANQFNSAIGKIQDSLSSTASALGKLQDVVNQNAQALNTLVKQLSSNFGAISSVLNDILSRLDKVEAEVQIDRLITGRLQSLQTYVTQQLIRAAEIRASANLAATKMSECVLGQSKRVDFCGKGYHLMSFPQSAPHGVVFLHVTYVPAQEKNFTTAPAICHDGKAHFPREGVFVSNGTHWFVTQRNFCEPQIITTDNTFVSGNCDVVIGIVNNTVYDPLQPELDSFKEELDKYFKNHTSPDVDLGDISGINASVVNIQKEIDRLNEVAKNLNESLIDLQELGKYEQYIKGGGGSDIIKLLNEQVNKEMQSSNLYMSMSSWCYTHSLDGAGLFLFDHAAEEYEHAKKLIIFLNENNVPVQLTSISAPEHKFEGLTQIFQKAYEHEQHISESINNIVDHAIKSKDHATFNFLQWYVAEQHEEEVLFKDILDKIELIGNENHGLYLADQYVKGIAKSRKS

SEQ ID NO: 5048 - protein, 1379 aa, Artificial Sequence
  SARS-CoV-2/Hong Kong/case85_VM20002868/2020__EPI_ISL_414519 spike protein (1-1211)(I714C_Y1110C) Ferritin construct
MFVFLVLVPLVSSQCVNLTTRTQLPPAYTNSFTRGVYYPDKVFRSSVLHSTQDLFLPFFSNVTWFHAIHVSGTNGTKRFDNPVLPFNDGVYFASTEKSNIIRGWIFGTTLDSKTQSLLIVNNATNVVIKVCEFQFCNDPFLGVYYHKNNKSWMESEFRVYSSANNCTFEYVSQPFLMDLEGKQGNFKNLREFVFKNIDGYFKIYSKHTPINLVRDLPQGFSALEPLVDLPIGINITRFQTLLALHRSYLTPGDSSSGWTAGAAAYYVGYLQPRTFLLKYNENGTITDAVDCALDPLSETKCTLKSFTVEKGIYQTSNFRVQPTESIVRFPNITNLCPFGEVFNATRFASVYAWNRKRISNCVADYSVLYNSASFSTFKCYGVSPTKLNDLCFTNVYADSFVIRGDEVRQIAPGQTGKIADYNYKLPDDFTGCVIAWNSNNLDSKVGGNYNYLYRLFRKSNLKPFERDISTEIYQAGSTPCNGVEGFNCYFPLQSYGFQPTNGVGYQPYRVVVLSFELLHAPATVCGPKKSTNLVKNKCVNFNFNGLTGTGVLTESNKKFLPFQQFGRDIADTTDAVRDPQTLEILDITPCSFGGVSVITPGTNTSNQVAVLYQDVNCTEVPVAIHADQLTPTWRVYSTGSNVFQTRAGCLIGAEHVNNSYECDIPIGAGICASYQTQTNSPRRARSVASQSIIAYTMSLGAENSVAYSNNSIACPTNFTISVTTEILPVSMTKTSVDCTMYICGDSTECSNLLLQYGSFCTQLNRALTGIAVEQDKNTQEVFAQVKQIYKTPPIKDFGGFNFSQILPDPSKPSKRSFIEDLLFNKVTLADAGFIKQYGDCLGDIAARDLICAQKFNGLTVLPPLLTDEMIAQYTSALLAGTITSGWTFGAGAALQIPFAMQMAYRFNGIGVTQNVLYENQKLIANQFNSAIGKIQDSLSSTASALGKLQDVVNQNAQALNTLVKQLSSNFGAISSVLNDILSRLDKVEAEVQIDRLITGRLQSLQTYVTQQLIRAAEIRASANLAATKMSECVLGQSKRVDFCGKGYHLMSFPQSAPHGVVFLHVTYVPAQEKNFTTAPAICHDGKAHFPREGVFVSNGTHWFVTQRNFCEPQIITTDNTFVSGNCDVVIGIVNNTVYDPLQPELDSFKEELDKYFKNHTSPDVDLGDISGINASVVNIQKEIDRLNEVAKNLNESLIDLQELGKYEQYIKGGGGSDIIKLLNEQVNKEMQSSNLYMSMSSWCYTHSLDGAGLFLFDHAAEEYEHAKKLIIFLNENNVPVQLTSISAPEHKFEGLTQIFQKAYEHEQHISESINNIVDHAIKSKDHATFNFLQWYVAEQHEEEVLFKDILDKIELIGNENHGLYLADQYVKGIAKSRKS

SEQ ID NO: 5049 - protein, 1379 aa, Artificial Sequence; identical to SEQ ID NO: 5039
  SARS-CoV-2/England/200990660/2020__EPI_ISL_414523 spike protein (1-1211)(I714C_Y1110C) Ferritin construct

SEQ ID NO: 5050 - protein, 1379 aa, Artificial Sequence
  SARS-CoV-2/Australia/NSW09/2020__EPI_ISL_413595 spike protein (1-1211)(I714C_Y1110C) Ferritin construct
MFVFLVLLPLVSSQCVNLTTRTQLPPAYTNSFTRGVYYPDKVFRSSVLHSTQDLFLPFFSNVTWFHAIHVSGTNGTKRFDNPVLPFNDGVYFASTEKSNIIRGWIFGTTLDSKTQSLLIVNNATNVVIKVCEFQFCNDPFLGVYYHKNNKSWMESEFRVYSSANNCTFEYVSQPFLMDLEGKQGNFKNLREFVFKNIDGYFKIYSKHTPINLVRDLPQGFSALEPLVDLPIGINITRFQTLLALHRSYLTPGDSSSGWTAGAAAYYVGYLQPRTFLLKYNENGTITDAVDCALDPLSETKCTLKSFTVEKGIYQTSNFRVQPTESIVRFPNITNLCPFGEVFNATRFASVYAWNRKRISNCVADYSVLYNSASFSTFKCYGVSPTKLNDLCFTNVYADSFVIRGDEVRQIAPGQTGKIADYNYKLPDDFTGCVIAWNSNNLDSKVGGNYNYLYRLFRKSNLKPFERDISTEIYQAGSTPCNGVEGFNCYFPLQSYGFQPTNGVGYQPYRVVVLSFELLHAPATVCGPKKSTNLVKNKCVNFNFNGLTGTGVLTESNKKFLPFQQFGRDIADTTDAVRDPQTLEILDITPCSFGGVSVITPGTNTSNQVAVLYQDVNCTEVPVAIHADQLTPTWRVYSTGSNVFQTRAGCLIGAEHVNNSYECDIPIGAGICASYQTQTNSPRRARSVASQSIIAYTMSLGAENSVAYSNNSIACPTNFTISVTTEILPVSMTKTSVDCTMYICGDSTECSNLLLQYGSFCTQLNRALTGIAVEQDKNTQEVFAQVKQIYKTPPIKDFGGFNFSQILPDPSKPSKRSFIEDLLFNKVTLADAGFIKQYGDCLGDIAARDLICAQKFNGLTVLPPLLTDEMIAQYTSALLAGTITSGWTFGAGAALQIPFAMQMAYRFNGIGVTQNVLYENQKLIANQFNSAIGKIQDSLSFTASALGKLQDVVNQNAQALNTLVKQLSSNFGAISSVLNDILSRLDKVEAEVQIDRLITGRLQSLQTYVTQQLIRAAEIRASANLAATKMSECVLGQSKRVDFCGKGYHLMSFPQSAPHGVVFLHVTYVPAQEKNFTTAPAICHDGKAHFPREGVFVSNGTHWFVTQRNFCEPQIITTDNTFVSGNCDVVIGIVNNTVYDPLQPELDSFKEELDKYFKNHTSPDVDLGDISGINASVVNIQKEIDRLNEVAKNLNESLIDLQELGKYEQYIKGGGGSDIIKLLNEQVNKEMQSSNLYMSMSSWCYTHSLDGAGLFLFDHAAEEYEHAKKLIIFLNENNVPVQLTSISAPEHKFEGLTQIFQKAYEHEQHISESINNIVDHAIKSKDHATFNFLQWYVAEQHEEEVLFKDILDKIELIGNENHGLYLADQYVKGIAKSRKS

SEQ ID NO: 5051 - protein, 1379 aa, Artificial Sequence; identical to SEQ ID NO: 5031
  SARS-CoV-2/Australia/NSW10/2020__EPI_ISL_413596 spike protein (1-1211)(I714C_Y1110C) Ferritin construct

SEQ ID NO: 5052 - protein, 1379 aa, Artificial Sequence
  SARS-CoV-2/Switzerland/1000477797/2020__EPI_ISL_413023 spike protein (1-1211)(I714C_Y1110C) Ferritin construct
MFVFLVLLPLVSSQCVNLTTRTQLPPAYTNSFTRGVYYPDKVFRSSVLHSTQDLFLPFFSNVTWFHAIHVSGTNGTKRFDNPVLPFNDGVYFASTEKSNIIRGWIFGTTLDSKTQSLLIVNNATNVVIKVCEFQFCNDPFLGVYYHKNNKSWMESEFRVYSSANNCTFEYVSQPFLMDLEGKQGNFKNLREFVFKNIDGYFNIYSKHTPINLVRDLPQGFSALEPLVDLPIGINITRFQTLLALHRSYLTPGDSSSGWTAGAAAYYVGYLQPRTFLLKYNENGTITDAVDCALDPLSETKCTLKSFTVEKGIYQTSNFRVQPTESIVRFPNITNLCPFGEVFNATRFASVYAWNRKRISNCVADYSVLYNSASFSTFKCYGVSPTKLNDLCFTNVYADSFVIRGDEVRQIAPGQTGKIADYNYKLPDDFTGCVIAWNSNNLDSKVGGNYNYLYRLFRKSNLKPFERDISTEIYQAGSTPCNGVEGFNCYFPLQSYGFQPTNGVGYQPYRVVVLSFELLHAPATVCGPKKSTNLVKNKCVNFNFNGLTGTGVLTESNKKFLPFQQFGRDIADTTDAVRDPQTLEILDITPCSFGGVSVITPGTNTSNQVAVLYQGVNCTEVPVAIHADQLTPTWRVYSTGSNVFQTRAGCLIGAEHVNNSYECDIPIGAGICASYQTQTNSPRRARSVASQSIIAYTMSLGAENSVAYSNNSIACPTNFTISVTTEILPVSMTKTSVDCTMYICGDSTECSNLLLQYGSFCTQLNRALTGIAVEQDKNTQEVFAQVKQIYKTPPIKDFGGFNFSQILPDPSKPSKRSFIEDLLFNKVTLADAGFIKQYGDCLGDIAARDLICAQKFNGLTVLPPLLTDEMIAQYTSALLAGTITSGWTFGAGAALQIPFAMQMAYRFNGIGVTQNVLYENQKLIANQFNSAIGKIQDSLSSTASALGKLQDVVNQNAQALNTLVKQLSSNFGAISSVLNDILSRLDKVEAEVQIDRLITGRLQSLQTYVTQQLIRAAEIRASANLAATKMSECVLGQSKRVDFCGKGYHLMSFPQSAPHGVVFLHVTYVPAQEKNFTTAPAICHDGKAHFPREGVFVSNGTHWFVTQRNFCEPQIITTDNTFVSGNCDVVIGIVNNTVYDPLQPELDSFKEELDKYFKNHTSPDVDLGDISGINASVVNIQKEIDRLNEVAKNLNESLIDLQELGKYEQYIKGGGGSDIIKLLNEQVNKEMQSSNLYMSMSSWCYTHSLDGAGLFLFDHAAEEYEHAKKLIIFLNENNVPVQLTSISAPEHKFEGLTQIFQKAYEHEQHISESINNIVDHAIKSKDHATFNFLQWYVAEQHEEEVLFKDILDKIELIGNENHGLYLADQYVKGIAKSRKS

SEQ ID NO: 5053 - protein, 1379 aa, Artificial Sequence
  SARS-CoV-2/Belgium/BA-02291/2020__EPI_ISL_415159 spike protein (1-1211)(I714C_Y1110C) Ferritin construct
MFVFLVLLPLVSSQCVNLTTRTQLPPAYTNSFTRGVYYPDKVFRSSVLHSTQDLFLPFFSNVTWFHAIHVSGTNGTKRFDNPVLPFNDGVYFASTEKSNIIRGWIFGTTLDSKTQSLLIVNNATNVVIKVCEFQFCNDPFLGVYYHKNNKSWMESEFRVYSSANNCTFEYVSQPFLMDLEGKQGNFKNLREFVFKNIDGYFKIYSKHTPINLVRDLPQGFSALEPLVDLPIGINITRFQTLLALHRSYLTPGDSSSGWTAGAAAYYVGYLQPRTFLLKYNENGTITDAVDCALDPLSETKCTLKSFTVEKGIYQTSNFRVQPTESIVRFPNITNLCPFGEVFNATRFASVYAWNRKRISNCVADYSVLYNSASFSTFKCYGVSPTKLNDLCFTNVYADSFVIRGDEVRQIAPGQTGKIADYNYKLPDDFTGCVIAWNSNNLDSKVGGNYNYLYRLFRRSNLKPFERDISTEIYQAGSTPCNGVEGFNCYFPLQSYGFQPTNGVGYQPYRVVVLSFELLPAPATVCGPKKSTNLVKNKCVNFNFNGLTGTGVLTESNKKFLPFQQFGRDIADTTDAVRDPQTLEILDITPCSFGGVSVITPGTNTSNQVAVLYQGVNCTEVPVAIHADQLTPTWRVYSTGSNVFQTRAGCLIGAEHVNNSYECDIPIGAGICASYQTQTNSPRRARSVASQSIIAYTMSLGAENSVAYSNNSIACPTNFTISVTTEILPVSMTKTSVDCTMYICGDSTECSNLLLQYGSFCTQLNRALTGIAVEQDKNTQEVFAQVKQIYKTPPIKDFGGFNFSQILPDPSKPSKRSFIEDLLFNKVTLADAGFIKQYGDCLGDIAARDLICAQKFNGLTVLPPLLTDEMIAQYTSALLAGTITSGWTFGAGAALQIPFAMQMAYRFNGIGVTQNVLYENQKLIANQFNSAIGKIQDSLSSAAPALGKLQDVVNQNAQALNTLVKQLSSNFGAISSVLNDILSRLDKVEAEVQIDRLITGRLQSLQTYVTQQLIRAAEIRASANLAATKMSECVLGQSKRVDFCGKGYHLMSFPQSAPHGVVFLHVTYVPAQEKNFTTAPAICHDGKAHFPREGVFVSNGTHWFVTQRNFCEPQIITTDNTFVSGNCDVVIGIVNNTVYDPLQPELDSFKEELDKYFKNHTSPDVDLGDISGINASVVNIQKEIDRLNEVAKNLNESLIDLQELGKYEQYIKGGGGSDIIKLLNEQVNKEMQSSNLYMSMSSWCYTHSLDGAGLFLFDHAAEEYEHAKKLIIFLNENNVPVQLTSISAPEHKFEGLTQIFQKAYEHEQHISESINNIVDHAIKSKDHATFNFLQWYVAEQHEEEVLFKDILDKIELIGNENHGLYLADQYVKGIAKSRKS

SEQ ID NO: 5054 - protein, 1379 aa, Artificial Sequence
  SARS-CoV-2/USA/WA8-UW5/2020__EPI_ISL_413486 spike protein (1-1211)(I714C_Y1110C) Ferritin construct
MFVFLVLLPLVSSQCVNLTTRTQLPPAYTNSFTRGVYYPDKVFRSSVLHSTQDLFLPFFSNVTWFHAIHVSGTNGTKRFDNPVLPFNDGVYFASTEKSNIIRGWIFGTTLDSKTQSLLIVNNATNVVIKVCEFQFCNDPFLGVYYHKNNKSWMESEFRVYSSANNCTFEYVSQPFLMDLEGKQGNFKNLREFVFKNIDGYFKIYSKHTPINLVRDLPQGFSALEPLVDLPIGINITRFQTLLALHRSYLTPGDSSSGWTAGAAAYYVGYLQPRTFLLKYNENGTITDAVDCALDPLSETKCTLKSFTVEKGIYQTSNFRVQPTESIVRFPNITNLCPFGEVFNATRFASVYAWNRKRISNCVADYSVLYNSASFSTFKCYGVSPTKLNDLCFTNVYADSFVIRGDEVRQIAPGQTGKIADYNYKLPDDFTGCVIAWNSNNLDSKVGGNYNYLYRLFRKSNLKPFERDISTEIYQAGSTPCNGVEGFNCYFPLQSYGFQPTNGVGYQPYRVVVLSFELLHAPATVCGPKKSTNLVKNKCVNFNFNGLTGTGVLTESNKKFLPFQQFGRDIADTTDAVRDPQTLEILDITPCSFGGVSVITPGTNTSNQVAVLYQDVNCTEVPVAIHADQLTPTWRVYSTGSNVFQTRAGCLIGAEYVNNSYECDIPIGAGICASYQTQTNSPRRARSVASQSIIAYTMSLGAENSVAYSNNSIACPTNFTISVTTEILPVSMTKTSVDCTMYICGDSTECSNLLLQYGSFCTQLNRALTGIAVEQDKNTQEVFAQVKQIYKTPPIKDFGGFNFSQILPDPSKPSKRSFIEDLLFNKVTLADAGFIKQYGDCLGDIAARDLICAQKFNGLTVLPPLLTDEMIAQYTSALLAGTITSGWTFGAGAALQIPFAMQMAYRFNGIGVTQNVLYENQKLIANQFNSAIGKIQDSLSSTASALGKLQDVVNQNAQALNTLVKQLSSNFGAISSVLNDILSRLDKVEAEVQIDRLITGRLQSLQTYVTQQLIRAAEIRASANLAATKMSECVLGQSKRVDFCGKGYHLMSFPQSAPHGVVFLHVTYVPAQEKNFTTAPAICHDGKAHFPREGVFVSNGTHWFVTQRNFCEPQIITTDNTFVSGNCDVVIGIVNNTVYDPLQPELDSFKEELDKYFKNHTSPDVDLGDISGINASVVNIQKEIDRLNEVAKNLNESLIDLQELGKYEQYIKGGGGSDIIKLLNEQVNKEMQSSNLYMSMSSWCYTHSLDGAGLFLFDHAAEEYEHAKKLIIFLNENNVPVQLTSISAPEHKFEGLTQIFQKAYEHEQHISESINNIVDHAIKSKDHATFNFLQWYVAEQHEEEVLFKDILDKIELIGNENHGLYLADQYVKGIAKSRKS

SEQ ID NO: 5055 - protein, 1379 aa, Artificial Sequence
  SARS-CoV-2/England/20102000506/2020__EPI_ISL_415147 spike protein (1-1211)(I714C_Y1110C) Ferritin construct
MFVFLVLLPLVSSQCVNLTTRTQLPPAYTNSFTRGVYYPDKVFRSSVLHSTQDLFLPFFSNVTWFHAIHVSGTNGTKRFDNPVLPFNDGVYFASTEKSNIIRGWIFGTTLDSKTQSLLIVNNATNVVIKVCEFQFCNDPFLGVYYHKNNKSWMESEFRVYSSANNCTFEYVSQPFLMDLEGKQGNFKNLREFVFKNIDGYFKIYSKHTPINLVRDLPQGFSALEPLVDLPIGINITRFQTLLALHRSYLTPGDSSSGWTAGAAAYYVGYLQPRTFLLKYNENGTITDAVDCALDPLSETKCTLKSFTVEKGIYQTSNFRVQPTESIVRFPNITNLCPFGEVFNATRFASVYAWNRKRISNCVADYSVLYNSASFSTFKCYGVSPTKLNDLCFTNVYADSFVIRGDEVRQIAPGQTGKIADYNYKLPDDFTGCVIAWNSNNLDSKVGGNYNYLYRLFRKSNLKPFERDISTEIYQAGSTPCNGVEGFNCYFPLQSYGFQPTNGVGYQPYRVVVLSFELLHAPATVCGPKKSTNLVKNKCVNFNFNGLTGTGVLTESNKKFLPFQQFGRDIADTTDAVRDPQTLEILDITPCSFGGVSVITPGTNTSNQVAVLYQGVNCTEVPVAIHADQLTPTWRVYSTGSNVFQTRAGCLIGAEHVNNSYECDIPIGAGICASYQTQTNSPRRARSVASQSIIAYTMSLGAENSVAYSNNSIACPTNFTISVTTEILPVSMTKTSVDCTMYICGDSTECSNLLLQYGSFCTQLNRALTGIAVEQDKNTQEVFAQVKQIYKTPPIKDFGGFNFSQILPDPSKPSKRSFIEDLLFNKVTLADAGFIKQYGYCLGDIAARDLICAQKFNGLTVLPPLLTDEMIAQYTSALLAGTITSGWTFGAGAALQIPFAMQMAYRFNGIGVTQNVLYENQKLIANQFNSAIGKIQDSLSSTASALGKLQDVVNQNAQALNTLVKQLSSNFGAISSVLNDILSRLDKVEAEVQIDRLITGRLQSLQTYVTQQLIRAAEIRASANLAATKMSECVLGQSKRVDFCGKGYHLMSFPQSAPHGVVFLHVTYVPAQEKNFTTAPAICHDGKAHFPREGVFVSNGTHWFVTQRNFCEPQIITTDNTFVSGNCDVVIGIVNNTVYDPLQPELDSFKEELDKYFKNHTSPDVDLGDISGINASVVNIQKEIDRLNEVAKNLNESLIDLQELGKYEQYIKGGGGSDIIKLLNEQVNKEMQSSNLYMSMSSWCYTHSLDGAGLFLFDHAAEEYEHAKKLIIFLNENNVPVQLTSISAPEHKFEGLTQIFQKAYEHEQHISESINNIVDHAIKSKDHATFNFLQWYVAEQHEEEVLFKDILDKIELIGNENHGLYLADQYVKGIAKSRKS

SEQ ID NO: 5056 - protein, 1379 aa, Artificial Sequence
  SARS-CoV-2/Belgium/VAG-03013/2020__EPI_ISL_415155 spike protein (1-1211)(I714C_Y1110C) Ferritin construct
MFVFLVLLPLVSSQCVNLTTRTQLPPAYTNSFTRGVYYPDKVFRSSVLHSTQDLFLPFFSNVTWFHAIHVSGTNGTKRFDNPVLPFNDGVYFASTEKSNIIRGWIFGTTLDSKTQSLLIVNNATNVVIKVCEFQFCNDPFLGVYYHKNNKSWMESEFRVYSSANNCTFEYVSQPFLMDLEGKQGNFKNLREFVFKNIDGYFKIYSKHTPINLVRDLPQGFSALEPLVDLPIGINITRFQTLLALHRSYLTPGDSSSGWTAGAAAYYVGYLQPRTFLLKYNENGTITDAVDCALDPLSETKCTLKSFTVEKGIYQTSNFRVQPTESIVRFPNITNLCPFGEVFNATRFASVYAWNRKRISNCVADYSVLYNSASFSTFKCYGVSPTKLNDLCFTNVYADSFVIRGDEVRQIAPGQTGKIADYNYKLPDDFTGCVIAWNSNNLDSKVGGNYNYLYRLFRKSNLKPFERDISTEIYQAGSTPCNGVEGFNCYFPLQSYGFQPTNGVGYQPYRVVVLSFELLHAPATVCGPKKSTNLVKNKCVNFNFNGLTGTGVLTESNKKFLPFQQFGRDIADTTDAVRDPQTLEILDITPCSFGGVSVITPGTNTSNQVAVLYQGVNCTEVPVAIHADQLTPTWRVYSTGSNVFQTRAGCLIGAEHVNNSYECDIPIGAGICASYQTQTNSPRRARSVASQSIIAYTMSLGAENSVAYSNNSIACPTNFTISVTTEILPVSMTKTSVDCTMYICGDSTECSNLLLQYGSFCTQLNRALTGIAVEQDKNTQEVFAQVKQIYKTPPIKDFGGFNFSQILPDPSKPSKRSFIEDLLFNKVTLADAGFIKQYGDCLGDIAARDLICAQKFNGLTVLPPLLTDEMIAQYTSALLAGTITSGWTFGAGAALQIPFAMQMAYRFNGIGVTQNVLYENQKLIANQFNSAIGKIQDSLSSTATALGKLQDVVNQNAQALNTLVKQLSSNFGAISSVLNDILSRLDKVEAEVQIDRLITGRLQSLQTYVTQQLIRAAEIRASANLAATKMSECVLGQSKRVDFCGKGYHLMSFPQSAPHGVVFLHVTYVPAQEKNFTTAPAICHDGKAHFPREGVFVSNGTHWFVTQRNFCEPQIITTDNTFVSGNCDVVIGIVNNTVYDPLQPELDSFKEELDKYFKNHTSPDVDLGDISGINASVVNIQKEIDRLNEVAKNLNESLIDLQELGKYEQYIKGGGGSDIIKLLNEQVNKEMQSSNLYMSMSSWCYTHSLDGAGLFLFDHAAEEYEHAKKLIIFLNENNVPVQLTSISAPEHKFEGLTQIFQKAYEHEQHISESINNIVDHAIKSKDHATFNFLQWYVAEQHEEEVLFKDILDKIELIGNENHGLYLADQYVKGIAKSRKS

SEQ ID NO: 5057 - protein, 1379 aa, Artificial Sequence
  SARS-CoV-2/Belgium/BC-03016/2020__EPI_ISL_415157 spike protein (1-1211)(I714C_Y1110C) Ferritin construct
MFVFLVLLPLVSSQCVNLTTRTQLPPAYTNSFTRGVYYPDKVFRSSVLHSTQDLFLPFFSNVTWFHAIHVSGTNGTKRFDNPVLPFNDGVYFASTEKSNIIRGWIFGTTLDSKTQSLLIVNNATNVVIKVCEFQFCNDPFLGVYYHKNNKSWMESEFRVYSSANNCTFEYVSQPFLMDLEGKQGNFKNLREFVFKNIDGYFKIYSKHTPINLVRDLPQGFSALEPLVDLPIGINITRFQTLLALHRSYLTPGDSSSGWTAGAAAYYVGYLQPRTFLLKYNENGTITDAVDCALDPLSETKCTLKSFTVEKGIYQTSNFRVQPTESIVRFPNITNLCPFGEVFNATRFASVYAWNRKRISNCVADYSVLYNSASFSTFKCYGVSPTKLNDLCFTNVYADSFVIRGDEVRQIAPGQTGKIADYNYKLPDDFTGCVIAWNSNNLDSKVGGNYNYLYRLFRKSNLKPFERDISTEIYQAGSTPCNGVEGFNCYFPLQSYGFQPTNGVGYQPYRVVVLSFELLHAPATVCGPKKSTNLVKNKCVNFNFNGLTGTGVLTESNKKFLPFQQFGRDIADTTDAVRDPQTLEILDITPCSFGGVSVITPGTNTSNQVAVLYQGVNCTEVPVAIHADQLTPTWRVYSTGSNVFQTRAGCLIGAEHVNNSYECDIPIGAGICASYQTQTNSPRRARSVASQSIIAYTMSLGAENSVAYSNNSIACPTNFTISVTTEILPVSMTKTSVDCTMYICGDSTECSNLLLQYGSFCTQLNRALTGIAVEQDKNTQEVFAQVKQIYKTPPIKDFGGFNFSQILPDPSKPSKRSFIEDLLFNKVTLADAGFIKQYGDCLGDIAARDLICAQKFNGLTVLPPLLTDEMIAQYTSALLAGTITSGWTFGAGAALQIPFAMQMAYRFNGIGVTQNVLYENQKLIANQFNSAIGKIQDSLSSTAPALGKLQDVVNQNAQALNTLVKQLSSNFGAISSVLNDILSRLDKVEAEVQIDRLITGRLQSLQTYVTQQLIRAAEIRASANLAATKMSECVLGQSKRVDFCGKGYHLMSFPQSAPHGVVFLHVTYVPAQEKNFTTAPAICHDGKAHFPREGVFVSNGTHWFVTQRNFCEPQIITTDNTFVSGNCDVVIGIVNNTVYDPLQPELDSFKEELDKYFKNHTSPDVDLGDISGINASVVNIQKEIDRLNEVAKNLNESLIDLQELGKYEQYIKGGGGSDIIKLLNEQVNKEMQSSNLYMSMSSWCYTHSLDGAGLFLFDHAAEEYEHAKKLIIFLNENNVPVQLTSISAPEHKFEGLTQIFQKAYEHEQHISESINNIVDHAIKSKDHATFNFLQWYVAEQHEEEVLFKDILDKIELIGNENHGLYLADQYVKGIAKSRKS

SEQ ID NO: 5058 - protein, 1379 aa, Artificial Sequence
  SARS-CoV-2/Germany/BavPat3/2020__EPI_ISL_414521 spike protein (1-1211)(I714C_Y1110C) Ferritin construct
MFVFLVLLPLVSSQCVNLTTRTQLPPAYTNSFTRGVYYPDKVFRSSVLHSTQDLFLPFFSNVTWFHAIHVSGTNGTKRFDNPVLPFNDGVYFASTEKSNIIRGWIFGTTLDSKTQSLLIVNNATNVVIKVCEFQFCNDPFLGVYYHKNNKSWMESEFRVYSSANNCTFEYVSQPFLMDLEGKQGNFKNLREFVFKNIDGYFKIYSKHTPINLVRDLPQGFSALEPLVDLPIGINITRFQTLLALHRSYLTPGDSSSGWTAGAAAYYVGYLQPRTFLLKYNENGTITDAVDCALDPLSETKCTLKSFTVEKGIYQTSNFRVQPTESIVRFPNITNLCPFGEVFNATRFASVYAWNRKRISNCVADYSVLYNSASFSTFKCYGVSPTKLNDLCFTNVYADSFVIRGDEVRQIAPGQTGKIADYNYKLPDDFTGCVIAWNSNNLDSKVGGNYNYLYRLFRKSNLKPFERDISTEIYQAGSTPCNGVEGFNCYFPLQSYGFQPTNGVGYQPYRVVVLSFELLHAPATVCGPKKSTNLVKNKCVNFNFNGLTGTGVLTESNKKFLPFQQFGRDIADTTDAVRDPQTLEILDITPCSFGGVSVITPGTNTSNQVAVLYQDVNCTEVPVAIHADQLTPTWRVYSTGSNVFQTRAGCLIGAEHVNNSYECDIPIGAGICASYQTQTNSPRRARSVASQSIIAYTMSLGAENSVAYSNNSIACPTNFTISVTTEILPVSMTKTSVDCTMYICGDSTECSNLLLQYGSFCTQLNRALTGIAVEQDKNTQQVFAQVKQIYKTPPIKDFGGFNFSQILPDPSKPSKRSFIEDLLFNKVTLADAGFIKQYGDCLGDIAARDLICAQKFNGLTVLPPLLTDEMIAQYTSALLAGTITSGWTFGAGAALQIPFAMQMAYRFNGIGVTQNVLYENQKLIANQFNSAIGKIQDSLSSTASALGKLQDVVNQNAQALNTLVKQLSSNFGAISSVLNDILSRLDKVEAEVQIDRLITGRLQSLQTYVTQQLIRAAEIRASANLAATKMSECVLGQSKRVDFCGKGYHLMSFPQSAPHGVVFLHVTYVPAQEKNFTTAPAICHDGKAHFPREGVFVSNGTHWFVTQRNFCEPQIITTDNTFVSGNCDVVIGIVNNTVYDPLQPELDSFKEELDKYFKNHTSPDVDLGDISGINASVVNIQKEIDRLNEVAKNLNESLIDLQELGKYEQYIKGGGGSDIIKLLNEQVNKEMQSSNLYMSMSSWCYTHSLDGAGLFLFDHAAEEYEHAKKLIIFLNENNVPVQLTSISAPEHKFEGLTQIFQKAYEHEQHISESINNIVDHAIKSKDHATFNFLQWYVAEQHEEEVLFKDILDKIELIGNENHGLYLADQYVKGIAKSRKS

SEQ ID NO: 5059 - protein, 1379 aa, Artificial Sequence
  SARS-CoV-2/France/HF1805/2020__EPI_ISL_414628 spike protein (1-1211)(I714C_Y1110C) Ferritin construct
MFVFLVLLPLVSSQCVNLTTRTQLPPAYTNSFTRGVYYPDKVFRSSVLHSTQDLFLPFFSNVTWFHAIHVSGTNGTKRFDNPVLPFNDGVYFASTEKSNIIRGWIFGTTLDSKTQSLLIVNNATNVVIKVCEFQFCNDPFLGVYYHKNNKSWMESEFRVYSSANNCTFEYVSQPFLMDLEGKQGNFKNLREFVFKNIDGYFKIYSKHTPINLVRDLPQGFSALEPLVDLPIGINITRFQTLLALHRSYLTPGDSSSGWTAGAAAYYVGYLQPRTFLLKYNENGTITDAVDCALDPLSETKCTLKSFTVEKGIYQTSNFRVQPTESIVRFPNITNLCPFGEVFNATRFASVYAWNRKRISNCVADYSVLYNSASFSTFKCYGVSPTKLNDLCFTNVYADSFVIRGDEVRQIAPGQTGKIADYNYKLPDDFTGCVIAWNSNNLDSKVGGNYNYLYRLFRKSNLKPFERDISTEIYQAGSTPCNGVEGFNCYFPLQSYGFQPTNGVGYQPYRVVVLSFELLHAPATVCGPKKSTNLVKNKCVNFNFNGLTGTGVLTESNKKFLPFQQFGRDIADTTDAVRDPQTLEILDITPCSFGGVSVITPGTNTSNQVAVLYQGVNCTEVPVAIHADQLTPTWRVYSTGSNVFQTRAGCLIGAEHVNNSYECDIPIGAGICASYQTQTNSPRRARSVASQSIIAYTMSLGAENSVAYSNNSIACPTNFTISVTTEILPVSMTKTSVDCTMYICGDSTECSNLLLQYGSFCTQLNRALTGIAVEQDKNTQEVFAQVKQIYKTPPIKDFGGFNFSQILPDPSKPSKRSFIEDLLFNKVTLADAGFIKQYGDCLGDIAARDLICAQKFNGLTVLPPLLTDEMIAQYTSALLAGTITSGWTFGAGAALQIPFAMQMAYRFNGIGVTQNVLYENQKLIANQFNSAIGKIQDSLSSTASALGKLQDVVNQNAQALNTLVKQLSSNFGAISSVLNDILSRLDKVEAEVQIDRLITGRLQSLQTYVTQQLIRAAEIRASANLAATKMSECVLGQSKRVDFCGKGYHLMSFPQSAPHGVVFLHVTYVPAQEKNFTTAPAICHDGKAHFPREGVFVSNGTHWFVTQRNFCEPQIITTDNTFVSGNCDVVIGVVNNTVYDPLQPELDSFKEELDKYFKNHTSPDVDLGDISGINASVVNIQKEIDRLNEVAKNLNESLIDLQELGKYEQYIKGGGGSDIIKLLNEQVNKEMQSSNLYMSMSSWCYTHSLDGAGLFLFDHAAEEYEHAKKLIIFLNENNVPVQLTSISAPEHKFEGLTQIFQKAYEHEQHISESINNIVDHAIKSKDHATFNFLQWYVAEQHEEEVLFKDILDKIELIGNENHGLYLADQYVKGIAKSRKS

SEQ ID NO: 5060 - protein, 1379 aa, Artificial Sequence
  SARS-CoV-2/Netherlands/ZuidHolland_9/2020__EPI_ISL_414445 spike protein (1-1211)(I714C_Y1110C) Ferritin construct
MFVFLVLLPLVSSQCVNLTTRTQLPPAYTNSFTRGVYYPDKVFRSSVLHSTQDLFLPFFSNVTWFHAIHVSGTNGTKRFDNPVLPFNDGVYFASTEKSNIIRGWIFGTTLDSKTQSLLIVNNATNVVIKVCEFQFCNDPFLGVYYHKNNKSWMESEFRVYSSANNCTFEYVSQPFLMDLEGKQGNFKNLREFVFKNIDGYFKIYSKHTPINLVRDLPQGFSALEPLVDLPIGINITRFQTLLALHRSYLTPGDSSSGWTAGAAAYYVGYLQPRTFLLKYNENGTITDAVDCALDPLSETKCTLKSFTVEKGIYQTSNFRVQPTESIVRFPNITNLCPFGEVFNATRFASVYAWNRKRISNCVADYSVLYNSASFSTFKCYGVSPTKLNDLCFTNVYADSFVIRGDEVRQIAPGQTGKIADYNYKLPDDFTGCVIAWNSNNLDSKVGGNYNYLYRLFRKSNLKPFERDISTEIYQAGSTPCNGVEGFNCYFPLQSYGFQPTNGVGYQPYRVVVLSFELLHAPATVCGPKKSTNLVKNKCVNFNFNGLTGTGVLTESNKKFLPFQQFGRDIADTTDAVRDPQTLEILDITPCSFGGVSVITPGTNTSNQVAVLYQGVNCTEVPVAIHADQLTPTWRVYSTGSNVFQTRAGCLIGAEHVNNSYECDIPIGAGICASYQTQTNSPRRARSVASQSIIAYTMSLGAENSVAYSNNSIACPTNFTISVTTEILPVSMTKTSVDCTMYICGDSTECSNLLLQYGSFCTQLNRALTGIAVEQDKNTQEVFAQVKQIYKTPPIKDFGGFNFSQILPDPSKPSKRSFIEDLLFNKVTLADAGFIKQYGDCLGDIAARDLICVQKFNGLTVLPPLLTDEMIAQYTSALLAGTITSGWTFGAGAALQIPFAMQMAYRFNGIGVTQNVLYENQKLIANQFNSAIGKIQDSLSSTASALGKLQDVVNQNAQALNTLVKQLSSNFGAISSVLNDILSRLDKVEAEVQIDRLITGRLQSLQTYVTQQLIRAAEIRASANLAATKMSECVLGQSKRVDFCGKGYHLMSFPQSAPHGVVFLHVTYVPAQEKNFTTAPAICHDGKAHFPREGVFVSNGTHWFVTQRNFCEPQIITTDNTFVSGNCDVVIGIVNNTVYDPLQPELDSFKEELDKYFKNHTSPDVDLGDISGINASVVNIQKEIDRLNEVAKNLNESLIDLQELGKYEQYIKGGGGSDIIKLLNEQVNKEMQSSNLYMSMSSWCYTHSLDGAGLFLFDHAAEEYEHAKKLIIFLNENNVPVQLTSISAPEHKFEGLTQIFQKAYEHEQHISESINNIVDHAIKSKDHATFNFLQWYVAEQHEEEVLFKDILDKIELIGNENHGLYLADQYVKGIAKSRKS

SEQ ID NO: 5061 - protein, 1379 aa, Artificial Sequence
  SARS-CoV-2/Finland/FIN03032020A/2020__EPI_ISL_413602 spike protein (1-1211)(I714C_Y1110C) Ferritin construct
MFVFLVLLPLVSSQCVNLTTRTQLPPAYTNSFTRGVYYPDKVFRSSVLHSTQDLFLPFFSNVTWFHAIHVSGTNGTKRFDNPVLPFNDGVYFASTEKSNIIRGWIFGTTLDSKTQSLLIVNNATNVVIKVCEFQFCNDPFLGVYYHKNNKSWMESEFRVYSSANNCTFEYVSQPFLMDLEGKQGNFKNLREFVFKNIDGYFKIYSKHTPINLVRDLPQGFSALEPLVDLPIGINITRFQTLLALHRSYLTPGDSSSGWTAGAAAYYVGYLQPRTFLLKYNENGTITDAVDCALDPLSETKCTLKSFTVEKGIYQTSNFRVQPTESIVRFPNITNLCPFGEVFNATRFASVYAWNRKRISNCVADYSVLYNSASFSTFKCYGVSPTKLNDLCFTNVYADSFVIRGDEVRQIAPGQTGKIADYNYKLPDDFTGCVISWNSNNLDSKVGGNYNYLYRLFRKSNLKPFERDISTEIYQAGSTPCNGVEGFNCYFPLQSYGFQPTNGVGYQPYRVVVLSFELLHAPATVCGPKKSTNLVKNKCVNFNFNGLTGTGVLTESNKKFLPFQQFGRDIADTTDAVRDPQTLEILDITPCSFGGVSVITPGTNTSNQVAVLYQGVNCTEVPVAIHADQLTPTWRVYSTGSNVFQTRAGCLIGAEHVNNSYECDIPIGAGICASYQTQTNSPRRARSVASQSIIAYTMSLGAENSVAYSNNSIACPTNFTISVTTEILPVSMTKTSVDCTMYICGDSTECSNLLLQYGSFCTQLNRALTGIAVEQDKNTQEVFAQVKQIYKTPPIKDFGGFNFSQILPDPSKPSKRSFIEDLLFNKVTLADAGFIKQYGDCLGDIAARDLICAQKFNGLTVLPPLLTDEMIAQYTSALLAGTITSGWTFGAGAALQIPFAMQMAYRFNGIGVTQNVLYENQKLIANQFNSAIGKIQDSLSSTASALGKLQDVVNQNAQALNTLVKQLSSNFGAISSVLNDILSRLDKVEAEVQIDRLITGRLQSLQTYVTQQLIRAAEIRASANLAATKMSECVLGQSKRVDFCGKGYHLMSFPQSAPHGVVFLHVTYVPAQEKNFTTAPAICHDGKAHFPREGVFVSNGTHWFVTQRNFCEPQIITTDNTFVSGNCDVVIGIVNNTVYDPLQPELDSFKEELDKYFKNHTSPDVDLGDISGINASVVNIQKEIDRLNEVAKNLNESLIDLQELGKYEQYIKGGGGSDIIKLLNEQVNKEMQSSNLYMSMSSWCYTHSLDGAGLFLFDHAAEEYEHAKKLIIFLNENNVPVQLTSISAPEHKFEGLTQIFQKAYEHEQHISESINNIVDHAIKSKDHATFNFLQWYVAEQHEEEVLFKDILDKIELIGNENHGLYLADQYVKGIAKSRKS

SEQ ID NO: 5062 - protein, 1379 aa, Artificial Sequence
  SARS-CoV-2/France/GE1977/2020__EPI_ISL_414632 spike protein (1-1211)(I714C_Y1110C) Ferritin construct
MFVFLVLLPLVSSQCVNLTTRTQLPPAYTNSFTRGVYYPDKVFRSSVLHSTQDLFLPFFSNVTWFHAIHVSGTNGTKRFDNPVLPFNDGVYFASTEKSNIIRGWIFGTTLDSKTQSLLIVNNATNVVIKVCEFQFCNDPFLGVYYHKNNKSWMESEFRVYSSANNCTFEYVSQPFLMDLEGKQGNFKNLREFVFKNIDGYFKIYSKHTPINLVRDLPQGFSALEPLVDLPIGINITRFQTLLALHRSYLTPGDSSSGWTAGAAAYYVGYLQPRTFLLKYNENGTITDAVDCALDPLSETKCTLKSFTVEKGIYQTSNFRVQPTESIVRFPNITNLCPFGEVFNATRFASVYAWNRKRISNCVADYSVLYNSASFSTFKCYGVSPTKLNDLCFTNVYADSFVIRGDEVRQIAPGQTGKIADYNYKLPDDFTGCVIAWNSNNLDSKVGGNYNYLYRLFRKSNLKPFERDISTEIYQAGSTPCNGVEGFNCYFPLQSYGFQPTNGVGYQPYRVVVLSFELLHAPATVCGPKKSTNLVKNKCVNFNFNGLTGTGVLTESNKKFLPFQQFGRDIADTTDAVRDPQTLEILDITPCSFGGVSVITPGTNTSNQVAVLYQGVNCTEVPVAIHADQLTPTWRVYSTGSNVFQTRAGCLIGAEHVNNSYECDIPIGAGICASYQTQTNSPRRARSVASQSIIAYTMSLGAENSVAYSNNSIACPTNFTISVTTEILPVSMTKTSVDCTMYICGDSTECSNLLLQYGSFCTQLNRALTGIAVEQDKNTQEVFAQVKQIYKTPPIKDFGGFNFSQILPDPSKPSKRSFIEDLLFNKVTLADAGFIKQYGDCLGDIAARDLICAQKFNGLTVLPPLLTDEMIAQYTSALLAGTITSGWTFGAGAALQIPFAMQMAYRFNGIGVTQNVLYENQKLIANQFNSAIGKIQDSLFSTASALGKLQDVVNQNAQALNTLVKQLSSNFGAISSVLNDILSRLDKVEAEVQIDRLITGRLQSLQTYVTQQLIRAAEIRASANLAATKMSECVLGQSKRVDFCGKGYHLMSFPQSAPHGVVFLHVTYVPAQEKNFTTAPAICHDGKAHFPREGVFVSNGTHWFVTQRNFCEPQIITTDNTFVSGNCDVVIGIVNNTVYDPLQPELDSFKEELDKYFKNHTSPDVDLGDISGINASVVNIQKEIDRLNEVAKNLNESLIDLQELGKYEQYIKGGGGSDIIKLLNEQVNKEMQSSNLYMSMSSWCYTHSLDGAGLFLFDHAAEEYEHAKKLIIFLNENNVPVQLTSISAPEHKFEGLTQIFQKAYEHEQHISESINNIVDHAIKSKDHATFNFLQWYVAEQHEEEVLFKDILDKIELIGNENHGLYLADQYVKGIAKSRKS

SEQ ID NO: 5063 - protein, 1379 aa, Artificial Sequence
  SARS-CoV-2/Finland/FIN-313/2020__EPI_ISL_414641 spike protein (1-1211)(I714C_Y1110C) Ferritin construct
MFVFLVLLPLVSSQCVNLTTRTQLPPAYTNSFTRGVYYPDKVFRSSVLHSTQDLFLPFFSNVTWFHAIHVSGTNGTKRFDNPVLPFNDGVYFASTEKSNIIRGWIFGTTLDSKTQSLLIVNNATNVVIKVCEFQFCNDPFLGVYYHKNNKSWMESEFRVYSSANNCTFEYVSQPFLMDLEGKQGNFKNLREFVFKNIDGYFKIYSKHTPINLVRDLPQGFSALEPLVDLPIGINITRFKTLLALHRSYLTPGDSSSGWTAGAAAYYVGYLQPRTFLLKYNENGTITDAVDCALDPLSETKCTLKSFTVEKGIYQTSNFRVQPTESIVRFPNITNLCPFGEVFNATRFASVYAWNRKRISNCVADYSVLYNSASFSTFKCYGVSPTKLNDLCFTNVYADSFVIRGDEVRQIAPGQTGKIADYNYKLPDDFTGCVIAWNSNNLDSKVGGNYNYLYRLFRKSNLKPFERDISTEIYQAGSTPCNGVEGFNCYFPLQSYGFQPTNGVGYQPYRVVVLSFELLHAPATVCGPKKSTNLVKNKCVNFNFNGLTGTGVLTESNKKFLPFQQFGRDIADTTDAVRDPQTLEILDITPCSFGGVSVITPGTNTSNQVAVLYQGVNCTEVPVAIHADQLTPTWRVYSTGSNVFQTRAGCLIGAEHVNNSYECDIPIGAGICASYQTQTNSPRRARSVASQSIIAYTMSLGAENSVAYSNNSIACPTNFTISVTTEILPVSMTKTSVDCTMYICGDSTECSNLLLQYGSFCTQLNRALTGIAVEQDKNTQEVFAQVKQIYKTPPIKDFGGFNFSQILPDPSKPSKRSFIEDLLFNKVTLADAGFIKQYGDCLGDIAARDLICAQKFNGLTVLPPLLTDEMIAQYTSALLAGTITSGWTFGAGAALQIPFAMQMAYRFNGIGVTQNVLYENQKLIANQFNSAIGKIQDSLSSTASALGKLQDVVNQNAQALNTLVKQLSSNFGAISSVLNDILSRLDKVEAEVQIDRLITGRLQSLQTYVTQQLIRAAEIRASANLAATKMSECVLGQSKRVDFCGKGYHLMSFPQSAPHGVVFLHVTYVPAQEKNFTTAPAICHDGKAHFPREGVFVSNGTHWFVTQRNFCEPQIITTDNTFVSGNCDVVIGIVNNTVYDPLQPELDSFKEELDKYFKNHTSPDVDLGDISGINASVVNIQKEIDRLNEVAKNLNESLIDLQELGKYEQYIKGGGGSDIIKLLNEQVNKEMQSSNLYMSMSSWCYTHSLDGAGLFLFDHAAEEYEHAKKLIIFLNENNVPVQLTSISAPEHKFEGLTQIFQKAYEHEQHISESINNIVDHAIKSKDHATFNFLQWYVAEQHEEEVLFKDILDKIELIGNENHGLYLADQYVKGIAKSRKS

SEQ ID NO: 5064 - protein, 1379 aa, Artificial Sequence
  SARS-CoV-2/Netherlands/ZuidHolland_2/2020__EPI_ISL_414556 spike protein (1-1211)(I714C_Y1110C) Ferritin construct
MFVFLVLLPLVSSQCVNLTTRTQLPPAYTNSFTRGVYYPDKVFRSSVLHSTQDLFLPFFSNVTWFHAIHVSGTNGTKRFDNPVLPFNDGVYFASTEKSNIIRGWIFGTTLDSKTQSLLIVNNATNVVIKVCEFQFCNDPFLGVYYHKNNKSWMESEFRVYSSANNCTFEYVSQPFLMDLEGKQGNFKNLREFVFKNIDGYFKIYSKHTPINLVRDLPQGFSALEPLVDLPIGINITRFQTLLALHRSYLTPGDSSSGWTAGAAAYYVGYLQPRTFLLKYNENGTITDAVDCALDPLSETKCTLKSFTVEKGIYQTSNFRVQPTESIVRFPNITNLCPFGEVFNATRFASVYAWNRKRISNCVADYSVLYNSASFSTFKCYGVSPTKLNDLCFTNVYADSFVIRGDEVRQIAPGQTGKIADYNYKLPDDFTGCVIAWNSNNLDSKVGGNYNYLYRLFRKSNLKPFERDISTEIYQAGSTPCNGVEGFNCYFPLQSYGFQPTNGVGYQPYRVVVLSFELLHAPATVCGPKKSTNLVKNKCVNFNFNGLTGTGVLTESNKKFLPFQQFGRDIADTTDAVRDPQTLEILDITPCSFGGVSVITPGTNTSNQVAVLYQGVNCTEVPVAIHADQLTPTWRVYSTGSNVFQTRAGCLIGAEHVNNSYECDIPIGAGICASYQTQTNSPRRARSVASQSIIAYTMSLGAENSVAYSNNSIACPTNFTISVTTEILPVSMTKTSVDCTMYICGDSTECSNLLLQYGSFCTQLNRALTGIALEQDKNTQEVFAQVKQIYKTPPIKDFGGFNFSQILPDPSKPSKRSFIEDLLFNKVTLADAGFIKQYGDCLGDIAARDLICAQKFNGLTVLPPLLTDEMIAQYTSALLAGTITSGWTFGAGAALQIPFAMQMAYRFNGIGVTQNVLYENQKLIANQFNSAIGKIQDSLSSTASALGKLQDVVNQNAQALNTLVKQLSSNFGAISSVLNDILSRLDKVEAEVQIDRLITGRLQSLQTYVTQQLIRAAEIRASANLAATKMSECVLGQSKRVDFCGKGYHLMSFPQSAPHGVVFLHVTYVPAQEKNFTTAPAICHDGKAHFPREGVFVSNGTHWFVTQRNFCEPQIITTDNTFVSGNCDVVIGIVNNTVYDPLQPELDSFKEELDKYFKNHTSPDVDLGDISGINASVVNIQKEIDRLNEVAKNLNESLIDLQELGKYEQYIKGGGGSDIIKLLNEQVNKEMQSSNLYMSMSSWCYTHSLDGAGLFLFDHAAEEYEHAKKLIIFLNENNVPVQLTSISAPEHKFEGLTQIFQKAYEHEQHISESINNIVDHAIKSKDHATFNFLQWYVAEQHEEEVLFKDILDKIELIGNENHGLYLADQYVKGIAKSRKS

SEQ ID NO: 5065 - protein, 1379 aa, Artificial Sequence
  SARS-CoV-2/USA/WA-UW31/2020__EPI_ISL_414618 spike protein (1-1211)(I714C_Y1110C) Ferritin construct
MFVFLVLLPLVSSQCVNLTTRTQLPPAYTNSFTRGVYYPDKVFRSSVLHSTQDLFLPFFSNVTWFHAIHVSGTNGTKRFDNPVLPFNDGVYFASTEKSNIIRGWIFGTTLDSKTQSLLIVNNATNVVIKVCEFQFCNDPFLGVYYHKNNKSWMESEFRVYSSANNCTFEYVSQPFLMDLEGKQGNFKNLREFVFKNIDGYFKIYSKHTPINLVRDLPQGFSALEPLVDLPIGINITRFQTLLALHRSYLTPGDSSSGWTAGAAAYYVGYLQPRTFLLKYNENGTITDAVDCALDPLSETKCTLKSFTVEKGIYQTSNFRVQPTESIVRFPNITNLCPFGEVFNATRFASVYAWNRKRISNCVADYSVLYNSASFSTFKCYGVSPTKLNDLCFTNVYADSFVIRGDEVRQIAPGQTGKIADYNYKLPDDFTGCVIAWNSNNLDSKVGGNYNYLYRLFRKSNLKPFERDISTEIYQAGSTPCNGAEGFNCYFPLQSYGFQPTNGVGYQPYRVVVLSFELLHAPATVCGPKKSTNLVKNKCVNFNFNGLTGTGVLTESNKKFLPFQQFGRDIADTTDAVRDPQTLEILDITPCSFGGVSVITPGTNTSNQVAVLYQDVNCTEVPVAIHADQLTPTWRVYSTGSNVFQTRAGCLIGAEHVNNSYECDIPIGAGICASYQTQTNSPRRARSVASQSIIAYTMSLGAENSVAYSNNSIACPTNFTISVTTEILPVSMTKTSVDCTMYICGDSTECSNLLLQYGSFCTQLNRALTGIAVEQDKNTQEVFAQVKQIYKTPPIKDFGGFNFSQILPDPSKPSKRSFIEDLLFNKVTLADAGFIKQYGDCLGDIAARDLICAQKFNGLTVLPPLLTDEMIAQYTSALLAGTITSGWTFGAGAALQIPFAMQMAYRFNGIGVTQNVLYENQKLIANQFNSAIGKIQDSLSSTASALGKLQDVVNQNAQALNTLVKQLSSNFGAISSVLNDILSRLDKVEAEVQIDRLITGRLQSLQTYVTQQLIRAAEIRASANLAATKMSECVLGQSKRVDFCGKGYHLMSFPQSAPHGVVFLHVTYVPAQEKNFTTAPAICHDGKAHFPREGVFVSNGTHWFVTQRNFCEPQIITTDNTFVSGNCDVVIGIVNNTVYDPLQPELDSFKEELDKYFKNHTSPDVDLGDISGINASVVNIQKEIDRLNEVAKNLNESLIDLQELGKYEQYIKGGGGSDIIKLLNEQVNKEMQSSNLYMSMSSWCYTHSLDGAGLFLFDHAAEEYEHAKKLIIFLNENNVPVQLTSISAPEHKFEGLTQIFQKAYEHEQHISESINNIVDHAIKSKDHATFNFLQWYVAEQHEEEVLFKDILDKIELIGNENHGLYLADQYVKGIAKSRKS

SEQ ID NO: 5066 - protein, 1379 aa, Artificial Sequence
  SARS-CoV-2/South Korea/SNU01/2020__EPI_ISL_411929 spike protein (1-1211)(I714C_Y1110C) Ferritin construct
MFVFLVLLPLVSSQCVNLTTRTQLPPAYTNSFTRGVYYPDKVFRSSVLHSTQDLFLPFFSNVTWFHAIHVSGTNGTKRFDNPVLPFNDGVYFASTEKSNIIRGWIFGTTLDSKTQSLLIVNNATNVVIKVCEFQFCNDPFLGVYYHKNNKSWMESEFRVYSSANNCTFEYVSQPFLMDLEGKQGNFKNLREFVFKNIDGYFKIYSKHTPINLVRDLPQGFWALEPLVDLPIGINITRFQTLLALHRSYLTPGDSSSGWTAGAAAYYVGYLQPRTFLLKYNENGTITDAVDCALDPLSETKCTLKSFTVEKGIYQTSNFRVQPTESIVRFPNITNLCPFGEVFNATRFASVYAWNRKRISNCVADYSVLYNSASFSTFKCYGVSPTKLNDLCFTNVYADSFVIRGDEVRQIAPGQTGKIADYNYKLPDDFTGCVIAWNSNNLDSKVGGNYNYLYRLFRKSNLKPFERDISTEIYQAGSTPCNGVEGFNCYFPLQSYGFQPTNGVGYQPYRVVVLSFELLHAPATVCGPKKSTNLVKNKCVNFNFNGLTGTGVLTESNKKFLPFQQFGRDIADTTDAVRDPQTLEILDITPCSFGGVSVITPGTNTSNQVAVLYQDVNCTEVPVAIHADQLTPTWRVYSTGSNVFQTRAGCLIGAEHVNNSYECDIPIGAGICASYQTQTNSPRRARSVASQSIIAYTMSLGAENSVAYSNNSIACPTNFTISVTTEILPVSMTKTSVDCTMYICGDSTECSNLLLQYGSFCTQLNRALTGIAVEQDKNTQEVFAQVKQIYKTPPIKDFGGFNFSQILPDPSKPSKRSFIEDLLFNKVTLADAGFIKQYGDCLGDIAARDLICAQKFNGLTVLPPLLTDEMIAQYTSALLAGTITSGWTFGAGAALQIPFAMQMAYRFNGIGVTQNVLYENQKLIANQFNSAIGKIQDSLSSTASALGKLQDVVNQNAQALNTLVKQLSSNFGAISSVLNDILSRLDKVEAEVQIDRLITGRLQSLQTYVTQQLIRAAEIRASANLAATKMSECVLGQSKRVDFCGKGYHLMSFPQSAPHGVVFLHVTYVPAQEKNFTTAPAICHDGKAHFPREGVFVSNGTHWFVTQRNFCEPQIITTDNTFVSGNCDVVIGIVNNTVYDPLQPELDSFKEELDKYFKNHTSPDVDLGDISGINASVVNIQKEIDRLNEVAKNLNESLIDLQELGKYEQYIKGGGGSDIIKLLNEQVNKEMQSSNLYMSMSSWCYTHSLDGAGLFLFDHAAEEYEHAKKLIIFLNENNVPVQLTSISAPEHKFEGLTQIFQKAYEHEQHISESINNIVDHAIKSKDHATFNFLQWYVAEQHEEEVLFKDILDKIELIGNENHGLYLADQYVKGIAKSRKS

SEQ ID NO: 5067 - protein, 1379 aa, Artificial Sequence
  SARS-CoV-2/China/WF0004/2020__EPI_ISL_413694 spike protein (1-1211)(I714C_Y1110C) Ferritin construct
MFVFLVLLPLVSSQCVNLTTRTQLPPAYTNSFTRGVYYPDKVFRSSVLHSTQDLFLPFFSNVTWFHAIHVSGTNGTKRFDNPVLPFNDGVYFASTEKSNIIRGWIFGTTLDSKTQSLLIVNNATNVVIKVCEFQFCNDPFLGVYYHKNNKSWTESEFRVYSSANNCTFEYVSQPFLMDLEGKQGNFKNLREFVFKNIDGYFKIYSKHTPINLVRDLPQGFSALEPLVDLPIGINITRFQTLLALHRSYLTPGDSSSGWTAGAAAYYVGYLQPRTFLLKYNENGTITDAVDCALDPLSETKCTLKSFTVEKGIYQTSNFRVQPTESIVRFPNITNLCPFGEVFNATRFASVYAWNRKRISNCVADYSVLYNSASFSTFKCYGVSPTKLNDLCFTNVYADSFVIRGDEVRQIAPGQTGKIADYNYKLPDDFTGCVIAWNSNNLDSKVGGNYNYLYRLFRKSNLKPFERDISTEIYQAGSTPCNGVEGFNCYFPLQSYGFQPTNGVGYQPYRVVVLSFELLHAPATVCGPKKSTNLVKNKCVNFNFNGLTGTGVLTESNKKFLPFQQFGRDIADTTDAVRDPQTLEILDITPCSFGGVSVITPGTNTSNQVAVLYQDVNCTEVPVAIHADQLTPTWRVYSTGSNVFQTRAGCLIGAEHVNNSYECDIPIGAGICASYQTQTNSPRRARSVASQSIIAYTMSLGAENSVAYSNNSIACPTNFTISVTTEILPVSMTKTSVDCTMYICGDSTECSNLLLQYGSFCTQLNRALTGIAVEQDKNTQEVFAQVKQIYKTPPIKDFGGFNFSQILPDPSKPSKRSFIEDLLFNKVTLADAGFIKQYGDCLGDIAARDLICAQKFNGLTVLPPLLTDEMIAQYTSALLAGTITSGWTFGAGAALQIPFAMQMAYRFNGIGVTQNVLYENQKLIANQFNSAIGKIQDSLSSTASALGKLQDVVNQNAQALNTLVKQLSSNFGAISSVLNDILSRLDKVEAEVQIDRLITGRLQSLQTYVTQQLIRAAEIRASANLAATKMSECVLGQSKRFDFCGKGYHLMSFPQSAPHGVVFLHVTYVPAQEKNFTTAPAICHDGKAHFPREGVFVSNGTHWFVTQRNFCEPQIITTDNTFVSGNCDVVIGIVNNTVYDPLQPELDSFKEELDKYFKNHTSPDVDLGDISGINASVVNIQKEIDRLNEVAKNLNESLIDLQELGKYEQYIKGGGGSDIIKLLNEQVNKEMQSSNLYMSMSSWCYTHSLDGAGLFLFDHAAEEYEHAKKLIIFLNENNVPVQLTSISAPEHKFEGLTQIFQKAYEHEQHISESINNIVDHAIKSKDHATFNFLQWYVAEQHEEEVLFKDILDKIELIGNENHGLYLADQYVKGIAKSRKS

SEQ ID NO: 5068 - protein, 1379 aa, Artificial Sequence
  SARS-CoV-2/China/WF0028/2020__EPI_ISL_413791 spike protein (1-1211)(I714C_Y1110C) Ferritin construct
MFVFLVLLPLVSSQCVNLTTRTQLPPAYTNSFTRGVYYPDKVFRSSVLHSTQDLFLPFFSNVTWFHAIHVSGTNGTKRFDNPVLPFNDGVYFASTEKSNIIRGWIFGTTLDSKTQSLLIVNNATNVVIKVCEFQFCNDPFLGVYYHKNNKSWMESEFRVYSSANNCTFEYVSQPFLMDLEGKQGNFKNLREFVFKNIDGYFKIYSKHTPINLVRDLPQGFSALEPLVDLPIGINITRFQTLLALHRSYLTPGDSSSGWTAGAAAYYVGYLQPRTFLLKYNENGTITDAVDCALDPLSETKCTLKSFTVEKGIYQTSNFRVQPTESIVRFPNITNLCPFGEVFNATRFASVYAWNRKRISNCVADYSVLYNSASFSTFKCYGVSPTKLNDLCFTNVYADSFVIRGDEVRQIAPGQTGKIADYNYKLPDDFTGCVIAWNSNNLDSKVGGNYNYLYRLFRKSNLKPFERDISTEIYQAGSTPCNGVEGFNCYFPLQSYGFQPTNGVGYQPYRVVVLSFELLHAPATVCGPKKSTNLVKNKCVNFNFNGLTGTGVLTESNKKFLPFQQFGRDIADTTDAVRDPQTLEILDITPCSFGGVSVITPGTNTSNQVAVLYQDVNCTEVPVAIHADQLTPTWRVYSTGSNVFQTRAGCLIGAEHVNNSYECDIPIGAGICASYQTQTNSPRRARSVASQSIIAYTMSLGAENSVAYSNNSIACPTNFTISVTTEILPVSMTKTSVDCTMYICGDSTECSNLLLQYGSFCTQLNRALTGIAVEQDKNTQEVFAQVKQIYKTPPIKDFGGFNFSQILPDPSKPSKRSFIEDLLFNKVTLADAGFIKQYGDCLGDIAARDLICAQKFNGLTVLPPLLTDEMIAQYTSALLAGTITSGWTFGAGAALQIPFAMQMAYRFNGIGVTQNVLYENQKLIANQFNSAIGKIQDSLSSTASALGKLQDVVNQNAQALNTLVKQLSSNFGAISSVLNDILSRLDKVEAEVQIDRLITGRLQSLQTYVTQQLIRAAEIRASANLAATKMSECVLGQSKRVDFCGKGYHLMSFPQSAPHGVVFLHVTYVPAQEKNFTTAPAICHDGKAHFPREGVFVSNGTHWFVTQRNFCEPQIITTDNTFVSGNCDVVIGIVNNTVYDPLQPELESFKEELDKYFKNHTSPDVDLGDISGINASVVNIQKEIDRLNEVAKNLNESLIDLQELGKYEQYIKGGGGSDIIKLLNEQVNKEMQSSNLYMSMSSWCYTHSLDGAGLFLFDHAAEEYEHAKKLIIFLNENNVPVQLTSISAPEHKFEGLTQIFQKAYEHEQHISESINNIVDHAIKSKDHATFNFLQWYVAEQHEEEVLFKDILDKIELIGNENHGLYLADQYVKGIAKSRKS

SEQ ID NO: 5069 - protein, 1379 aa, Artificial Sequence
  SARS-CoV-2/2019-nCoV/USA-CruiseA-18/2020__MT159716.1 spike protein (1-1211)(I714C_Y1110C) Ferritin construct
MFVFLVLLPLVSSQCVNLTTRTQLPPAYTNSFTRGVYYPDKVFRSSVLHSTQDLFLPFFSNVTWFHAIHVSGTNGTKRFDNPVLPFNDGVYFASTEKSNIIRGWIFGTTLDSKTQSLLIVNNATNVVIKVCEFQFCNDPFLGVYYHKNNKSWMESELRVYSSANNCTFEYVSQPFLMDLEGKQGNFKNLREFVFKNIDGYFKIYSKHTPINLVRDLPQGFSALEPLVDLPIGINITRFQTLLALHRSYLTPGDSSSGWTAGAAAYYVGYLQPRTFLLKYNENGTITDAVDCALDPLSETKCTLKSFTVEKGIYQTSNFRVQPTESIVRFPNITNLCPFGEVFNATRFASVYAWNRKRISNCVADYSVLYNSASFSTFKCYGVSPTKLNDLCFTNVYADSFVIRGDEVRQIAPGQTGKIADYNYKLPDDFTGCVIAWNSNNLDSKVGGNYNYLYRLFRKSNLKPFERDISTEIYQAGSTPCNGVEGFNCYFPLQSYGFQPTNGVGYQPYRVVVLSFELLHAPATVCGPKKSTNLVKNKCVNFNFNGLTGTGVLTESNKKFLPFQQFGRDIADTTDAVRDPQTLEILDITPCSFGGVSVITPGTNTSNQVAVLYQDVNCTEVPVAIHADQLTPTWRVYSTGSNVFQTRAGCLIGAEHVNNSYECDIPIGAGICASYQTQTNSPRRARSVASQSIIAYTMSLGAENSVAYSNNSIACPTNFTISVTTEILPVSMTKTSVDCTMYICGDSTECSNLLLQYGSFCTQLNRALTGIAVEQDKNTQEVFAQVKQIYKTPPIKDFGGFNFSQILPDPSKPSKRSFIEDLLFNKVTLADAGFIKQYGDCLGDIAARDLICAQKFNGLTVLPPLLTDEMIAQYTSALLAGTITSGWTFGAGAALQIPFAMQMAYRFNGIGVTQNVLYENQKLIANQFNSAIGKIQDSLSSTASALGKLQDVVNQNAQALNTLVKQLSSNFGAISSVLNDILSRLDKVEAEVQIDRLITGRLQSLQTYVTQQLIRAAEIRASANLAATKMSECVLGQSKRVDFCGKGYHLMSFPQSAPHGVVFLHVTYVPAQEKNFTTAPAICHDGKAHFPREGVFVSNGTHWFVTQRNFCEPQIITTDNTFVSGNCDVVIGIVNNTVYDPLQPELDSFKEELDKYFKNHTSPDVDLGDISGINASVVNIQKEIDRLNEVAKNLNESLIDLQELGKYEQYIKGGGGSDIIKLLNEQVNKEMQSSNLYMSMSSWCYTHSLDGAGLFLFDHAAEEYEHAKKLIIFLNENNVPVQLTSISAPEHKFEGLTQIFQKAYEHEQHISESINNIVDHAIKSKDHATFNFLQWYVAEQHEEEVLFKDILDKIELIGNENHGLYLADQYVKGIAKSRKS

SEQ ID NO: 5070 - protein, 1379 aa, Artificial Sequence
  SARS-CoV-2/SARS-CoV-2/Yunnan-01/human/2020/CHN__MT049951.1 spike protein (1-1211)(I714C_Y1110C) Ferritin construct
MFVFLVLLPLVSSQCVNLTTRTQLPPANTNSFTRGVYYPDKVFRSSVLHSTQDLFLPFFSNVTWFHAIHVSGTNGTKRFDNPVLPFNDGVYFASTEKSNIIRGWIFGTTLDSKTQSLLIVNNATNVVIKVCEFQFCNDPFLGVYYHKNNKSWMESEFRVYSSANNCTFEYVSQPFLMDLEGKQGNFKNLREFVFKNIDGYFKIYSKHTPINLVRDLPQGFSALEPLVDLPIGINITRFQTLLALHRSYLTPGDSSSGWTAGAAAYYVGYLQPRTFLLKYNENGTITDAVDCALDPLSETKCTLKSFTVEKGIYQTSNFRVQPTESIVRFPNITNLCPFGEVFNATRFASVYAWNRKRISNCVADYSVLYNSASFSTFKCYGVSPTKLNDLCFTNVYADSFVIRGDEVRQIAPGQTGKIADYNYKLPDDFTGCVIAWNSNNLDSKVGGNYNYLYRLFRKSNLKPFERDISTEIYQAGSTPCNGVEGFNCYFPLQSYGFQPTNGVGYQPYRVVVLSFELLHAPATVCGPKKSTNLVKNKCVNFNFNGLTGTGVLTESNKKFLPFQQFGRDIADTTDAVRDPQTLEILDITPCSFGGVSVITPGTNTSNQVAVLYQDVNCTEVPVAIHADQLTPTWRVYSTGSNVFQTRAGCLIGAEHVNNSYECDIPIGAGICASYQTQTNSPRRARSVASQSIIAYTMSLGAENSVAYSNNSIACPTNFTISVTTEILPVSMTKTSVDCTMYICGDSTECSNLLLQYGSFCTQLNRALTGIAVEQDKNTQEVFAQVKQIYKTPPIKDFGGFNFSQILPDPSKPSKRSFIEDLLFNKVTLADAGFIKQYGDCLGDIAARDLICAQKFNGLTVLPPLLTDEMIAQYTSALLAGTITSGWTFGAGAALQIPFAMQMAYRFNGIGVTQNVLYENQKLIANQFNSAIGKIQDSLSSTASALGKLQDVVNQNAQALNTLVKQLSSNFGAISSVLNDILSRLDKVEAEVQIDRLITGRLQSLQTYVTQQLIRAAEIRASANLAATKMSECVLGQSKRVDFCGKGYHLMSFPQSAPHGVVFLHVTYVPAQEKNFTTAPAICHDGKAHFPREGVFVSNGTHWFVTQRNFCEPQIITTDNTFVSGNCDVVIGIVNNTVYDPLQPELDSFKEELDKYFKNHTSPDVDLGDISGINASVVNIQKEIDRLNEVAKNLNESLIDLQELGKYEQYIKGGGGSDIIKLLNEQVNKEMQSSNLYMSMSSWCYTHSLDGAGLFLFDHAAEEYEHAKKLIIFLNENNVPVQLTSISAPEHKFEGLTQIFQKAYEHEQHISESINNIVDHAIKSKDHATFNFLQWYVAEQHEEEVLFKDILDKIELIGNENHGLYLADQYVKGIAKSRKS

SEQ ID NO: 5071 - protein, 1379 aa, Artificial Sequence
  SARS-CoV-2/USA/WA-UW292/2020__EPI_ISL_418077 spike protein (1-1211)(I714C_Y1110C) Ferritin construct
MFVFLVLLPLVSSQCVNLTTRTQLPPAYTNSFTRGVYYPDKVFRSSVLHSTQDLFLPFFSNVTWFHAIHVSGTNGTKRFDNPVLPFNDGVYFASTEKSNIIRGWIFGTTLDSKTQSLLIVNNATNVVIKVCEFQFCNDPFLGVYYHKNNKSWMESEFRVYSSANNCTFEYVSQPFLMDLEGKQGNFKNLREFVFKNIDGYFKIYSKHTPINLVRDLPQGFSALEPLVDLPIGINITRFQTLLALHRSYLTPGDSSSGWTAGAAAYYVGYLQPRTFLLKYNENGTITDAVDCALDPLSETKCTLKSFTVEKGIYQTSNFRVQPTESIVRFPNITNLCPFGEVFNATRFASVYAWNRKRISNCVADYSVLYNSASFSTFKCYGVSPTKLNDLCFTNVYADSFVIRGDEVRQIAPGQTGKIADYNYKLPDDFTGCVIAWNSNNLDSKVGGNYNYLYRLFRKSNLKPFERDISTEIYQASSTPCNGVEGFNCYFPLQSYGFQPTNGVGYQPYRVVVLSFELLHAPATVCGPKKSTNLVKNKCVNFNFNGLTGTGVLTESNKKFLPFQQFGRDIADTTDAVRDPQTLEILDITPCSFGGVSVITPGTNTSNQVAVLYQDVNCTEVPVAIHADQLTPTWRVYSTGSNVFQTRAGCLIGAEHVNNSYECDIPIGAGICASYQTQTNSPRRARSVASQSIIAYTMSLGAENSVAYSNNSIACPTNFTISVTTEILPVSMTKTSVDCTMYICGDSTECSNLLLQYGSFCTQLNRALTGIAVEQDKNTQEVFAQVKQIYKTPPIKDFGGFNFSQILPDPSKPSKRSFIEDLLFNKVTLADAGFIKQYGDCLGDIAARDLICAQKFNGLTVLPPLLTDEMIAQYTSALLAGTITSGWTFGAGAALQIPFAMQMAYRFNGIGVTQNVLYENQKLIANQFNSAIGKIQDSLSSTASALGKLQDVVNQNAQALNTLVKQLSSNFGAISSVLNDILSRLDKVEAEVQIDRLITGRLQSLQTYVTQQLIRAAEIRASANLAATKMSECVLGQSKRVDFCGKGYHLMSFPQSAPHGVVFLHVTYVPAQEKNFTTAPAICHDGKAHFPREGVFVSNGTHWFVTQRNFCEPQIITTDNTFVSGNCDVVIGIVNNTVYDPLQPELDSFKEELDKYFKNHTSPDVDLGDISGINASVVNIQKEIDRLNEVAKNLNESLIDLQELGKYEQYIKGGGGSDIIKLLNEQVNKEMQSSNLYMSMSSWCYTHSLDGAGLFLFDHAAEEYEHAKKLIIFLNENNVPVQLTSISAPEHKFEGLTQIFQKAYEHEQHISESINNIVDHAIKSKDHATFNFLQWYVAEQHEEEVLFKDILDKIELIGNENHGLYLADQYVKGIAKSRKS

SEQ ID NO: 5072 - protein, 1379 aa, Artificial Sequence
  SARS-CoV-2/Iceland/192/2020__EPI_ISL_417819 spike protein (1-1211)(I714C_Y1110C) Ferritin construct
MFVFFVLLPLVSSQCVNLTTRTQLPPAYTNSFTRGVYYPDKVFRSSVLHSTQDLFLPFFSNVTWFHAIHVSGTNGTKRFDNPVLPFNDGVYFASTEKSNIIRGWIFGTTLDSKTQSLLIVNNATNVVIKVCEFQFCNDPFLGVYYHKNNKSWMESEFRVYSSANNCTFEYVSQPFLMDLEGKQGNFKNLREFVFKNIDGYFKIYSKHTPINLVRDLPQGFSALEPLVDLPIGINITRFQTLLALHRSYLTPGDSSSGWTAGAAAYYVGYLQPRTFLLKYNENGTITDAVDCALDPLSETKCTLKSFTVEKGIYQTSNFRVQPTESIVRFPNITNLCPFGEVFNATRFASVYAWNRKRISNCVADYSVLYNSASFSTFKCYGVSPTKLNDLCFTNVYADSFVIRGDEVRQIAPGQTGKIADYNYKLPDDFTGCVIAWNSNNLDSKVGGNYNYLYRLFRKSNLKPFERDISTEIYQAGSTPCNGVEGFNCYFPLQSYGFQPTNGVGYQPYRVVVLSFELLHAPATVCGPKKSTNLVKNKCVNFNFNGLTGTGVLTESNKKFLPFQQFGRDIADTTDAVRDPQTLEILDITPCSFGGVSVITPGTNTSNQVAVLYQGVNCTEVPVAIHADQLTPTWRVYSTGSNVFQTRAGCLIGAEHVNNSYECDIPIGAGICASYQTQTNSPRRARSVASQSIIAYTMSLGAENSVAYSNNSIACPTNFTISVTTEILPVSMTKTSVDCTMYICGDSTECSNLLLQYGSFCTQLNRALTGIAVEQDKNTQEVFAQVKQIYKTPPIKDFGGFNFSQILPDPSKPSKRSFIEDLLFNKVTLADAGFIKQYGDCLGDIAARDLICAQKFNGLTVLPPLLTDEMIAQYTSALLAGTITSGWTFGAGAALQIPFAMQMAYRFNGIGVTQNVLYENQKLIANQFNSAIGKIQDSLSSTASALGKLQDVVNQNAQALNTLVKQLSSNFGAISSVLNDILSRLDKVEAEVQIDRLITGRLQSLQTYVTQQLIRAAEIRASANLAATKMSECVLGQSKRVDFCGKGYHLMSFPQSAPHGVVFLHVTYVPAQEKNFTTAPAICHDGKAHFPREGVFVSNGTHWFVTQRNFCEPQIITTDNTFVSGNCDVVIGIVNNTVYDPLQPELDSFKEELDKYFKNHTSPDVDLGDISGINASVVNIQKEIDRLNEVAKNLNESLIDLQELGKYEQYIKGGGGSDIIKLLNEQVNKEMQSSNLYMSMSSWCYTHSLDGAGLFLFDHAAEEYEHAKKLIIFLNENNVPVQLTSISAPEHKFEGLTQIFQKAYEHEQHISESINNIVDHAIKSKDHATFNFLQWYVAEQHEEEVLFKDILDKIELIGNENHGLYLADQYVKGIAKSRKS

SEQ ID NO: 5073 - protein, 1379 aa, Artificial Sequence
  SARS-CoV-2/Belgium/ULG-6939/2020__EPI_ISL_417020 spike protein (1-1211)(I714C_Y1110C) Ferritin construct
MFVFLVLLPLVSSQCVNLTTRTQLPPAYTNSFTRGVYYPDKVFRSSVLHSTQDLFLPFFSNVTWFHAIHVSGTNGTKRFDNPVLPFNDGVYFASTEKSNIIRGWIFGTTLDSKTQSLLIVNNATNVVIKVCEFQFCNDPFLGVYYHKNNKSWMESEFRVYSSANNCTFEYVSQPFLMDLEGKQGNFKNLREFVFKNIDGYFKIYSKHTPINLVRDLPQGFSALEPLVDLPIGINITRFQTLLALHRSYLTPGDSSSGWTAGAAAYYVGYLQPRTFLLKYNENGTITDAVDCALDPLSETKCTLKSFTVEKGIYQTSNFRVQPTESIVRFPNITNLCPFGEVFNATRFASVYAWNRKRISNCVADYSVLYNSASFSTFKCYGVSPTKLNDLCFTNVYADSFVIRGDEVRQIAPGQTGKIADYNYKLPDDFTGCVIAWNSNNLDSKVGGNYNYLYRLFRKSNLKPFERDISTEIYQAGSTPCNGVEGFNCYFPLQSYGFQPTNGVGYQPYRVVVLSFELLHAPATVCGPKKSTNLVKNKCVNFNFNGLTGTGVLTESNKKFLPFQQFGRDIADTTDAVRDPQTLEILDITPCSFGGVSVITPGTNTSNQVAVLYQGVNCTEVPVAIHADQLTPTWRVYSTGSNVFQTRAGCLIGAEHVNNSYECDIPIGAGICASYQTQTNSPRRARSVASQSIIAYTMSLGAENSVVYSNNSIACPTNFTISVTTEILPVSMTKTSVDCTMYICGDSTECSNLLLQYGSFCTQLNRALTGIAVEQDKNTQEVFAQVKQIYKTPPIKDFGGFNFSQILPDPSKPSKRSFIEDLLFNKVTLADAGFIKQYGDCLGDIAARDLICAQKFNGLTVLPPLLTDEMIAQYTSALLAGTITSGWTFGAGAALQIPFAMQMAYRFNGIGVTQNVLYENQKLIANQFNSAIGKIQDSLSSTASALGKLQDVVNQNAQALNTLVKQLSSNFGAISSVLNDILSRLDKVEAEVQIDRLITGRLQSLQTYVTQQLIRAAEIRASANLAATKMSECVLGQSKRVDFCGKGYHLMSFPQSAPHGVVFLHVTYVPAQEKNFTTAPAICHDGKAHFPREGVFVSNGTHWFVTQRNFCEPQIITTDNTFVSGNCDVVIGIVNNTVYDPLQPELDSFKEELDKYFKNHTSPDVDLGDISGINASVVNIQKEIDRLNEVAKNLNESLIDLQELGKYEQYIKGGGGSDIIKLLNEQVNKEMQSSNLYMSMSSWCYTHSLDGAGLFLFDHAAEEYEHAKKLIIFLNENNVPVQLTSISAPEHKFEGLTQIFQKAYEHEQHISESINNIVDHAIKSKDHATFNFLQWYVAEQHEEEVLFKDILDKIELIGNENHGLYLADQYVKGIAKSRKS

SEQ ID NO: 5074 - protein, 1379 aa, Artificial Sequence
  SARS-CoV-2/France/HF2496/2020__EPI_ISL_418231 spike protein (1-1211)(I714C_Y1110C) Ferritin construct
MFVFLVLLPLVSSQCVNLTTRTQLPPAYTNSFTRGVYYPDKVFRSSVLHSTQDLFLPFFSNVTWFHAIHVSGTNGTKRFDNPVLPFNDGVYFASTEKSNIIRGWIFGTTLDSKTQSLLIVNNATNVVIKVCEFQFCNDPFLGVYYHKNNKSWMESEFRVYSSANNCTFEYVSQPFLMDLEGKQGNFKNLREFVFKNIDGYFKIYSKHTPINLVRDLPQGFSALEPLVDLPIGINITRFQTLLALHRSYLTPGDSSSGWTAGAAAYYVGYLQPRTFLLKYNENGTITDAVDCALDPLSETKCTLKSFTVEKGIYQTSNFRVQPTESIVRFPNITNLCPFGEVFNATRFASVYAWNRKRISNCVADYSVLYNSASFSTFKCYGVSPTKLNDLCFTNVYADSFVIRGDEVRQIAPGQTGKIADYNYKLPDDFTGCVIAWNSNNLDSKVGGNYNYLYRLFRKSNLKPFERDISTEIYQAGSTPCNGVEGFNCYFPLQSYGFQPTNGVGYQPYRVVVLSFELLHAPATVCGPKKSTNLVKNKCVNFNFNGLTGTGVLTESNKKFLPFQQFGRDIADTTDAVRDPQTLEILDITPCSFGGVSVITPGTNTSNQVAVLYQGVNCTEVPVAIHADQLTPTWRVYSTGSNVFQTRAGCLIGAEHVNNSYECDIPIGAGICASYQTQTNSPRRARSVASQSIIAYTMSLGAENSVAYSNNSIACPTNFTISVTTEILPVSMTKTSVDCTMYICGDSTECSNLLLQYGSFCTQLNRALTGIAVEQDKNTQEVFAQVKQIYKTPPIKDFGGFNFSQILPDPSKPSKRSFIEDLLFNKVTLADAGFIKQYGDCLGDIVARDLICAQKFNGLTVLPPLLTDEMIAQYTSALLAGTITSGWTFGAGAALQIPFAMQMAYRFNGIGVTQNVLYENQKLIANQFNSAIGKIQDSLSSTASALGKLQDVVNQNAQALNTLVKQLSSNFGAISSVLNDILSRLDKVEAEVQIDRLITGRLQSLQTYVTQQLIRAAEIRASANLAATKMSECVLGQSKRVDFCGKGYHLMSFPQSAPHGVVFLHVTYVPAQEKNFTTAPAICHDGKAHFPREGVFVSNGTHWFVTQRNFCEPQIITTDNTFVSGNCDVVIGIVNNTVYDPLQPELDSFKEELDKYFKNHTSPDVDLGDISGINASVVNIQKEIDRLNEVAKNLNESLIDLQELGKYEQYIKGGGGSDIIKLLNEQVNKEMQSSNLYMSMSSWCYTHSLDGAGLFLFDHAAEEYEHAKKLIIFLNENNVPVQLTSISAPEHKFEGLTQIFQKAYEHEQHISESINNIVDHAIKSKDHATFNFLQWYVAEQHEEEVLFKDILDKIELIGNENHGLYLADQYVKGIAKSRKS

SEQ ID NO: 5075 - protein, 1379 aa, Artificial Sequence
  SARS-CoV-2/USA/WA-UW291/2020__EPI_ISL_418076 spike protein (1-1211)(I714C_Y1110C) Ferritin construct
MFVFLVLLPLVSSQCVNLTTRTQLPPAYTNSFTRGVYYPDKVFRSSVLHSTQDLFLPFFSNVTWFHAIHVSGTNGTKRFDNPVLPFNDGVYFASTEKSNIIRGWIFGTTLDSKTQSLLIVNNATNVVIKVCEFQFCNDPFLGVYYHKNNKSWMESEFRVYSSANNCTFEYVSQPFLMDLEGKQGNFKNLREFVFKNIDGYFKIYSKHTPINLVRDLPQGFSALEPLVDLPIGINITRFQTLLALHRSYLTPGDSSSGWTAGAAAYYVGYLQPRTFLLKYNENGTITDAVDCALDPLSETKCTLKSFTVEKGIYQTSNFRVQPTESIVRFPNITNLCPFGEVFNATRFASVYAWNRKRISNCVADYSVLYNSASFSTFKCYGVSPTKLNDLCFTNVYADSFVIRGDEVRQIAPGQTGKIADYNYKLPDDFTGCVIAWNSNNLDSKVGGNYNYLYRLFRKSNLKPFERDISTEIYQAGSTPCNGVEGFNCYFPLQSYGFQPTNGVGYQPYRVVVLSFELLHAPATVCGPKKSTNLVKNKCVNFNFNGLTGTGVLTESNKKFLPFQQFGRDIADTTDAVRDPQTLEILDITPCSFGGVSVITPGTNTSNQVAVLYQGVNCTEVPVAIHADQLTPTWRVYSTGSNVFQTRAGCLIGAEHVNNSYECDIPIGAGICASYQTQTNSPRRARSVASQSIIAYTMSLGAENSVAYSNNSIACPTNFTISVTTEILPVSMTKTSVDCTMYICGDSTECSNLLLQYGSFCTQLNRALTGIAVEQDKNTQEVFAQVKQIYKTPPIKDFGGFNFSQILPDPSKPSKRSFIEDLLFNKVTLADAGFIKQYGDCLGDIAARDLICAQKFNGLTVLPPLLTDEMIAQYTSALLAGTITSGWTFGAGAALQIPFAMQMAYRFNGIGVTQNVLYENQKLIANQFNSAIGKIQYSLSSTASALGKLQDVVNQNAQALNTLVKQLSSNFGAISSVLNDILSRLDKVEAEVQIDRLITGRLQSLQTYVTQQLIRAAEIRASANLAATKMSECVLGQSKRVDFCGKGYHLMSFPQSAPHGVVFLHVTYVPAQEKNFTTAPAICHDGKAHFPREGVFVSNGTHWFVTQRNFCEPQIITTDNTFVSGNCDVVIGIVNNTVYDPLQPELDSFKEELDKYFKNHTSPDVDLGDISGINASVVNIQKEIDRLNEVAKNLNESLIDLQELGKYEQYIKGGGGSDIIKLLNEQVNKEMQSSNLYMSMSSWCYTHSLDGAGLFLFDHAAEEYEHAKKLIIFLNENNVPVQLTSISAPEHKFEGLTQIFQKAYEHEQHISESINNIVDHAIKSKDHATFNFLQWYVAEQHEEEVLFKDILDKIELIGNENHGLYLADQYVKGIAKSRKS

SEQ ID NO: 5076 - protein, 1379 aa, Artificial Sequence; identical to SEQ ID NO: 5039
  SARS-CoV-2/Portugal/PT0034/2020__EPI_ISL_418019 spike protein (1-1211)(I714C_Y1110C) Ferritin construct

SEQ ID NO: 5077 - protein, 1379 aa, Artificial Sequence
  SARS-CoV-2/Iceland/202/2020__EPI_ISL_417750 spike protein (1-1211)(I714C_Y1110C) Ferritin construct
MFVFLVLLPLVSSQCVNLTTRTQLPPAYTNSFTRGVYYPDKVFRSSVLHSTQDLFLPFFSNVTWFHAIHVSGTNGTKRFDNPVLPFNDGVYFASTEKSNIIRGWIFGTTLDSKTQSLLIVNNATNVVIKVCEFQFCNDPFLGVYYHKNNKSWMESEFRVYSSANNCTFEYVSQPFLMDLEGKQGNFKNLREFVFKNIDGYFKIYSKHTPINLVRDLPQGFSALEPLVDLPIGINITRFQTLLALHRSYLTPGDSSSGWTAGAAAYYVGYLQPRTFLLKYNENGTITDAVDCALDPLSETKCTLKSFTVEKGIYQTSNFRVQPTESIVRFPNITNLCPFGEVFNATRFASVYAWNRKRISNCVADYSVLYNSASFSTFKCYGVSPTKLNDLCFTNVYADSFVIRGDEVRQIAPGQTGKIADYNYKLPDDFTGCVIAWNSNNLDSKVGGNYNYLYRLFRKSNLKPFERDISTEIYQAGSTPCNGVEGFNCYFPLQSYGFQPTNGVGYQPYRVVVLSFELLHAPATVCGPKKSTNLVKNKCVNFNFNGLTGTGVLTESNKKFLPFQQFGRDIADTTDAVRDPQTLEILDITPCSFGGVSVITPGTNTSNQVAVLYQDVNCTEVPVAIHADQLTPTWRVYSTGSNVFQTRAGCLIGAEHVNNSYECDIPIGAGICASYQTQTNSPRRARSVASQSIIAYTMSLGAENSVAYSNNSIACPTNFTISVTTEILPVSMTKTSVDCTMYICGDSTECSNLLLQYGSFCTQLNRALTGIAVEQDKNTQEVFAQVKQIYKTPPIKDFGGFNFSQILPDPSKPSKRSFIEDLLFNKVTLADAGFIKQYGDCLGDIAARDLICAQKFNGLTVLPPLLTDEMIAQYTSALLAGTITSGWTFGAGAALQIPFAMQMAYRFNGIGVTQNVLYENQKLIANQFNSAIGKIQDSLSSTASALGKLQDVVNQNAQALNTLVKQLSSNFGAISSVLNDILSRLDKVEAEVQIDRLITGRLQSLQTYVTQQLIRAAEIRASANLAATKMSECVLGQSKRVDFCGKGYHLMSFPQSAPHGVVFLHVTYVPAQEKNFTTAPAICHDGKAHFPREGVFVSNGTHWFVTQRNFCEPQIITTDNTFVSGNCDVVIGIVNNTVYDPLQPELDSFKEELDKYFKNHTSPDVDLGDIPGINASVVNIQKEIDRLNEVAKNLNESLIDLQELGKYEQYIKGGGGSDIIKLLNEQVNKEMQSSNLYMSMSSWCYTHSLDGAGLFLFDHAAEEYEHAKKLIIFLNENNVPVQLTSISAPEHKFEGLTQIFQKAYEHEQHISESINNIVDHAIKSKDHATFNFLQWYVAEQHEEEVLFKDILDKIELIGNENHGLYLADQYVKGIAKSRKS

SEQ ID NO: 5078 - protein, 1379 aa, Artificial Sequence
  SARS-CoV-2/USA/WA-UW261/2020__EPI_ISL_418046 spike protein (1-1211)(I714C_Y1110C) Ferritin construct
MFVFLVLLPLVSSQCVNLTTRTQLPPAYTNSFTRGVYYPDKVFRSSVLHSTQDLFLPFFSNVTWFHAIHVSGTNGTKRFDNPVLPFNDGVYFASTEKSNIIRGWIFGTTLDSKTQSLLIVNNATNVVIKVCEFQFCNDPFLGVYYHKNNKSWMESEFRVYSSANNCTFEYVSQPFLMDLEGKQGNFKNLREFVFKNIDGYFKIYSKHTPINLVRDLPQGFSALEPLVDLPIGINITRFQTLLALHRSYLTPGDSSSGWTAGAAAYYVGYLQPRTFLLKYNENGTITDAVDCALDPLSETKCTLKSFTVEKGIYQTSNFRVQPTESIVRFPNITNLCPFGEVFNATRFTSVYAWNRKRISNCVADYSVLYNSASFSTFKCYGVSPTKLNDLCFTNVYADSFVIRGDEVRQIAPGQTGKIADYNYKLPDDFTGCVIAWNSNNLDSKVGGNYNYLYRLFRKSNLKPFERDISTEIYQAGSTPCNGVEGFNCYFPLQSYGFQPTNGVGYQPYRVVVLSFELLHAPATVCGPKKSTNLVKNKCVNFNFNGLTGTGVLTESNKKFLPFQQFGRDIADTTDAVRDPQTLEILDITPCSFGGVSVITPGTNTSNQVAVLYQDVNCTEVPVAIHADQLTPTWRVYSTGSNVFQTRAGCLIGAEHVNNSYECDIPIGAGICASYQTQTNSPRRARSVASQSIIAYTMSLGAENSVAYSNNSIACPTNFTISVTTEILPVSMTKTSVDCTMYICGDSTECSNLLLQYGSFCTQLNRALTGIAVEQDKNTQEVFAQVKQIYKTPPIKDFGGFNFSQILPDPSKPSKRSFIEDLLFNKVTLADAGFIKQYGDCLGDIAARDLICAQKFNGLTVLPPLLTDEMIAQYTSALLAGTITSGWTFGAGAALQIPFAMQMAYRFNGIGVTQNVLYENQKLIANQFNSAIGKIQDSLSSTASALGKLQDVVNQNAQALNTLVKQLSSNFGAISSVLNDILSRLDKVEAEVQIDRLITGRLQSLQTYVTQQLIRAAEIRASANLAATKMSECVLGQSKRVDFCGKGYHLMSFPQSAPHGVVFLHVTYVPAQEKNFTTAPAICHDGKAHFPREGVFVSNGTHWFVTQRNFCEPQIITTDNTFVSGNCDVVIGIVNNTVYDPLQPELDSFKEELDKYFKNHTSPDVDLGDISGINASVVNIQKEIDRLNEVAKNLNESLIDLQELGKYEQYIKGGGGSDIIKLLNEQVNKEMQSSNLYMSMSSWCYTHSLDGAGLFLFDHAAEEYEHAKKLIIFLNENNVPVQLTSISAPEHKFEGLTQIFQKAYEHEQHISESINNIVDHAIKSKDHATFNFLQWYVAEQHEEEVLFKDILDKIELIGNENHGLYLADQYVKGIAKSRKS

SEQ ID NO: 5079 - protein, 1379 aa, Artificial Sequence
  SARS-CoV-2/Portugal/PT0035/2020__EPI_ISL_418020 spike protein (1-1211)(I714C_Y1110C) Ferritin construct
MFVFLVLLPLVSSQCVNLTTRTQLPPAYTNSFTRGVYYPDKVFRSSVLHSTQDLFLPFFSNVTWFHAIHVSGTNGTKRFDNPVLPFNDGVYFASTEKSNIIRGWIFGTTLDSKTQSLLIVNNATNVVIKVCEFQFCNDPFLGVYYHKNNKSWMESEFRVYSSANNCTFEYVSQPFLMDLEGKQGNFKNLREFVFKNIDGYFKIYSKHTPINLVRDLPQGFSALEPLVDLPIGINITRFQTLLALHRSYLTPGDSSSGWTAGAAAYYVGYLQPRTFLLKYNENGTITDAVDCALDPLSETKCTLKSFTVEKGIYQTSNFRVQPTESIVRFPNITNLCPFGEVFNATRFASVYAWNRKRISNCVADYSVLYNSASFSTFKCYGVSPTKLNDLCFTNVYADSFVIRGDEVRQIAPGQTGKIADYNYKLPDDFTGCVIAWNSNNLDSKVGGNYNYLYRLFRKSNLKPFERDISTEIYQAGSTPCNGVEGFNCYFPLQSYGFQPTNGVGYQPYRVVVLSFELLHAPATVCGPKKSTNLVKNKCVNFNFNGLTGTGVLTESNKKFLPFQQFGRDIADTTDAVRDPQTLEILDITPCSFGGVSVITPGTNTSNQVAVLYQDVNCTEVPVAIHADQLTPTWRVYSTGSNVFQTRAGCLIGAEHVNNSYECDIPIGAGICASYQTQTNSPRRARSVASQSIIAYTMSLGAENSVAYSNNSIACPTNFTISVTTEILPVSMTKTSVDCTMYICGDSTECSNLLLQYGSFCTQLNRALTGIAVEQDKNTQEVFAQVKQIYKTPPIKDFGGFNFSQILPDPSKPSKRSFIEDLLFNKVTLADAGFIKQYGDCLGDISARDLICAQKFNGLTVLPPLLTDEMIAQYTSALLAGTITSGWTFGAGAALQIPFAMQMAYRFNGIGVTQNVLYENQKLIANQFNSAIGKIQDSLSSTASALGKLQDVVNQNAQALNTLVKQLSSNFGAISSVLNDILSRLDKVEAEVQIDRLITGRLQSLQTYVTQQLIRAAEIRASANLAATKMSECVLGQSKRVDFCGKGYHLMSFPQSAPHGVVFLHVTYVPAQEKNFTTAPAICHDGKAHFPREGVFVSNGTHWFVTQRNFCEPQIITTDNTFVSGNCDVVIGIVNNTVYDPLQPELDSFKEELDKYFKNHTSPDVDLGDISGINASVVNIQKEIDRLNEVAKNLNESLIDLQELGKYEQYIKGGGGSDIIKLLNEQVNKEMQSSNLYMSMSSWCYTHSLDGAGLFLFDHAAEEYEHAKKLIIFLNENNVPVQLTSISAPEHKFEGLTQIFQKAYEHEQHISESINNIVDHAIKSKDHATFNFLQWYVAEQHEEEVLFKDILDKIELIGNENHGLYLADQYVKGIAKSRKS

SEQ ID NO: 5080 - protein, 1379 aa, Artificial Sequence
  SARS-CoV-2/USA/NY-NYUMC7/2020__EPI_ISL_418192 spike protein (1-1211)(I714C_Y1110C) Ferritin construct
MFVFLVLLPLVSSQCVNLTTRTQLPPAYTNSFTRGVYYPDKVFRSSVLHSTQDLFLPFFSNVTWFHAIHVSGTNGTKRFDNPVLPFNDGVYFASTEKSNIIRGWIFGTTLDSKTQSLLIVNNATNVVIKVCEFQFCNDPFLGVYHHKNNKSWMESEFRVYSSANNCTFEYVSQPFLMDLEGKQGNFKNLREFVFKNIDGYFKIYSKHTPINLVRDLPQGFSALEPLVDLPIGINITRFQTLLALHRSYLTPGDSSSGWTAGAAAYYVGYLQPRTFLLKYNENGTITDAVDCALDPLSETKCTLKSFTVEKGIYQTSNFRVQPTESIVRFPNITNLCPFGEVFNATRFASVYAWNRKRISNCVADYSVLYNSASFSTFKCYGVSPTKLNDLCFTNVYADSFVIRGDEVRQIAPGQTGKIADYNYKLPDDFTGCVIAWNSNNLDSKVGGNYNYLYRLFRKSNLKPFERDISTEIYQAGSTPCNGVEGFNCYFPLQSYGFQPTNGVGYQPYRVVVLSFELLHAPATVCGPKKSTNLVKNKCVNFNFNGLTGTGVLTESNKKFLPFQQFGRDIADTTDAVRDPQTLEILDITPCSFGGVSVITPGTNTSNQVAVLYQGVNCTEVPVAIHADQLTPTWRVYSTGSNVFQTRAGCLIGAEHVNNSYECDIPIGAGICASYQTQTNSPRRARSVASQSIIAYTMSLGAENSVAYSNNSIACPTNFTISVTTEILPVSMTKTSVDCTMYICGDSTECSNLLLQYGSFCTQLNRALTGIAVEQDKNTQEVFAQVKQIYKTPPIKDFGGFNFSQILPDPSKPSKRSFIEDLLFNKVTLADAGFIKQYGDCLGDIAARDLICAQKFNGLTVLPPLLTDEMIAQYTSALLAGTITSGWTFGAGAALQIPFAMQMAYRFNGIGVTQNVLYENQKLIANQFNSAIGKIQDSLSSTASALGKLQDVVNQNAQALNTLVKQLSSNFGAISSVLNDILSRLDKVEAEVQIDRLITGRLQSLQTYVTQQLIRAAEIRASANLAATKMSECVLGQSKRVDFCGKGYHLMSFPQSAPHGVVFLHVTYVPAQEKNFTTAPAICHDGKAHFPREGVFVSNGTHWFVTQRNFCEPQIITTDNTFVSGNCDVVIGIVNNTVYDPLQPELDSFKEELDKYFKNHTSPDVDLGDISGINASVVNIQKEIDRLNEVAKNLNESLIDLQELGKYEQYIKGGGGSDIIKLLNEQVNKEMQSSNLYMSMSSWCYTHSLDGAGLFLFDHAAEEYEHAKKLIIFLNENNVPVQLTSISAPEHKFEGLTQIFQKAYEHEQHISESINNIVDHAIKSKDHATFNFLQWYVAEQHEEEVLFKDILDKIELIGNENHGLYLADQYVKGIAKSRKS

SEQ ID NO: 5081 - protein, 1379 aa, Artificial Sequence
  SARS-CoV-2/Iceland/189/2020__EPI_ISL_417709 spike protein (1-1211)(I714C_Y1110C) Ferritin construct
MFVFLVLLPLVSSQCVNLTTRTQLPPAYTNSFTRGVYYPDKVFRSSVLHSTQDLFLPFFSNVTWFHAIHVSGTNGTKRFDNPVLPFNDGVYFASTEKSNIIRGWIFGTTLDSKTQSLLIVNNATNVVIKVCEFQFCNDPFLGVYYHKNNKSWMESEFRVYSSANNCTFEYVSQPFLMDLEGKQGNFKNLREFVFKNIDGYFKIYSKHTPINLVRDLPQGFSALEPLVDLPIGINITRFQTLLALHRSYLTPGDSSSGWTAGAAAYYVGYLQPRTFLLKYNENGTITDAVDCALDPLSETKCTLKSFTVEKGIYQTSNFRVQPTESIVRFPNITNLCPFGEVFNATRFASVYAWNRKRISNCVADYSVLYNSASFSTFKCYGVSPTKLNDLCFTNVYADSFVIRGDEVRQIAPGQTGKIADYNYKLPDDFTGCVIAWNSNNLDSKVGGNYNYLYRLFRKSNLKPFERDISTEIYQAGSTPCNGVEGFNCYFPLQSYGFQPTNGVGYQPYRVVVLSFELLHAPATVCGPKKSTNLVKNKCVNFNFNGLTGTGVLTESNKKFLPFQQFGRDIADTTDAVRDPQTLEILDITPCSFGGVSVITPGTNTSNQVAVLYQGVNCTEVPVAIHADQLTPTWRVYSTGSNVFQTRAGCLIGAEHVNNSYECDIPIGAGICASYQTQTNSPRRARSVASQSIIAYTMSLGAENSVAYSNNSIACPTNFTISVTTEILPVSMTKTSVDCTMYICGDSTECSNLLLQYGSFCTQLNRALTGIAVEQDKNTQEVFAQVKQIYKTPPIKDFGGFNFSQILPDPSKPSKRSFIEDLLFNKVTLADAGFTKQYGDCLGDIAARDLICAQKFNGLTVLPPLLTDEMIAQYTSALLAGTITSGWTFGAGAALQIPFAMQMAYRFNGIGVTQNVLYENQKLIANQFNSAIGKIQDSLSSTASALGKLQDVVNQNAQALNTLVKQLSSNFGAISSVLNDILSRLDKVEAEVQIDRLITGRLQSLQTYVTQQLIRAAEIRASANLAATKMSECVLGQSKRVDFCGKGYHLMSFPQSAPHGVVFLHVTYVPAQEKNFTTAPAICHDGKAHFPREGVFVSNGTHWFVTQRNFCEPQIITTDNTFVSGNCDVVIGIVNNTVYDPLQPELDSFKEELDKYFKNHTSPDVDLGDISGINASVVNIQKEIDRLNEVAKNLNESLIDLQELGKYEQYIKGGGGSDIIKLLNEQVNKEMQSSNLYMSMSSWCYTHSLDGAGLFLFDHAAEEYEHAKKLIIFLNENNVPVQLTSISAPEHKFEGLTQIFQKAYEHEQHISESINNIVDHAIKSKDHATFNFLQWYVAEQHEEEVLFKDILDKIELIGNENHGLYLADQYVKGIAKSRKS

SEQ ID NO: 5082 - protein, 1379 aa, Artificial Sequence
  SARS-CoV-2/Australia/NSW56/2020__EPI_ISL_417408 spike protein (1-1211)(I714C_Y1110C) Ferritin construct
MFVFLVLLPLVSSQCVNLTTRTQLPPAYTNSFTRGVYYPDKVFRSSVLHSTQDLFLPFFSNVTWFHAIHVSGTNGTKRFDNPVLPFNDGVYFASTEKSNIIRGWIFGTTLDSKTQSLLIVNNATNVVIKVCEFQFCNDPFLGVYYHKNNKSWMESEFRVYSSANNCTFEYVSQPFLMDLEGKQGNFKNLREFVFKNIDGYFKIYSKHTPINLVRDLPQGFSALEPLVDLPIGINITRFQTLLALHRSYLTPGDSSSGWTAGAAAYYVGYLQPRTFLLKYNENGTITDAVDCALDPLSETKCTLKSFTVEKGIYQTSNFRVQPTESIVRFPNITNLCPFGEVFNATRFASVYAWNRKRISNCVADYSVLYNSASFSTFKCYGVSPTKLNDLCFTNVYADSFVIRGDEVRQIAPGQTGKIADYNYKLPDDFTGCVIAWNSNNLDSKVGGNYNYLYRLFRKSNLKPFERDISTEIYQAGSTPCNGVEGFNCYFPLQSYGFQPTNGVGYQPYRVVVLSFELLHAPATVCGPKKSTNLVKNKCVNFNFNGLTGTGVLTESNKKFLPFQQFGRDIADTTDAVRDPQTLEILDITPCSFGGVSVITPGTNTSNQVAVLYQDVNCTEVPVAIHADQLTPTWRVYSTGSNVFQTRAGCLIGAEHVNNSYECDIPIGAGICASYQTQTNSPRRARSVASQSIIAYTMSLGAENSVAYSNNSIACPTNFTISVTTEILPVSMTKTSVDCTMYICGDSTECSNLLLQYGSFCTQLNRALTGIAVEQDKNTQEVFAQVKQIYKTPPIKDFGGFNFSQILPDSSKPSKRSFIEDLLFNKVTLADAGFIKQYGDCLGDIAARDLICAQKFNGLTVLPPLLTDEMIAQYTSALLAGTITSGWTFGAGAALQIPFAMQMAYRFNGIGVTQNVLYENQKLIANQFNSAIGKIQDSLSSTASALGKLQDVVNQNAQALNTLVKQLSSNFGAISSVLNDILSRLDKVEAEVQIDRLITGRLQSLQTYVTQQLIRAAEIRASANLAATKMSECVLGQSKRVDFCGKGYHLMSFPQSAPHGVVFLHVTYVPAQEKNFTTAPAICHDGKAHFPREGVFVSNGTHWFVTQRNFCEPQIITTDNTFVSGNCDVVIGIVNNTVYDPLQPELDSFKEELDKYFKNHTSPDVDLGDISGINASVVNIQKEIDRLNEVAKNLNESLIDLQELGKYEQYIKGGGGSDIIKLLNEQVNKEMQSSNLYMSMSSWCYTHSLDGAGLFLFDHAAEEYEHAKKLIIFLNENNVPVQLTSISAPEHKFEGLTQIFQKAYEHEQHISESINNIVDHAIKSKDHATFNFLQWYVAEQHEEEVLFKDILDKIELIGNENHGLYLADQYVKGIAKSRKS

SEQ ID NO: 5083 - protein, 1379 aa, Artificial Sequence
  SARS-CoV-2/Iceland/280/2020__EPI_ISL_417608 spike protein (1-1211)(I714C_Y1110C) Ferritin construct
MFVFLVLLPLVSSQCVNLTTRTQLPPAYTNSFTRGVYYPDKVFRSSVLHSTQDLFLPFFSNVTWFHAIHVSGTNGTKRFDNPVLPFNDGVYFASTEKSNIIRGWIFGTTLDSKTQSLLIVNNATNVVIKVCEFQFCNDPFLGVYYHKNNKSWMESEFRVYSSANNCTFEYVSQPFLMDLEGKQGNFKNLREFVFKNIDGYFKIYSKHTPINLVRDLPQGFSALEPLVDLPIGINITRFQTLLALHRSYLTPGDSSSGWTAGAAAYYVGYLQPRTFLLKYNENGTITDAVDCALDPLSETKCTLKSFTVEKGIYQTSNFRVQPTESIVRFPNITNLCPFGEVFNATRFASVYAWNRKRISNCVADYSVLYNSASFSTFKCYGVSPTKLNDLCFTNVYADSFVIRGDEVRQIAPGQTGKIADYNYKLPDDFTGCVIAWNSNNLDSKVGGNYNYLYRLFRKSNLKPFERDISTEIYQAGSTPCNGVEGFNCYFPLQSYGFQPTNGVGYQPYRVVVLSFELLHAPATVCGPKKSTNLVKNKCVNFNFNGLTGTGVLTESNKKFLPFQQFGRDIADTTDAVRDPQTLEILDITPCSFGGVSVITPGTNTSNQVAVLYQGVNCTEVPVAIHADQLTPTWRVYSTGSNVFQTRAGCLIGAEHVNNSYECDIPIGAGICASYHTQTNSPRRARSVASQSIIAYTMSLGAENSVAYSNNSIACPTNFTISVTTEILPVSMTKTSVDCTMYICGDSTECSNLLLQYGSFCTQLNRALTGIAVEQDKNTQEVFAQVKQIYKTPPIKDFGGFNFSQILPDPSKPSKRSFIEDLLFNKVTLADAGFIKQYGDCLGDIAARDLICAQKFNGLTVLPPLLTDEMIAQYTSALLAGTITSGWTFGAGAALQIPFAMQMAYRFNGIGVTQNVLYENQKLIANQFNSAIGKIQDSLSSTASALGKLQDVVNQNAQALNTLVKQLSSNFGAISSVLNDILSRLDKVEAEVQIDRLITGRLQSLQTYVTQQLIRAAEIRASANLAATKMSECVLGQSKRVDFCGKGYHLMSFPQSAPHGVVFLHVTYVPAQEKNFTTAPAICHDGKAHFPREGVFVSNGTHWFVTQRNFCEPQIITTDNTFVSGNCDVVIGIVNNTVYDPLQPELDSFKEELDKYFKNHTSPDVDLGDISGINASVVNIQKEIDRLNEVAKNLNESLIDLQELGKYEQYIKGGGGSDIIKLLNEQVNKEMQSSNLYMSMSSWCYTHSLDGAGLFLFDHAAEEYEHAKKLIIFLNENNVPVQLTSISAPEHKFEGLTQIFQKAYEHEQHISESINNIVDHAIKSKDHATFNFLQWYVAEQHEEEVLFKDILDKIELIGNENHGLYLADQYVKGIAKSRKS

SEQ ID NO: 5084 - protein, 1379 aa, Artificial Sequence; identical to SEQ ID NO: 5039
  SARS-CoV-2/Iceland/247/2020__EPI_ISL_417575 spike protein (1-1211)(I714C_Y1110C) Ferritin construct

SEQ ID NO: 5085 - protein, 1379 aa, Artificial Sequence
  SARS-CoV-2/Iceland/238/2020__EPI_ISL_417566 spike protein (1-1211)(I714C_Y1110C) Ferritin construct
MFVFLVLLPLVSSQCVNLTTRTQLPPAYTNSFTRGVYYPDKVFRSSVLHSTQDLFLPFFSNVTWFHAIHVSGTNGTKRFDNPVLPFNDGVYFASTEKSNIIRGWIFGTTLDSKTQSLLIVNNATNVVIKVCEFQFCNDPFLGVYYHKNNKSWMESEFRVYSSANNCTFEYVSQPFLMDLEGKQGNFKNLREFVFKNIDGYFKIYSKHTPINLVRDLPQGFSALEPLVDLPIGINITRFQTLLALHRSYLTPGDSSSGWTAGAAAYYVGYLQPRTFLLKYNENGTITDAVDCALDPLSETKCTLKSFTVEKGIYQTSNFRVQPTESIVRFPNITNLCPFGEVFNATRFASVYAWNRKRISNCVADYSVLYNSASFSTFKCYGVSPTKLNDLCFTNVYADSFVIRGDEVRQIAPGQTGKIADYNYKLPDDFTGCVIAWNSNNLDSKVGGNYNYLYRLFRKSNLKPFERDISTEIYQAGSTPCNGVEGFNCYFPLQSYGFQPTNGVGYQPYRVVVLSFELLHAPATVCGPKKSTNLVKNKCVNFNFNGLTGTGVLTESNKKFLPFQQFGRDIADTTDAVRDPQTLEILDITPCSFGGVSVITPGTNTSNQVAVLYQGVNCTEVPVAIHADQLTPTWRVYSTGSNVFQTRAGCLIGAEHVNNSYECDIPIGAGICASYQTQTNSPRRARSVASQSIIAYTMSLGAENSVAYSNNSIACPTNFTISVTTEILPVSMTKTSVDCTMYICGDSTECSNLLLQYGSFCTQLNRALTGIAVEQDKNTQEVFAQVKQIYKTPPIKDFGGFNFSQILPDPSKPSKRSFIEDLLFNKVTLADVGFIKQYGDCLGDIAARDLICAQKFNGLTVLPPLLTDEMIAQYTSALLAGTITSGWTFGAGAALQIPFAMQMAYRFNGIGVTQNVLYENQKLIANQFNSAIGKIQDSLSSTASALGKLQDVVNQNAQALNTLVKQLSSNFGAISSVLNDILSRLDKVEAEVQIDRLITGRLQSLQTYVTQQLIRAAEIRASANLAATKMSECVLGQSKRVDFCGKGYHLMSFPQSAPHGVVFLHVTYVPAQEKNFTTAPAICHDGKAHFPREGVFVSNGTHWFVTQRNFCEPQIITTDNTFVSGNCDVVIGIVNNTVYDPLQPELDSFKEELDKYFKNHTSPDVDLGDISGINASVVNIQKEIDRLNEVAKNLNESLIDLQELGKYEQYIKGGGGSDIIKLLNEQVNKEMQSSNLYMSMSSWCYTHSLDGAGLFLFDHAAEEYEHAKKLIIFLNENNVPVQLTSISAPEHKFEGLTQIFQKAYEHEQHISESINNIVDHAIKSKDHATFNFLQWYVAEQHEEEVLFKDILDKIELIGNENHGLYLADQYVKGIAKSRKS

SEQ ID NO: 5086 - protein, 1379 aa, Artificial Sequence
  SARS-CoV-2/Greece/16/2020__EPI_ISL_418265 spike protein (1-1211)(I714C_Y1110C) Ferritin construct
MFVFLVLLPLVSSQCVNLTTRTQLPPAYTNSFTRGVYYPDKVFRSSVLHSTQDLFLPFFSNVTWFHAIHVSGTNGTKRFDNPVLPFNDGVYFASTEKSNIIRGWIFGTTLDSKTQSLLIVNNATNVVIKVCEFQFCNDPFLGVYYHKNNKSWMESEFRVYSSANNCTFEYVSQPFLMDLEGKQGNFKNLREFVFKNVDGYFKIYSKHTPINLVRDLPQGFSALEPLVDLPIGINITRFQTLLALHRSYLTPGDSSSGWTAGAAAYYVGYLQPRTFLLKYNENGTITDAVDCALDPLSETKCTLKSFTVEKGIYQTSNFRVQPTESIVRFPNITNLCPFGEVFNATRFASVYAWNRKRISNCVADYSVLYNSASFSTFKCYGVSPTKLNDLCFTNVYADSFVIRGDEVRQIAPGQTGKIADYNYKLPDDFTGCVIAWNSNNLDSKVGGNYNYLYRLFRKSNLKPFERDISTEIYQAGSTPCNGVEGFNCYFPLQSYGFQPTNGVGYQPYRVVVLSFELLHAPATVCGPKKSTNLVKNKCVNFNFNGLTGTGVLTESNKKFLPFQQFGRDIADTTDAVRDPQTLEILDITPCSFGGVSVITPGTNTSNQVAVLYQDVNCTEVPVAIHADQLTPTWRVYSTGSNVFQTRAGCLIGAEHVNNSYECDIPIGAGICASYQTQTNSPRRARSVASQSIIAYTMSLGAENSVAYSNNSIACPTNFTISVTTEILPVSMTKTSVDCTMYICGDSTECSNLLLQYGSFCTQLNRALTGIAVEQDKNTQEVFAQVKQIYKTPPIKDFGGFNFSQILPDPSKPSKRSFIEDLLFNKVTLADAGFIKQYGDCLGDIAARDLICAQKFNGLTVLPPLLTDEMIAQYTSALLAGTITSGWTFGAGAALQIPFAMQMAYRFNGIGVTQNVLYENQKLIANQFNSAIGKIQDSLSSTASALGKLQDVVNQNAQALNTLVKQLSSNFGAISSVLNDILSRLDKVEAEVQIDRLITGRLQSLQTYVTQQLIRAAEIRASANLAATKMSECVLGQSKRVDFCGKGYHLMSFPQSAPHGVVFLHVTYVPAQEKNFTTAPAICHDGKAHFPREGVFVSNGTHWFVTQRNFCEPQIITTDNTFVSGNCDVVIGIVNNTVYDPLQPELDSFKEELDKYFKNHTSPDVDLGDISGINASVVNIQKEIDRLNEVAKNLNESLIDLQELGKYEQYIKGGGGSDIIKLLNEQVNKEMQSSNLYMSMSSWCYTHSLDGAGLFLFDHAAEEYEHAKKLIIFLNENNVPVQLTSISAPEHKFEGLTQIFQKAYEHEQHISESINNIVDHAIKSKDHATFNFLQWYVAEQHEEEVLFKDILDKIELIGNENHGLYLADQYVKGIAKSRKS

SEQ ID NO: 5087 - protein, 1379 aa, Artificial Sequence
  SARS-CoV-2/Iceland/319/2020__EPI_ISL_417648 spike protein (1-1211)(I714C_Y1110C) Ferritin construct
MFVFLVLLPLVSSQCVNLTTRTQLPPAYTNSFTRGVYYPDKVFRSSVLHSTQDLFLPFFSNVTWFHAIHVSGTNGTKRFDNPVLPFNDGVYFASTEKSNIIRGWIFGTTLDSKTQSLLIVNNATNVVIKVCEFQFCNDPFLGVYYHKNNKSWMESEFRVYSSANNCTFEYVSQPFLIDLEGKQGNFKNLREFVFKNIDGYFKIYSKHTPINLVRDLPQGFSALEPLVDLPIGINITRFQTLLALHRSYLTPGDSSSGWTAGAAAYYVGYLQPRTFLLKYNENGTITDAVDCALDPLSETKCTLKSFTVEKGIYQTSNFRVQPTESIVRFPNITNLCPFGEVFNATRFASVYAWNRKRISNCVADYSVLYNSASFSTFKCYGVSPTKLNDLCFTNVYADSFVIRGDEVRQIAPGQTGKIADYNYKLPDDFTGCVIAWNSNNLDSKVGGNYNYLYRLFRKSNLKPFERDISTEIYQAGSTPCNGVEGFNCYFPLQSYGFQPTNGVGYQPYRVVVLSFELLHAPATVCGPKKSTNLVKNKCVNFNFNGLTGTGVLTESNKKFLPFQQFGRDIADTTDAVRDPQTLEILDITPCSFGGVSVITPGTNTSNQVAVLYQGVNCTEVPVAIHADQLTPTWRVYSTGSNVFQTRAGCLIGAEHVNNSYECDIPIGAGICASYQTQTNSPRRARSVASQSIIAYTMSLGAENSVAYSNNSIACPTNFTISVTTEILPVSMTKTSVDCTMYICGDSTECSNLLLQYGSFCTQLNRALTGIAVEQDKNTQEVFAQVKQIYKTPPIKDFGGFNFSQILPDPSKPSKRSFIEDLLFNKVTLADAGFIKQYGDCLGDIAARDLICAQKFNGLTVLPPLLTDEMIAQYTSALLAGTITSGWTFGAGAALQIPFAMQMAYRFNGIGVTQNVLYENQKLIANQFNSAIGKIQDSLSSTASALGKLQDVVNQNAQALNTLVKQLSSNFGAISSVLNDILSRLDKVEAEVQIDRLITGRLQSLQTYVTQQLIRAAEIRASANLAATKMSECVLGQSKRVDFCGKGYHLMSFPQSAPHGVVFLHVTYVPAQEKNFTTAPAICHDGKAHFPREGVFVSNGTHWFVTQRNFCEPQIITTDNTFVSGNCDVVIGIVNNTVYDPLQPELDSFKEELDKYFKNHTSPDVDLGDISGINASVVNIQKEIDRLNEVAKNLNESLIDLQELGKYEQYIKGGGGSDIIKLLNEQVNKEMQSSNLYMSMSSWCYTHSLDGAGLFLFDHAAEEYEHAKKLIIFLNENNVPVQLTSISAPEHKFEGLTQIFQKAYEHEQHISESINNIVDHAIKSKDHATFNFLQWYVAEQHEEEVLFKDILDKIELIGNENHGLYLADQYVKGIAKSRKS

SEQ ID NO: 5088 - protein, 1379 aa, Artificial Sequence
  SARS-CoV-2/Congo/94/2020__EPI_ISL_417947 spike protein (1-1211)(I714C_Y1110C) Ferritin construct
MFVFLVLLPLVSSQCVNLTTRTQLPPAYTNSFTRGVYYPDKVFRSSVLHSTQDLFLPFFSNVTWFHAIHVSGTNGTKRFDNPVLPFNDGVYFASTEKSNIIRGWIFGTTLDSKTQSLLIVNNATNVVIKVCEFQFCNDPFLGVYYHKNNKSWMESEFRVYSSANNCTFEYVSQPFLMDLEGKQGNFKNLREFVFKNIDGYFKIYSKHTPINLVRDLPQGFSALEPLVDLPIGINITRFQTLLALHRSYLTPGDSSSGWTAGAAAYYVGYLQPRTFLLKYNENGTITDAVDCALDPLSETKCTLKSFTVEKGIYQTSNFRVQPTESIVRFPNITNLCPFGEVFNATRFASVYAWNRKRISNCVADYSVLYNSASFSTFKCYGVSPTKLNDLCFTNVYADSFVIRGDEVRQIAPGQTGKIADYNYKLPDDFTGCVIAWNSNNLDSKVGGNYNYLYRLFRKSNLKPFERDISTEIYQAGSTPCNGVEGFNCYFPLQSYGFQPTNGVGYQPYRVVVLSFELLHAPATVCGPKKSTNLVKNKCVNFNFNGLTGTGVLTESNKKFLPFQQFGRDIADTTDAVRDPQTLEILDITPCSFGGVSVITPGTNTSNQVAVLYQGVNCTEVPVAIHADQLTPTWRVYSTGSNVFQTRAGCLIGAEHVNNSYECDIPIGAGICASYQTQTNSPRRARSVASQSIIAYTMSLGAENSVAYSNNSIACPTNFTISVTTEILPVSMTKTSVDCTMYICGDSTECSNLLLQYGSFCTQLNRALTGIAVEQDKNTQEVFAQVKQIYKTPPIKDFGGFNFSQILPDPSKPSKRSFIEDILFNKVTLADAGFIKQYGDCLGDIAARDLICAQKFNGLTVLPPLLTDEMIAQYTSALLAGTITSGWTFGAGAALQIPFAMQMAYRFNGIGVTQNVLYENQKLIANQFNSAIGKIQDSLSSTASALGKLQDVVNQNAQALNTLVKQLSSNFGAISSVLNDILSRLDKVEAEVQIDRLITGRLQSLQTYVTQQLIRAAEIRASANLAATKMSECVLGQSKRVDFCGKGYHLMSFPQSAPHGVVFLHVTYVPAQEKNFTTAPAICHDGKAHFPREGVFVSNGTHWFVTQRNFCEPQIITTDNTFVSGNCDVVIGIVNNTVYDPLQPELDSFKEELDKYFKNHTSPDVDLGDISGINASVVNIQKEIDRLNEVAKNLNESLIDLQELGKYEQYIKGGGGSDIIKLLNEQVNKEMQSSNLYMSMSSWCYTHSLDGAGLFLFDHAAEEYEHAKKLIIFLNENNVPVQLTSISAPEHKFEGLTQIFQKAYEHEQHISESINNIVDHAIKSKDHATFNFLQWYVAEQHEEEVLFKDILDKIELIGNENHGLYLADQYVKGIAKSRKS

SEQ ID NO: 5089 - protein, 1379 aa, Artificial Sequence
  SARS-CoV-2/Congo/158/2020__EPI_ISL_417950 spike protein (1-1211)(I714C_Y1110C) Ferritin construct
MFVFLVLLPLVSSQCVNLTTRTQLPPAYTNSFTRGVYYPDKVFRSSVLHSTQDLFLPFFSNVTWFHAIHVSGTNGTKRFDNPVLPFNDGVYFASTEKSNIIRGWIFGTTLDSKTQSLLIVNNATNVVIKVCEFQFCNDPFLGVYYHKNNKSWMESEFRVYSSANNCTFEYVSQPFLMDLEGKQGNFKNLREFVFKNIDGYFKIYSKHTPINLVRDLPQGFSALEPLVDLPIGINITRFQTLLALHRSYLTPGDSSSGWTAGAAAYYVGYLQPRTFLLKYNENGTITDAVDCALDPLSETKCTLKSFTVEKGIYQTSNFRVQPTESIVRFPNITNLCPFGEVFNATRFASVYAWNRKRISNCVADYSVLYNSASFSTFKCYGVSPTKLNDLCFTNVYADSFVIRGDEVRQIAPGQTGKIADYNYKLPDDFTGCVIAWNSNNLDSKVGGNYNYLYRLFRKSNLKPFERDISTEIYQAGSTPCNGVEGFNCYFPLQSYGFQPTNGVGYQPYRVVVLSFELLHAPATVCGPKKSTNLVKNKCVNFNFNGLTGTGVLTESNKKFLPFQQFGRDIADTTDAVRDPQTLEILDITPCSFGGVSVITPGTNTSNQVAVLYQDVNCTEVPVAIHADQLTPTWRVYSTGSNVFQTRAGCLIGAEHVNNSYECDIPIGAGICASYQTQTNSPRRARSVASQSIIAYTMSLGAENSVAYSNNSIACPTNFTISVTTEILPVSMTKTSVDCTMYICGDSTECSNLLLQYGSFCTQLNRALTGIAVEQDKNTQEVFAQVKQIYKTPPIKDFGGFNFSQILPDPSKPSKRSFIEDLLFNKVTLADAGFIKQYGDCLGDIAARDLICAQKFNGLTVLPPLLTDEMIAQYTSALLAGTITSGWTFGAGAALQIPFAMQMAYRFNGIGVTQNVLYENQKLIANQFNSAIGKIQDSLSSTASALGKLQDVVNQNAQALNTLVKQLSSNFGAISSVLNDILSRLDKVEAEVQIDRLITGRLQSLQTYVTQQLIRAAEIRASANLAATKMSECVLGQSKRVDFCGKGYHLMSFPQSAPHGVVFLHVTYVPAQEKNFTTAPAICHDGKAHFPREGVFVSNGTHWFVTQRNFCEPQIITTDNTFLSGNCDVVIGIVNNTVYDPLQPELDSFKEELDKYFKNHTSPDVDLGDISGINASVVNIQKEIDRLNEVAKNLNESLIDLQELGKYEQYIKGGGGSDIIKLLNEQVNKEMQSSNLYMSMSSWCYTHSLDGAGLFLFDHAAEEYEHAKKLIIFLNENNVPVQLTSISAPEHKFEGLTQIFQKAYEHEQHISESINNIVDHAIKSKDHATFNFLQWYVAEQHEEEVLFKDILDKIELIGNENHGLYLADQYVKGIAKSRKS

SEQ ID NO: 5090 - protein, 1379 aa, Artificial Sequence
  SARS-CoV-2/USA/UT-00034/2020__EPI_ISL_417977 spike protein (1-1211)(I714C_Y1110C) Ferritin construct
MFVFLVLLPLVSSQCVNLTTRTQLPPAYTNSFTRGVYYPDKVFRSSVLHSTQDLFLPFFSNVTWFHAIHVSGTNGTKRFDNPVLPFNDGVYFASTEKSNIIRGWIFGTTLDSKTQSLLIVNNATNVVIKVCEFQFCNDPFLGVYYYKNNKSWMESEFRVYSSANNCTFEYVSQPFLMDLEGKQGNFKNLREFVFKNIDGYFKIYSKHTPINLVRDLPQGFSALEPLVDLPIGINITRFQTLLALHRSYLTPGDSSSGWTAGAAAYYVGYLQPRTFLLKYNENGTITDAVDCALDPLSETKCTLKSFTVEKGIYQTSNFRVQPTESIVRFPNITNLCPFGEVFNATRFASVYAWNRKRISNCVADYSVLYNSASFSTFKCYGVSPTKLNDLCFTNVYADSFVIRGDEVRQIAPGQTGKIADYNYKLPDDFTGCVIAWNSNNLDSKVGGNYNYLYRLFRKSNLKPFERDISTEIYQAGSTPCNGVEGFNCYFPLQSYGFQPTNGVGYQPYRVVVLSFELLHAPATVCGPKKSTNLVKNKCVNFNFNGLTGTGVLTESNKKFLPFQQFGRDIADTTDAVRDPQTLEILDITPCSFGGVSVITPGTNTSNQVAVLYQGVNCTEVPVAIHADQLTPTWRVYSTGSNVFQTRAGCLIGAEHVNNSYECDIPIGAGICASYQTQTNSPRRARSVASQSIIAYTMSLGAENSVAYSNNSIACPTNFTISVTTEILPVSMTKTSVDCTMYICGDSTECSNLLLQYGSFCTQLNRALTGIAVEQDKNTQEVFAQVKQIYKTPPIKDFGGFNFSQILPDPSKPSKRSFIEDLLFNKVTLADAGFIKQYGDCLGDIAARDLICAQKFNGLTVLPPLLTDEMIAQYTSALLAGTITSGWTFGAGAALQIPFAMQMAYRFNGIGVTQNVLYENQKLIANQFNSAIGKIQDSLSSTASALGKLQDVVNQNAQALNTLVKQLSSNFGAISSVLNDILSRLDKVEAEVQIDRLITGRLQSLQTYVTQQLIRAAEIRASANLAATKMSECVLGQSKRVDFCGKGYHLMSFPQSAPHGVVFLHVTYVPAQEKNFTTAPAICHDGKAHFPREGVFVSNGTHWFVTQRNFCEPQIITTDNTFVSGNCDVVIGIVNNTVYDPLQPELDSFKEELDKYFKNHTSPDVDLGDISGINASVVNIQKEIDRLNEVAKNLNESLIDLQELGKYEQYIKGGGGSDIIKLLNEQVNKEMQSSNLYMSMSSWCYTHSLDGAGLFLFDHAAEEYEHAKKLIIFLNENNVPVQLTSISAPEHKFEGLTQIFQKAYEHEQHISESINNIVDHAIKSKDHATFNFLQWYVAEQHEEEVLFKDILDKIELIGNENHGLYLADQYVKGIAKSRKS

SEQ ID NO: 5091 - protein, 1379 aa, Artificial Sequence
  SARS-CoV-2/USA/UT-00033/2020__EPI_ISL_417976 spike protein (1-1211)(I714C_Y1110C) Ferritin construct
MFVFLVLLPLVSSQCVNLTTRTQLPPAYTNSFTRGVYYPDKVFRSSVLHSTQDLFLPFFSNVTWFHAIHVSGTNGTKRFDNPVLPFNDGVYFASTEKSNIIRGWIFGTTLDSKTQSLLIVNNATNVVIKVCEFQFCNDPFLGVYYHKNNKSWMESEFRVYSSANNCTFEYVSQPFLMDLEGKQGNFKNLREFVFKNIDGYFKIYSKHTPINLVRDLPQGFSALEPLVDLPIGINITRFQTLLALHRSYLTPGDSSSGLTAGAAAYYVGYLQPRTFLLKYNENGTITDAVDCALDPLSETKCTLKSFTVEKGIYQTSNFRVQPTESIVRFPNITNLCPFGEVFNATRFASVYAWNRKRISNCVADYSVLYNSASFSTFKCYGVSPTKLNDLCFTNVYADSFVIRGDEVRQIAPGQTGKIADYNYKLPDDFTGCVIAWNSNNLDSKVGGNYNYLYRLFRKSNLKPFERDISTEIYQAGSTPCNGVEGFNCYFPLQSYGFQPTNGVGYQPYRVVVLSFELLHAPATVCGPKKSTNLVKNKCVNFNFNGLTGTGVLTESNKKFLPFQQFGRDIADTTDAVRDPQTLEILDITPCSFGGVSVITPGTNTSNQVAVLYQGVNCTEVPVAIHADQLTPTWRVYSTGSNVFQTRAGCLIGAEHVNNSYECDIPIGAGICASYQTQTNSPRRARSVASQSIIAYTMSLGAENSVAYSNNSIACPTNFTISVTTEILPVSMTKTSVDCTMYICGDSTECSNLLLQYGSFCTQLNRALTGIAVEQDKNTQEVFAQVKQIYKTPPIKDFGGFNFSQILPDPSKPSKRSFIEDLLFNKVTLADAGFIKQYGDCLGDIAARDLICAQKFNGLTVLPPLLTDEMIAQYTSALLAGTITSGWTFGAGAALQIPFAMQMAYRFNGIGVTQNVLYENQKLIANQFNSAIGKIQDSLSSTASALGKLQDVVNQNAQALNTLVKQLSSNFGAISSVLNDILSRLDKVEAEVQIDRLITGRLQSLQTYVTQQLIRAAEIRASANLAATKMSECVLGQSKRVDFCGKGYHLMSFPQSAPHGVVFLHVTYVPAQEKNFTTAPAICHDGKAHFPREGVFVSNGTHWFVTQRNFCEPQIITTDNTFVSGNCDVVIGIVNNTVYDPLQPELDSFKEELDKYFKNHTSPDVDLGDISGINASVVNIQKEIDRLNEVAKNLNESLIDLQELGKYEQYIKGGGGSDIIKLLNEQVNKEMQSSNLYMSMSSWCYTHSLDGAGLFLFDHAAEEYEHAKKLIIFLNENNVPVQLTSISAPEHKFEGLTQIFQKAYEHEQHISESINNIVDHAIKSKDHATFNFLQWYVAEQHEEEVLFKDILDKIELIGNENHGLYLADQYVKGIAKSRKS

SEQ ID NO: 5092 - protein, 1379 aa, Artificial Sequence
  SARS-CoV-2/USA/WI-13/2020__EPI_ISL_417516 spike protein (1-1211)(I714C_Y1110C) Ferritin construct
MFVFLVLLPLVSSQCVNLTTRTQLPPAYTNSFTRGVYYPDKVFRSSVLHSTQDLFLPFFSNVTWFHAIHVSGTNGTKRFDNPVLPFNDGVYFASTEKSNIIRGWIFGTTLDSKTQSLLIVNNATNVVIKVCEFQFCNDPFLGVYYHKNNKSWMESEFRVYSSANNCTFEYVSQPFLMDLEGKQGNFKNLREFVFKNIDGYFKIYSKHTPINLVRDLPQGFSALEPLVDLPIGINITRFQTLLALHRSYLTPGDSSSGWTAGAAAYYVGYLQPRTFLLKYNENGTITDAVDCALDPLSETKCTLKSFTVEKGIYQTSNFRVLPTESIVRFPNITNLCPFGEVFNATRFASVYAWNRKRISNCVADYSVLYNSASFSTFKCYGVSPTKLNDLCFTNVYADSFVIRGDEVRQIAPGQTGKIADYNYKLPDDFTGCVIAWNSNNLDSKVGGNYNYLYRLFRKSNLKPFERDISTEIYQAGSTPCNGVEGFNCYFPLQSYGFQPTNGVGYQPYRVVVLSFELLHAPATVCGPKKSTNLVKNKCVNFNFNGLTGTGVLTESNKKFLPFQQFGRDIADTTDAVRDPQTLEILDITPCSFGGVSVITPGTNTSNQVAVLYQGVNCTEVPVAIHADQLTPTWRVYSTGSNVFQTRAGCLIGAEHVNNSYECDIPIGAGICASYQTQTNSPRRARSVASQSIIAYTMSLGAENSVAYSNNSIACPTNFTISVTTEILPVSMTKTSVDCTMYICGDSTECSNLLLQYGSFCTQLNRALTGIAVEQDKNTQEVFAQVKQIYKTPPIKDFGGFNFSQILPDPSKPSKRSFIEDLLFNKVTLADAGFIKQYGDCLGDIAARDLICAQKFNGLTVLPPLLTDEMIAQYTSALLAGTITSGWTFGAGAALQIPFAMQMAYRFNGIGVTQNVLYENQKLIANQFNSAIGKIQDSLSSTASALGKLQDVVNQNAQALNTLVKQLSSNFGAISSVLNDILSRLDKVEAEVQIDRLITGRLQSLQTYVTQQLIRAAEIRASANLAATKMSECVLGQSKRVDFCGKGYHLMSFPQSAPHGVVFLHVTYVPAQEKNFTTAPAICHDGKAHFPREGVFVSNGTHWFVTQRNFCEPQIITTDNTFVSGNCDVVIGIVNNTVYDPLQPELDSFKEELDKYFKNHTSPDVDLGDISGINASVVNIQKEIDRLNEVAKNLNESLIDLQELGKYEQYIKGGGGSDIIKLLNEQVNKEMQSSNLYMSMSSWCYTHSLDGAGLFLFDHAAEEYEHAKKLIIFLNENNVPVQLTSISAPEHKFEGLTQIFQKAYEHEQHISESINNIVDHAIKSKDHATFNFLQWYVAEQHEEEVLFKDILDKIELIGNENHGLYLADQYVKGIAKSRKS

SEQ ID NO: 5093 - protein, 1378 aa, Artificial Sequence
  SARS-CoV-2/India/1-27/2020__EPI_ISL_413522 spike protein (1-1210)(I713C_Y1109C) Ferritin construct
MFVFLVLLPLVSSQCVNLTTRTQLPPAYTNSFTRGVYYPDKVFRSSVLHSTQDLFLPFFSNVTWFHAIHVSGTNGTKRFDNPVLPFNDGVYFASTEKSNIIRGWIFGTTLDSKTQSLLIVNNATNVVIKVCEFQFCNDPFLGVYHKNNKSWMESEFRVYSSANNCTFEYVSQPFLMDLEGKQGNFKNLREFVFKNIDGYFKIYSKHTPINLVRDLPQGFSALEPLVDLPIGINITRFQTLLALHRSYLTPGDSSSGWTAGAAAYYVGYLQPRTFLLKYNENGTITDAVDCALDPLSETKCTLKSFTVEKGIYQTSNFRVQPTESIVRFPNITNLCPFGEVFNATRFASVYAWNRKRISNCVADYSVLYNSASFSTFKCYGVSPTKLNDLCFTNVYADSFVIRGDEVIQIAPGQTGKIADYNYKLPDDFTGCVIAWNSNNLDSKVGGNYNYLYRLFRKSNLKPFERDISTEIYQAGSTPCNGVEGFNCYFPLQSYGFQPTNGVGYQPYRVVVLSFELLHAPATVCGPKKSTNLVKNKCVNFNFNGLTGTGVLTESNKKFLPFQQFGRDIADTTDAVRDPQTLEILDITPCSFGGVSVITPGTNTSNQVAVLYQDVNCTEVPVAIHADQLTPTWRVYSTGSNVFQTRAGCLIGAEHVNNSYECDIPIGAGICASYQTQTNSPRRARSVASQSIIAYTMSLGAENSVAYSNNSIACPTNFTISVTTEILPVSMTKTSVDCTMYICGDSTECSNLLLQYGSFCTQLNRALTGIAVEQDKNTQEVFAQVKQIYKTPPIKDFGGFNFSQILPDPSKPSKRSFIEDLLFNKVTLADAGFIKQYGDCLGDIAARDLICAQKFNGLTVLPPLLTDEMIAQYTSALLAGTITSGWTFGAGAALQIPFAMQMAYRFNGIGVTQNVLYENQKLIANQFNSAIGKIQDSLSSTASALGKLQDVVNQNAQALNTLVKQLSSNFGAISSVLNDILSRLDKVEAEVQIDRLITGRLQSLQTYVTQQLIRAAEIRASANLAATKMSECVLGQSKRVDFCGKGYHLMSFPQSAPHGVVFLHVTYVPAQEKNFTTAPAICHDGKAHFPREGVFVSNGTHWFVTQRNFCEPQIITTDNTFVSGNCDVVIGIVNNTVYDPLQPELDSFKEELDKYFKNHTSPDVDLGDISGINASVVNIQKEIDRLNEVAKNLNESLIDLQELGKYEQYIKGGGGSDIIKLLNEQVNKEMQSSNLYMSMSSWCYTHSLDGAGLFLFDHAAEEYEHAKKLIIFLNENNVPVQLTSISAPEHKFEGLTQIFQKAYEHEQHISESINNIVDHAIKSKDHATFNFLQWYVAEQHEEEVLFKDILDKIELIGNENHGLYLADQYVKGIAKSRKS

SEQ ID NO: 5094 - protein, 1373 aa, Artificial Sequence
  SARS-CoV-2/pangolin/Guangxi/P4L/2017__EPI_ISL_410538 spike protein (1-1205)(I708C_Y1104C) Ferritin construct
MFVFLFVLPLVSSQCVNLTTRTGIPPGYTNSSTRGVYYPDKVFRSSILHLTQDLFLPFFSNVTWFNTINYQGGFKKFDNPVLPFNDGVYFASTEKSNIIRGWIFGTTLDARTQSLLIVNNATNVVIKVCEFQFCTDPFLGVYYHNNNKTWVENEFRVYSSANNCTFEYISQPFLMDLEGKQGNFKNLREFVFKNVDGYFKIYSKHTPIDLVRDLPRGFAALEPLVDLPIGINITRFQTLLALHRSYLTPGNLESGWTTGAAAYYVGYLQQRTFLLSYNQNGTITDAVDCSLDPLSETKCTLKSLTVEKGIYQTSNFRVQPTISIVRFPNITNLCPFGEVFNASKFASVYAWNRKRISNCVADYSVLYNSTSFSTFKCYGVSPTKLNDLCFTNVYADSFVVKGDEVRQIAPGQTGVIADYNYKLPDDFTGCVIAWNSVKQDALTGGNYGYLYRLFRKSKLKPFERDISTEIYQAGSTPCNGQVGLNCYYPLERYGFHPTTGVNYQPFRVVVLSFELLNGPATVCGPKLSTTLVKDKCVNFNFNGLTGTGVLTTSKKQFLPFQQFGRDISDTTDAVRDPQTLEILDITPCSFGGVSVITPGTNTSNQVAVLYQDVNCTEVPMAIHAEQLTPAWRVYSAGANVFQTRAGCLVGAEHVNNSYECDIPVGAGICASYHSMSSLRSVNQRSIIAYTMSLGAENSVAYSNNSIACPTNFTISVTTEILPVSMTKTSVDCTMYICGDSIECSNLLLQYGSFCTQLNRALTGIAVEQDKNTQEVFAQVKQIYKTPPIKDFGGFNFSQILPDPSKPSKRSFIEDLLFNKVTLADAGFIKQYGDCLGDIAARDLICAQKFNGLTVLPPLLTDEMIAQYTSALLAGTITSGWTFGAGAALQIPFAMQMAYRFNGIGVTQNVLYENQKLIANQFNSAIGKIQDSLSSTASALGKLQDVVNQNAQALNTLVKQLSSNFGAISSVLNDILSRLDKVEAEVQIDRLITGRLQSLQTYVTQQLIRAAEIRASANLAATKMSECVLGQSKRVDFCGKGYHLMSFPQSAPHGVVFLHVTYVPAQEKNFTTAPAICHEGKAHFPREGVFVSNGTHWFITQRNFCEPQIITTDNTFVSGSCDVVIGIVNNTVYDPLQPELDSFKEELDKYFKNHTSPDVDLGDISGINASVVNIQKEIDRLNEVAKNLNESPIDLQELGKYEQYIKGGGGSDIIKLLNEQVNKEMQSSNLYMSMSSWCYTHSLDGAGLFLFDHAAEEYEHAKKLIIFLNENNVPVQLTSISAPEHKFEGLTQIFQKAYEHEQHISESINNIVDHAIKSKDHATFNFLQWYVAEQHEEEVLFKDILDKIELIGNENHGLYLADQYVKGIAKSRKS

SEQ ID NO: 5095 - protein, 1373 aa, Artificial Sequence
  SARS-CoV-2/pangolin/Guangxi/P5L/2017__EPI_ISL_410540 spike protein (1-1205)(I708C_Y1104C) Ferritin construct
MFVFLFVLPLVSSQCVNLTTRTGIPPGYTNSSTRGVYYPDKVFRSSILHLTQDLFLPFFSNVTWFNTINYQGGFKKFDNPVLPFNDGVYFASTEKSNIIRGWIFGTTLDARTQSLLIVNNATNVVIKVCEFQFCTDPFLGVYYHNNNKTWVENEFRVYSSANNCTFEYISQPFLMDLEGKQGNFKNLREFVFKNVDGYFKIYSKHTPIDLVRDLPRGFAALEPLVDLPIGINITRFQTLLALHRSYLTPGKLESGWTTGAAAYYVGYLQQRTFLLSYNQNGTITDAVDCSLDPLSETKCTLKSLTVEKGIYQTSNFRVQPTISIVRFPNITNLCPFGEVFNASKFASVYAWNRKRISNCVADYSVLYNSTSFSTFKCYGVSPTKLNDLCFTNVYADSFVVKGDEVRQIAPGQTGVIADYNYKLPDDFTGCVIAWNSVKQDALTGGNYGYLYRLFRKSKLKPFERDISTEIYQAGSTPCNGQVGLNCYYPLERYGFHPTTGVNYQPFRVVVLSFELLNGPATVCGPKLSTTLVKDKCVNFNFNGLTGTGVLTTSKKQFLPFQQFGRDISDTTDAVRDPQTLEILDITPCSFGGVSVITPGTNTSNQVAVLYQDVNCTEVPMAIHAEQLTPAWRVYSAGANVFQTRAGCLVGAEHVNNSYECDIPVGAGICASYHSMSSFRSVNQRSIIAYTMSLGAENSVAYSNNSIACPTNFTISVTTEILPVSMTKTSVDCTMYICGDSIECSNLLLQYGSFCTQLNRALTGIAVEQDKNTQEVFAQVKQIYKTPPIKDFGGFNFSQILPDPSKPSKRSFIEDLLFNKVTLADAGFIKQYGDCLGDIAARDLICAQKFNGLTVLPPLLTDEMIAQYTSALLAGTITSGWTFGAGAALQIPFAMQMAYRFNGIGVTQNVLYENQKLIANQFNSAIGKIQDSLSSTASALGKLQDVVNQNAQALNTLVKQLSSNFGAISSVLNDILSRLDKVEAEVQIDRLITGRLQSLQTYVTQQLIRAAEIRASANLAATKMSECVLGQSKRVDFCGKGYHLMSFPQSAPHGVVFLHVTYVPAQEKNFTTAPAICHEGKAHFPREGVFVSNGTHWFITQRNFCEPQIITTDNTFVSGSCDVVIGIVNNTVYDPLQPELDSFKEELDKYFKNHTSPDVDLGDISGINASVVNIQKEIDRLNEVAKNLNESLIDLQELGKYEQYIKGGGGSDIIKLLNEQVNKEMQSSNLYMSMSSWCYTHSLDGAGLFLFDHAAEEYEHAKKLIIFLNENNVPVQLTSISAPEHKFEGLTQIFQKAYEHEQHISESINNIVDHAIKSKDHATFNFLQWYVAEQHEEEVLFKDILDKIELIGNENHGLYLADQYVKGIAKSRKS

SEQ ID NO: 5096 - protein, 1373 aa, Artificial Sequence
  SARS-CoV-2/pangolin/Guangxi/P5E/2017__EPI_ISL_410541 spike protein (1-1205)(I708C_Y1104C) Ferritin construct
MFVFLFVLPLVSSQCVNLTTRTGIPPGYTNSSTRGVYYPDKVFRSSILHLTQDLFLPFFSNVTWFNTITYQGGSKKFDNPVLPFNDGVYFASTEKSNIIRGWIFGTTLDARTQSLLIVNNATNVVIKVCEFQFCTDPFLGVYYHNNNKTWVENEFRVYSSANNCTFEYISQPFLMDLEGKQGNFKNLREFVFKNVDGYFKIYSKHTPIDLVRDLPRGFAALEPLVDLPIGINITRFQTLLALHRSYLTPGKLESGWTTGAAAYYVGYLQQRTFLLSYNQNGTITDAVDCSLDPLSETKCTLKSLTVEKGIYQTSNFRVQPTISIVRFPNITNLCPFGEVFNASKFASVYAWNRKRISNCVADYSVLYNSTSFSTFKCYGVSPTKLNDLCFTNVYADSFVVKGDEVRQIAPGQTGVIADYNYKLPDDFTGCVIAWNSVKQDALTGDNYGYLYRLFRKSKLKPFERDISTEIYQAGSTPCNGQVGLNCYYPLERYGFHPTTGVNYQPFRVVVLSFELLNGPATVCGPKLSTTLVKDKCVNFNFNGLTGTGVLTTSKKQFLPFQQFGRDISDTTDAVRDPQTLEILDITPCSFGGVSVITPGTNTSNQVAVLYQDVNCTEVPMAIHAEQLTPAWRVYSAGANVFQTRAGCLVGAEHVNNSYECDIPVGAGICASYHSMSSFRSVNQRSIIAYTMSLGAENSVAYSNNSIACPTNFTISVTTEILPVSMTKTSVDCTMYICGDSIECSNLLLQYGSFCTQLNRALTGIAVEQDKNTQEVFAQVKQIYKTPPIKDFGGFNFSQILPDPSKPSKRSFIEDLLFNKVTLADAGFIKQYGDCLGDIAARDLICAQKFNGLTVLPPLLTDEMIAQYTSALLAGTITSGWTFGAGAALQIPFAMQMAYRFNGIGVTQNVLYENQKLIANQFNSAIGKIQDSLSSTASALGKLQDVVNQNAQALNTLVKQLSSNFGAISSVLNDILSRLDKVEAEVQIDRLITGRLQSLQTYVTQQLIRAAEIRASANLAATKMSECVLGQSKRVDFCGKGYHLMSFPQSAPHGVVFLHVTYVPAQEKNFTTAPAICHEGKAHFPREGVFVSNGTHWFITQRNFCEPQIITTDNTFVSGSCDVVIGIVNNTVYDPLQPELDSFKEELDKYFKNHTSPDVDLGDISGINASVVNIQKEIDRLNEVAKNLNESLIDLQELGKYEQYIKGGGGSDIIKLLNEQVNKEMQSSNLYMSMSSWCYTHSLDGAGLFLFDHAAEEYEHAKKLIIFLNENNVPVQLTSISAPEHKFEGLTQIFQKAYEHEQHISESINNIVDHAIKSKDHATFNFLQWYVAEQHEEEVLFKDILDKIELIGNENHGLYLADQYVKGIAKSRKS

SEQ ID NO: 5097 - protein, 1371 aa, Artificial Sequence
  SARS-CoV-2/pangolin/Guangxi/P1E/2017__EPI_ISL_410539 spike protein (1-1203)(I706C_Y1102C) Ferritin construct
MFVFLFVLPLVSSQCVNLTTRTGIQPGYTNSSTRGVYYPDKVFRSSILHLTQDLFLPFFSNVTWFNTINYQGGFKKFDNPVLPFNDGVYFASTEKSNIIRGWIFGTTLDARTQSLLIVNNATNVVIKVCEFQFCTDPFLGVYYHNNNKTWVENEFRVYSSANNCTFEYISQPFLMDLEGKQGNFKNLREFVFKNVDGYFKIYSKHTPIDLVRDLPRGFAALEPLVDLPIGINITRFQTLLALHRSYLTPGKLESGWTTGAAAYYVGYLQQRTFLLSYNQNGTITDAVDCSLDPLSETKCTLKSLTVEKGIYQTSNFRVQPTISIVRFPNITNLCPFGEVFNASKFASVYAWNRKRISNCVADYSVLYNSTSFSTFKCYGVSPTKLNDLCFTNVYADSFVVKGDEVRQIAPGQTGVIADYNYKLPDDFTGCVIAWNSVKQDALTGGNYLYRLFRKSKLKPFERDISTEIYQAGSTPCNGQVGLNCYYPLERYGFHPTTGVNYQPFRVVVLSFELLNGPATVCGPKLSTTLVKDKCVNFNFNGLTGTGVLTTSKKQFLPFQQFGRDISDTTDAVRDPQTLEILDITPCSFGGVSVITPGTNTSNQVAVLYQDVNCTEVPMAIHAEQLTPAWRVYSAGANVFQTRAGCLVGAEHVNNSYECDIPVGAGICASYHSMSSLRSVNQRSIIAYTMSLGAENSVAYSNNSIACPTNFTISVTTEILPVSMTKTSVDCTMYICGDSIECSNLLLQYGSFCTQLNRALTGIAVEQDKNTQEVFAQVKQIYKTPPIKDFGGFNFSQILPDPSKPSKRSFIEDLLFNKVTLADAGFIKQYGDCLGDIAARDLICAQKFNGLTVLPPLLTDEMIAQYTSALLAGTITSGWTFGAGAALQIPFAMQMAYRFNGIGVTQNVLYENQKLIANQFNSAIGKIQDSLSSTASALGKLQDVVNQNAQALNTLVKQLSSNFGAISSVLNDILSRLDKVEAEVQIDRLITGRLQSLQTYVTQQLIRAAEIRASANLAATKMSECVLGQSKRVDFCGKGYHLMSFPQSAPHGVVFLHVTYVPAQEKNFTTAPAICHEGKAHFPREGVFVSNGTHWFITQRNFCEPQIITTDNTFVSGSCDVVIGIVNNTVYDPLQPELDSFKEELDKYFKNHTSPDVDLGDISGINASVVNIQKEIDRLNEVAKNLNESLIDLQELGKYEQYIKGGGGSDIIKLLNEQVNKEMQSSNLYMSMSSWCYTHSLDGAGLFLFDHAAEEYEHAKKLIIFLNENNVPVQLTSISAPEHKFEGLTQIFQKAYEHEQHISESINNIVDHAIKSKDHATFNFLQWYVAEQHEEEVLFKDILDKIELIGNENHGLYLADQYVKGIAKSRKS

SEQ ID NO: 5098 - protein, 1379 aa, Artificial Sequence
  SARS-CoV-2/Wuhan/WIV05/2019__EPI_ISL_402128 spike protein (1-1211)(P715C_P1069C) Ferritin construct
MFVFLVLLPLVSSQCVNLTTRTQLPPAYTNSFTRGVYYPDKVFRSSVLHSTQDLFLPFFSNVTWFHAIHVSGTNGTKRFDNPVLPFNDGVYFASTEKSNIIRGWIFGTTLDSKTQSLLIVNNATNVVIKVCEFQFCNDPFLGVYYHKNNKSWMESEFRVYSSANNCTFEYVSQPFLMDLEGKQGNFKNLREFVFKNIDGYFKIYSKHTPINLVRDLPQGFSALEPLVDLPIGINITRFQTLLALHRSYLTPGDSSSGWTAGAAAYYVGYLQPRTFLLKYNENGTITDAVDCALDPLSETKCTLKSFTVEKGIYQTSNFRVQPTESIVRFPNITNLCPFGEVFNATRFASVYAWNRKRISNCVADYSVLYNSASFSTFKCYGVSPTKLNDLCFTNVYADSFVIRGDEVRQIAPGQTGKIADYNYKLPDDFTGCVIAWNSNNLDSKVGGNYNYLYRLFRKSNLKPFERDISTEIYQAGSTPCNGVEGFNCYFPLQSYGFQPTNGVGYQPYRVVVLSFELLHAPATVCGPKKSTNLVKNKCVNFNFNGLTGTGVLTESNKKFLPFQQFGRDIADTTDAVRDPQTLEILDITPCSFGGVSVITPGTNTSNQVAVLYQDVNCTEVPVAIHADQLTPTWRVYSTGSNVFQTRAGCLIGAEHVNNSYECDIPIGAGICASYQTQTNSPRRARSVASQSIIAYTMSLGAENSVAYSNNSIAICTNFTISVTTEILPVSMTKTSVDCTMYICGDSTECSNLLLQYGSFCTQLNRALTGIAVEQDKNTQEVFAQVKQIYKTPPIKDFGGFNFSQILPDPSKPSKRSFIEDLLFNKVTLADAGFIKQYGDCLGDIAARDLICAQKFNGLTVLPPLLTDEMIAQYTSALLAGTITSGWTFGAGAALQIPFAMQMAYRFNGIGVTQNVLYENQKLIANQFNSAIGKIQDSLSSTASALGKLQDVVNQNAQALNTLVKQLSSNFGAISSVLNDILSRLDKVEAEVQIDRLITGRLQSLQTYVTQQLIRAAEIRASANLAATKMSECVLGQSKRVDFCGKGYHLMSFPQSAPHGVVFLHVTYVCAQEKNFTTAPAICHDGKAHFPREGVFVSNGTHWFVTQRNFYEPQIITTDNTFVSGNCDVVIGIVNNTVYDPLQPELDSFKEELDKYFKNHTSPDVDLGDISGINASVVNIQKEIDRLNEVAKNLNESLIDLQELGKYEQYIKGGGGSDIIKLLNEQVNKEMQSSNLYMSMSSWCYTHSLDGAGLFLFDHAAEEYEHAKKLIIFLNENNVPVQLTSISAPEHKFEGLTQIFQKAYEHEQHISESINNIVDHAIKSKDHATFNFLQWYVAEQHEEEVLFKDILDKIELIGNENHGLYLADQYVKGIAKSRKS

SEQ ID NO: 5099 - protein, 1375 aa, Artificial Sequence
  SARS-CoV-2/bat/Yunnan/RaTG13/2013__EPI_ISL_402131 spike protein (1-1207)(P711C_P1065C) Ferritin construct
MFVFLVLLPLVSSQCVNLTTRTQLPPAYTNSSTRGVYYPDKVFRSSVLHLTQDLFLPFFSNVTWFHAIHVSGTNGIKRFDNPVLPFNDGVYFASTEKSNIIRGWIFGTTLDSKTQSLLIVNNATNVVIKVCEFQFCNDPFLGVYYHKNNKSWMESEFRVYSSANNCTFEYVSQPFLMDLEGKQGNFKNLREFVFKNIDGYFKIYSKHTPINLVRDLPPGFSALEPLVDLPIGINITRFQTLLALHRSYLTPGDSSSGWTAGAAAYYVGYLQPRTFLLKYNENGTITDAVDCALDPLSETKCTLKSFTVEKGIYQTSNFRVQPTDSIVRFPNITNLCPFGEVFNATTFASVYAWNRKRISNCVADYSVLYNSTSFSTFKCYGVSPTKLNDLCFTNVYADSFVITGDEVRQIAPGQTGKIADYNYKLPDDFTGCVIAWNSKHIDAKEGGNFNYLYRLFRKANLKPFERDISTEIYQAGSKPCNGQTGLNCYYPLYRYGFYPTDGVGHQPYRVVVLSFELLNAPATVCGPKKSTNLVKNKCVNFNFNGLTGTGVLTESNKKFLPFQQFGRDIADTTDAVRDPQTLEILDITPCSFGGVSVITPGTNASNQVAVLYQDVNCTEVPVAIHADQLTPTWRVYSTGSNVFQTRAGCLIGAEHVNNSYECDIPIGAGICASYQTQTNSRSVASQSIIAYTMSLGAENSVAYSNNSIAICTNFTISVTTEILPVSMTKTSVDCTMYICGDSTECSNLLLQYGSFCTQLNRALTGIAVEQDKNTQEVFAQVKQIYKTPPIKDFGGFNFSQILPDPSKPSKRSFIEDLLFNKVTLADAGFIKQYGDCLGDIAARDLICAQKFNGLTVLPPLLTDEMIAQYTSALLAGTITSGWTFGAGAALQIPFAMQMAYRFNGIGVTQNVLYENQKLIANQFNSAIGKIQDSLSSTASALGKLQDVVNQNAQALNTLVKQLSSNFGAISSVLNDILSRLDKVEAEVQIDRLITGRLQSLQTYVTQQLIRAAEIRASANLAATKMSECVLGQSKRVDFCGKGYHLMSFPQSAPHGVVFLHVTYVCAQEKNFTTAPAICHDGKAHFPREGVFVSNGTHWFVTQRNFYEPQIITTDNTFVSGSCDVVIGIVNNTVYDPLQPELDSFKEELDKYFKNHTSPDVDLGDISGINASVVNIQKEIDRLNEVAKNLNESLIDLQELGKYEQYIKGGGGSDIIKLLNEQVNKEMQSSNLYMSMSSWCYTHSLDGAGLFLFDHAAEEYEHAKKLIIFLNENNVPVQLTSISAPEHKFEGLTQIFQKAYEHEQHISESINNIVDHAIKSKDHATFNFLQWYVAEQHEEEVLFKDILDKIELIGNENHGLYLADQYVKGIAKSRKS

SEQ ID NO: 5100 - protein, 1379 aa, Artificial Sequence
  SARS-CoV-2/Wuhan/HBCDC-HB-01/2019__EPI_ISL_402132 spike protein (1-1211)(P715C_P1069C) Ferritin construct
MFVFLVLLPLVSSQCVNLTTRTQLPPAYTNSITRGVYYPDKVFRSSVLHSTQDLFLPFFSNVTWFHAIHVSGTNGTKRFDNPVLPFNDGVYFASTEKSNIIRGWIFGTTLDSKTQSLLIVNNATNVVIKVCEFQFCNDPFLGVYYHKNNKSWMESEFRVYSSANNCTFEYVSQPFLMDLEGKQGNFKNLREFVFKNIDGYFKIYSKHTPINLVRDLPQGFSALEPLVDLPIGINITRFQTLLALHRSYLTPGDSSSGWTAGAAAYYVGYLQPRTFLLKYNENGTITDAVDCALDPLSETKCTLKSFTVEKGIYQTSNFRVQPTESIVRFPNITNLCPFGEVFNATRFASVYAWNRKRISNCVADYSVLYNSASFSTFKCYGVSPTKLNDLCFTNVYADSFVIRGDEVRQIAPGQTGKIADYNYKLPDDFTGCVIAWNSNNLDSKVGGNYNYLYRLFRKSNLKPFERDISTEIYQAGSTPCNGVEGFNCYFPLQSYGFQPTNGVGYQPYRVVVLSFELLHAPATVCGPKKSTNLVKNKCVNFNFNGLTGTGVLTESNKKFLPFQQFGRDIADTTDAVRDPQTLEILDITPCSFGGVSVITPGTNTSNQVAVLYQDVNCTEVPVAIHADQLTPTWRVYSTGSNVFQTRAGCLIGAEHVNNSYECDIPIGAGICASYQTQTNSPRRARSVASQSIIAYTMSLGAENSVAYSNNSIAICTNFTISVTTEILPVSMTKTSVDCTMYICGDSTECSNLLLQYGSFCTQLNRALTGIAVEQDKNTQEVFAQVKQIYKTPPIKDFGGFNFSQILPDPSKPSKRSFIEDLLFNKVTLADAGFIKQYGDCLGDIAARDLICAQKFNGLTVLPPLLTDEMIAQYTSALLAGTITSGWTFGAGAALQIPFAMQMAYRFNGIGVTQNVLYENQKLIANQFNSAIGKIQDSLSSTASALGKLQDVVNQNAQALNTLVKQLSSNFGAISSVLNDILSRLDKVEAEVQIDRLITGRLQSLQTYVTQQLIRAAEIRASANLAATKMSECVLGQSKRVDFCGKGYHLMSFPQSAPHGVVFLHVTYVCAQEKNFTTAPAICHDGKAHFPREGVFVSNGTHWFVTQRNFYEPQIITTDNTFVSGNCDVVIGIVNNTVYDPLQPELDSFKEELDKYFKNHTSPDVDLGDISGINASVVNIQKEIDRLNEVAKNLNESLIDLQELGKYEQYIKGGGGSDIIKLLNEQVNKEMQSSNLYMSMSSWCYTHSLDGAGLFLFDHAAEEYEHAKKLIIFLNENNVPVQLTSISAPEHKFEGLTQIFQKAYEHEQHISESINNIVDHAIKSKDHATFNFLQWYVAEQHEEEVLFKDILDKIELIGNENHGLYLADQYVKGIAKSRKS

SEQ ID NO: 5101 - protein, 1379 aa, Artificial Sequence
  SARS-CoV-2/Guangdong/20SF028/2020__EPI_ISL_403936 spike protein (1-1211)(P715C_P1069C) Ferritin construct
MFVFLVLLPLVSSQCVNLTTRTQLPPAYTNSFTRGVYYPDKVFRSSVLYSTQDLFLPFFSNVTWFHAIHVSGTNGTKRFDNPVLPFNDGVYFASTEKSNIIRGWIFGTTLDSKTQSLLIVNNATNVVIKVCEFQFCNDPFLGVYYHKNNKSWMESEFRVYSSANNCTFEYVSQPFLMDLEGKQGNFKNLREFVFKNIDGYFKIYSKHTPINLVRDLPQGFSALEPLVDLPIGINITRFQTLLALHRSYLTPGDSSSGWTAGAAAYYVGYLQPRTFLLKYNENGTITDAVDCALDPLSETKCTLKSFTVEKGIYQTSNFRVQPTESIVRFPNITNLCPFGEVFNATRFASVYAWNRKRISNCVADYSVLYNSASFSTFKCYGVSPTKLNDLCFTNVYADSFVIRGDEVRQIAPGQTGKIADYNYKLPDDFTGCVIAWNSNNLDSKVGGNYNYLYRLFRKSNLKPFERDISTEIYQAGSTPCNGVEGFNCYFPLQSYGFQPTNGVGYQPYRVVVLSFELLHAPATVCGPKKSTNLVKNKCVNFNFNGLTGTGVLTESNKKFLPFQQFGRDIADTTDAVRDPQTLEILDITPCSFGGVSVITPGTNTSNQVAVLYQDVNCTEVPVAIHADQLTPTWRVYSTGSNVFQTRAGCLIGAEHVNNSYECDIPIGAGICASYQTQTNSPRRARSVASQSIIAYTMSLGAENSVAYSNNSIAICTNFTISVTTEILPVSMTKTSVDCTMYICGDSTECSNLLLQYGSFCTQLNRALTGIAVEQDKNTQEVFAQVKQIYKTPPIKDFGGFNFSQILPDPSKPSKRSFIEDLLFNKVTLADAGFIKQYGDCLGDIAARDLICAQKFNGLTVLPPLLTDEMIAQYTSALLAGTITSGWTFGAGAALQIPFAMQMAYRFNGIGVTQNVLYENQKLIANQFNSAIGKIQDSLSSTASALGKLQDVVNQNAQALNTLVKQLSSNFGAISSVLNDILSRLDKVEAEVQIDRLITGRLQSLQTYVTQQLIRAAEIRASANLAATKMSECVLGQSKRVDFCGKGYHLMSFPQSAPHGVVFLHVTYVCAQEKNFTTAPAICHDGKAHFPREGVFVSNGTHWFVTQRNFYEPQIITTDNTFVSGNCDVVIGIVNNTVYDPLQPELDSFKEELDKYFKNHTSPDVDLGDISGINASVVNIQKEIDRLNEVAKNLNESLIDLQELGKYEQYIKGGGGSDIIKLLNEQVNKEMQSSNLYMSMSSWCYTHSLDGAGLFLFDHAAEEYEHAKKLIIFLNENNVPVQLTSISAPEHKFEGLTQIFQKAYEHEQHISESINNIVDHAIKSKDHATFNFLQWYVAEQHEEEVLFKDILDKIELIGNENHGLYLADQYVKGIAKSRKS

SEQ ID NO: 5102 - protein, 1379 aa, Artificial Sequence
  SARS-CoV-2/Shenzhen/SZTH-001/2020__EPI_ISL_406592 spike protein (1-1211)(P715C_P1069C) Ferritin construct
MFVFLVLLPLVSSQCVNLTTRTQLPPAYTNSFTRGVYYPDKVFRSSVLHSTQDLFLPFFSNVTWFHAIHVSGTNGTKRFDNPVLPFNDGVYFASTEKSNIIRGWIFGTTLDSKTQSLLIVNNATNVVIKVCEFQFCNDPFLGVYYHKNNKSWMESEFRVYSSANNCTFEYVSQPFLMDLEGKQGNFKNLREFVFKNIDGYFKIYSKHTPINLVRDLPQGFSALEPLVDLPIGINITRFQTLLALHRSYLTPGDSSSGWTAGAAAYYVGYLQPRTFLLKYNENGTITDAVDCALDPLSETKCTLKSFTVEKGIYQTSNFRVQPTESIVRFPNITNLCPFGEVFNATRFASVYAWNRKRISNCVADYSVLYNSASFSTFKCYGVSPTKLNDLCFTNVYADSFVIRGDEVRQIAPGQTGKIADYNYKLPDDFTGCVIAWNSNNLDSKVGGNYNYLYRLFRKSNLKPFERDISTEIYQAGSTPCNGVEGFNCYFPLQSYGFQPTNGVGYQPYRVVVLSFELLHAPATVCGPKKSTNLVKNKCVNFNFNGLTGTGVLTESNKKFLPFQQFGRDIADTTDAVRDPQTLEILDITPCSFGGVSVITPGTNTSNQVAVLYQDVNCTEVPVAIHADQLTPTWRVYSTGSNVFQTRAGCLIGAEHVNNSYECDIPIGAGICASYQTQTNSPRRARSVASQSIIAYTMSLGAENSVAYSNNSIAICTNFTISVTTEILPVSMTKTSVDCTMYICGDSTECSNLLLQYGSFCTQLNRALTGIAVEQDKNTQEVFAQVKQIYKTPPIKDFGGFNFSQILPDPSKPSKRSFIEDLLFNKVTLADAGFIKQYGDCLGDIAARDLICAQKFNGLTVLPPLLTDEMIAQYTSALLAGTITSGWTFGAGAALQIPFAMQMAYRFNGIGVTQNVLYENQKLIANQFNSAIGKIQDSLSSTASALGKLQDVVNQNAQALNTLVKQLSSNFGAISSVLNDILSRLDKVEAEVQIDRLITGRLQSLQTYVTQQLIRAAEIRASANLAATKMSECVLGQSKRVDFCGKGYHLMSFPQSAPHGVVFLHVTYVCAQEKNFTTAPAICHDGKAHFPREGVFVSNGTHWFVTQRNFYEPQIITTDNTFVSGNCDVLIGIVNNTVYDPLQPELDSFKEELDKYFKNHTSPDVDLGDISGINASVVNIQKEIDRLNEVAKNLNESLIDLQELGKYEQYIKGGGGSDIIKLLNEQVNKEMQSSNLYMSMSSWCYTHSLDGAGLFLFDHAAEEYEHAKKLIIFLNENNVPVQLTSISAPEHKFEGLTQIFQKAYEHEQHISESINNIVDHAIKSKDHATFNFLQWYVAEQHEEEVLFKDILDKIELIGNENHGLYLADQYVKGIAKSRKS

SEQ ID NO: 5103 - protein, 1379 aa, Artificial Sequence
  SARS-CoV-2/Shenzhen/SZTH-004/2020__EPI_ISL_406595 spike protein (1-1211)(P715C_P1069C) Ferritin construct
MFVFLVLLPLVSSQCVNLTTRTQLPPAYTNSFTRGVYYPDKVFRSSVLHSTQDLFLPFFSNVTWFHAIHVSGTNGTKRFDNPVLPFNDGVYFASTEKSNIIRGWIFGTTLDSKTQSLLIVNNATNVVIKVCEFQFCNDPFLGVYYHKNNKSWMESEFRVYSSANNCTFEYVSQPFLMDLEGKQGNFKNLREFVFKNIDGYFKIYSKHTPINLVRDLPQGFSALEPLVDLPIGINITRFQTLLALHRSYLTPGDSSSGWTAGAAAYYVGYLQPRTFLLKYNENGTITDAVDCALDPLSETKCTLKSFTVEKGIYQTSNFRVQPTESIVRFPNITNLCPFGEVFNATRFASVYAWDRKRISNCVAYYSVLYNSASFSTFKCYGVSPTKLNDLCFTNVYADSFVIRGDEVRQIAPGQTGKIADYNYKLPDDFTGCVIAWNSNNLDSKVGGNYNYLYRLFRKSNLKPFERDISTEIYQAGSTPCNGVEGFNCYFPLQSYGFQPTNGVGYQPYRVVVLSFELLHAPATVCGPKKSTNLVKNKCVNFNFNGLTGTGVLTESNKKFLPFQQFGRDIADTTDAVRDPQTLEILDITPCSFGGVSVITPGTNTSNQVAVLYQDVNCTEVPVAIHADQLTPTWRVYSTGSNVFQTRAGCLIGAEHVNNSYECDIPIGAGICASYQTQTNSPRRARSVASQSIIAYTMSLGAENSVAYSNNSIAICTNFTISVTTEILPVSMTKTSVDCTMYICGDSTECSNLLLQYGSFCTQLNRALTGIAVEQDKNTQEVFAQVKQIYKTPPIKDFGGFNFSQILPDPSKPSKRSFIEDLLFNKVTLADAGFIKQYGDCLGDIAARDLICAQKFNGLTVLPPLLTDEMIAQYTSALLAGTITSGWTFGAGAALQIPFAMQMAYRFNGIGVTQNVLYENQKLIANQFNSAIGKIQDSLSSTASALGKLQDVVNQNAQALNTLVKQLSSNFGAISSVLNDILSRLDKVEAEVQIDRLITGRLQSLQTYVTQQLIRAAEIRASANLAATKMSECVLGQSKRVDFCGKGYHLMSFPQSAPHGVVFLHVTYVCAQEKNFTTAPAICHDGKAHFPREGVFVSNGTHWFVTQRNFYEPQIITTDNTFVSGNCDVVIGIVNNTVYDPLQPELDSFKEELDKYFKNHTSPDVDLGDISGINASVVNIQKEIDRLNEVAKNLNESLIDLQELGKYEQYIKGGGGSDIIKLLNEQVNKEMQSSNLYMSMSSWCYTHSLDGAGLFLFDHAAEEYEHAKKLIIFLNENNVPVQLTSISAPEHKFEGLTQIFQKAYEHEQHISESINNIVDHAIKSKDHATFNFLQWYVAEQHEEEVLFKDILDKIELIGNENHGLYLADQYVKGIAKSRKS

SEQ ID NO: 5104 - protein, 1379 aa, Artificial Sequence
  SARS-CoV-2/France/IDF0372/2020__EPI_ISL_406596 spike protein (1-1211)(P715C_P1069C) Ferritin construct
MFVFLVLLPLVSSQCVNLTTRTQLPPAYTNSFTRGVYYPDKVFRSSVLHSTQDLFLPFFSNVTWFHAIHVSGTNGTKRFDNPVLPFNDGVYFASTEKSNIIRGWIFGTTLDSKTQSLLIVNNATNVVIKVCEFQFCNDPFLGVYYHKNNKSWMESEFRVYSSANNCTFEYVSQPFLMDLEGKQGNFKNLREFVFKNIDGYFKIYSKHTPINLVRDLPQGFSALEPLVDLPIGINITRFQTLLALHRSYLTPGDSSSGWTAGAAAYYVGYLQPRTFLLKYNENGTITDAVDCALDPLSETKCTLKSFTVEKGIYQTSNFRVQPTESIVRFPNITNLCPFGEVFNATRFASVYAWNRKRISNCVADYSFLYNSASFSTFKCYGVSPTKLNDLCFTNVYADSFVIRGDEVRQIAPGQTGKIADYNYKLPDDFTGCVIAWNSNNLDSKVGGNYNYLYRLFRKSNLKPFERDISTEIYQAGSTPCNGVEGFNCYFPLQSYGFQPTNGVGYQPYRVVVLSFELLHAPATVCGPKKSTNLVKNKCVNFNFNGLTGTGVLTESNKKFLPFQQFGRDIADTTDAVRDPQTLEILDITPCSFGGVSVITPGTNTSNQVAVLYQDVNCTEVPVAIHADQLTPTWRVYSTGSNVFQTRAGCLIGAEHVNNSYECDIPIGAGICASYQTQTNSPRRARSVASQSIIAYTMSLGAENSVAYSNNSIAICTNFTISVTTEILPVSMTKTSVDCTMYICGDSTECSNLLLQYGSFCTQLNRALTGIAVEQDKNTQEVFAQVKQIYKTPPIKDFGGFNFSQILPDPSKPSKRSFIEDLLFNKVTLADAGFIKQYGDCLGDIAARDLICAQKFNGLTVLPPLLTDEMIAQYTSALLAGTITSGWTFGAGAALQIPFAMQMAYRFNGIGVTQNVLYENQKLIANQFNSAIGKIQDSLSSTASALGKLQDVVNQNAQALNTLVKQLSSNFGAISSVLNDILSRLDKVEAEVQIDRLITGRLQSLQTYVTQQLIRAAEIRASANLAATKMSECVLGQSKRVDFCGKGYHLMSFPQSAPHGVVFLHVTYVCAQEKNFTTAPAICHDGKAHFPREGVFVSNGTHWFVTQRNFYEPQIITTDNTFVSGNCDVVIGIVNNTVYDPLQPELDSFKEELDKYFKNHTSPDVDLGDISGINASVVNIQKEIDRLNEVAKNLNESLIDLQELGKYEQYIKGGGGSDIIKLLNEQVNKEMQSSNLYMSMSSWCYTHSLDGAGLFLFDHAAEEYEHAKKLIIFLNENNVPVQLTSISAPEHKFEGLTQIFQKAYEHEQHISESINNIVDHAIKSKDHATFNFLQWYVAEQHEEEVLFKDILDKIELIGNENHGLYLADQYVKGIAKSRKS

SEQ ID NO: 5105 - protein, 1379 aa, Artificial Sequence
  SARS-CoV-2/Australia/VIC01/2020__EPI_ISL_406844 spike protein (1-1211)(P715C_P1069C) Ferritin construct
MFVFLVLLPLVSSQCVNLTTRTQLPPAYTNSFTRGVYYPDKVFRSSVLHSTQDLFLPFFSNVTWFHAIHVSGTNGTKRFDNPVLPFNDGVYFASTEKSNIIRGWIFGTTLDSKTQSLLIVNNATNVVIKVCEFQFCNDPFLGVYYHKNNKSWMESEFRVYSSANNCTFEYVSQPFLMDLEGKQGNFKNLREFVFKNIDGYFKIYSKHTPINLVRDLPQGFSALEPLVDLPIGINITRFQTLLALHRRYLTPGDSSSGWTAGAAAYYVGYLQPRTFLLKYNENGTITDAVDCALDPLSETKCTLKSFTVEKGIYQTSNFRVQPTESIVRFPNITNLCPFGEVFNATRFASVYAWNRKRISNCVADYSVLYNSASFSTFKCYGVSPTKLNDLCFTNVYADSFVIRGDEVRQIAPGQTGKIADYNYKLPDDFTGCVIAWNSNNLDSKVGGNYNYLYRLFRKSNLKPFERDISTEIYQAGSTPCNGVEGFNCYFPLQSYGFQPTNGVGYQPYRVVVLSFELLHAPATVCGPKKSTNLVKNKCVNFNFNGLTGTGVLTESNKKFLPFQQFGRDIADTTDAVRDPQTLEILDITPCSFGGVSVITPGTNTSNQVAVLYQDVNCTEVPVAIHADQLTPTWRVYSTGSNVFQTRAGCLIGAEHVNNSYECDIPIGAGICASYQTQTNSPRRARSVASQSIIAYTMSLGAENSVAYSNNSIAICTNFTISVTTEILPVSMTKTSVDCTMYICGDSTECSNLLLQYGSFCTQLNRALTGIAVEQDKNTQEVFAQVKQIYKTPPIKDFGGFNFSQILPDPSKPSKRSFIEDLLFNKVTLADAGFIKQYGDCLGDIAARDLICAQKFNGLTVLPPLLTDEMIAQYTSALLAGTITSGWTFGAGAALQIPFAMQMAYRFNGIGVTQNVLYENQKLIANQFNSAIGKIQDSLSSTASALGKLQDVVNQNAQALNTLVKQLSSNFGAISSVLNDILSRLDKVEAEVQIDRLITGRLQSLQTYVTQQLIRAAEIRASANLAATKMSECVLGQSKRVDFCGKGYHLMSFPQSAPHGVVFLHVTYVCAQEKNFTTAPAICHDGKAHFPREGVFVSNGTHWFVTQRNFYEPQIITTDNTFVSGNCDVVIGIVNNTVYDPLQPELDSFKEELDKYFKNHTSPDVDLGDISGINASVVNIQKEIDRLNEVAKNLNESLIDLQELGKYEQYIKGGGGSDIIKLLNEQVNKEMQSSNLYMSMSSWCYTHSLDGAGLFLFDHAAEEYEHAKKLIIFLNENNVPVQLTSISAPEHKFEGLTQIFQKAYEHEQHISESINNIVDHAIKSKDHATFNFLQWYVAEQHEEEVLFKDILDKIELIGNENHGLYLADQYVKGIAKSRKS

SEQ ID NO: 5106 - protein, 1379 aa, Artificial Sequence
  SARS-CoV-2/Germany/BavPat1/2020__EPI_ISL_406862 spike protein (1-1211)(P715C_P1069C) Ferritin construct
MFVFLVLLPLVSSQCVNLTTRTQLPPAYTNSFTRGVYYPDKVFRSSVLHSTQDLFLPFFSNVTWFHAIHVSGTNGTKRFDNPVLPFNDGVYFASTEKSNIIRGWIFGTTLDSKTQSLLIVNNATNVVIKVCEFQFCNDPFLGVYYHKNNKSWMESEFRVYSSANNCTFEYVSQPFLMDLEGKQGNFKNLREFVFKNIDGYFKIYSKHTPINLVRDLPQGFSALEPLVDLPIGINITRFQTLLALHRSYLTPGDSSSGWTAGAAAYYVGYLQPRTFLLKYNENGTITDAVDCALDPLSETKCTLKSFTVEKGIYQTSNFRVQPTESIVRFPNITNLCPFGEVFNATRFASVYAWNRKRISNCVADYSVLYNSASFSTFKCYGVSPTKLNDLCFTNVYADSFVIRGDEVRQIAPGQTGKIADYNYKLPDDFTGCVIAWNSNNLDSKVGGNYNYLYRLFRKSNLKPFERDISTEIYQAGSTPCNGVEGFNCYFPLQSYGFQPTNGVGYQPYRVVVLSFELLHAPATVCGPKKSTNLVKNKCVNFNFNGLTGTGVLTESNKKFLPFQQFGRDIADTTDAVRDPQTLEILDITPCSFGGVSVITPGTNTSNQVAVLYQGVNCTEVPVAIHADQLTPTWRVYSTGSNVFQTRAGCLIGAEHVNNSYECDIPIGAGICASYQTQTNSPRRARSVASQSIIAYTMSLGAENSVAYSNNSIAICTNFTISVTTEILPVSMTKTSVDCTMYICGDSTECSNLLLQYGSFCTQLNRALTGIAVEQDKNTQEVFAQVKQIYKTPPIKDFGGFNFSQILPDPSKPSKRSFIEDLLFNKVTLADAGFIKQYGDCLGDIAARDLICAQKFNGLTVLPPLLTDEMIAQYTSALLAGTITSGWTFGAGAALQIPFAMQMAYRFNGIGVTQNVLYENQKLIANQFNSAIGKIQDSLSSTASALGKLQDVVNQNAQALNTLVKQLSSNFGAISSVLNDILSRLDKVEAEVQIDRLITGRLQSLQTYVTQQLIRAAEIRASANLAATKMSECVLGQSKRVDFCGKGYHLMSFPQSAPHGVVFLHVTYVCAQEKNFTTAPAICHDGKAHFPREGVFVSNGTHWFVTQRNFYEPQIITTDNTFVSGNCDVVIGIVNNTVYDPLQPELDSFKEELDKYFKNHTSPDVDLGDISGINASVVNIQKEIDRLNEVAKNLNESLIDLQELGKYEQYIKGGGGSDIIKLLNEQVNKEMQSSNLYMSMSSWCYTHSLDGAGLFLFDHAAEEYEHAKKLIIFLNENNVPVQLTSISAPEHKFEGLTQIFQKAYEHEQHISESINNIVDHAIKSKDHATFNFLQWYVAEQHEEEVLFKDILDKIELIGNENHGLYLADQYVKGIAKSRKS

SEQ ID NO: 5107 - protein, 1379 aa, Artificial Sequence
  SARS-CoV-2/Wuhan/HBCDC-HB-02/2020__EPI_ISL_412978 spike protein (1-1211)(P715C_P1069C) Ferritin construct
MFVFLVLLPLVSSQCVNLTTRTQLPPAYTNSFTRGVYYPDKVFRSSVLHSTQDLFLPFFSNVTWFHAIHVSGTNGTKRFDNPVLPFNDGVYFASTEKSNIIRGWIFGTTLDSKTQSLLIVNNATNVVIKVCEFQFCNDPFLGVYYHKNNKSWMESEFRVYSSANNCTFEYVSQPFLMDLEGKQGNFKNLREFVFKNIDGYFKIYSKHTPINLVRDLPQGFSALEPLVDLPIGINITRFQTLLALHRSYLTPGDSSSGWTAGAAAYYVGYLQPRTFLLKYNENGTITDAVDCALDPLSETKCTLKSFTVEKGIYQTSNFRVQPTESIVRFPNITNLCPFGEVFNATRFASVYAWNRKRISNCVADYSVLYNSASFSTFKCYGVSPTKLNDLCFTNVYADSFVIRGDEVRQIAPGQTGKIADYNYKLPDDFTGCVIAWNSNNLDSKVGGNYNYLYRLFRKSNLKPFERDISTEIYQAGSTPCNGVEGFNCYFPLQSYGFQPTNGVGYQPYRVVVLSFELLHAPATVCGPKKSTNLVKNKCVNFNFNGLTGTGVLTESNKKFLPFQQFGRDIADTTDAVRDPQTLEILDITPCSFGGVSVITPGTNTSNQVAVLYQDVNCTEVPVAIHADQLTPTWRVYSTGSNVFQTRAGCLIGAEHVNNSYECDIPIGAGICASYQTQTNSPRRARSVASQSIIAYTMSLGAENSVAYSNNSIAICTNFTISVTTEILPVSMTKTSVDCTMYICGDSTECSNFLLQYGSFCTQLNRALTGIAVEQDKNTQEVFAQVKQIYKTPPIKDFGGFNFSQILPDPSKPSKRSFIEDLLFNKVTLADAGFIKQYGDCLGDIAARDLICAQKFNGLTVLPPLLTDEMIAQYTSALLAGTITSGWTFGAGAALQIPFAMQMAYRFNGIGVTQNVLYENQKLIANQFNSAIGKIQDSLSSTASALGKLQDVVNQNAQALNTLVKQLSSNFGAISSVLNDILSRLDKVEAEVQIDRLITGRLQSLQTYVTQQLIRAAEIRASANLAATKMSECVLGQSKRVDFCGKGYHLMSFPQSAPHGVVFLHVTYVCAQEKNFTTAPAICHDGKAHFPREGVFVSNGTHWFVTQRNFYEPQIITTDNTFVSGNCDVVIGIVNNTVYDPLQPELDSFKEELDKYFKNHTSPDVDLGDISGINASVVNIQKEIDRLNEVAKNLNESLIDLQELGKYEQYIKGGGGSDIIKLLNEQVNKEMQSSNLYMSMSSWCYTHSLDGAGLFLFDHAAEEYEHAKKLIIFLNENNVPVQLTSISAPEHKFEGLTQIFQKAYEHEQHISESINNIVDHAIKSKDHATFNFLQWYVAEQHEEEVLFKDILDKIELIGNENHGLYLADQYVKGIAKSRKS

SEQ ID NO: 5108 - protein, 1379 aa, Artificial Sequence
  SARS-CoV-2/Australia/QLD02/2020__EPI_ISL_407896 spike protein (1-1211)(P715C_P1069C) Ferritin construct
MFVFLVLLPLVSSQCVNLTTRTQLPPAYTNSFTRGVYYPDKVFRSSVLHSTQDLFLPFFSNVTWFHAIHVSGTNGTKRFDNPVLPFNDGVYFASTEKSNIIRGWIFGTTLDSKTQSLLIVNNATNVVIKVCEFQFCNDPFLGVYYHKNNKSWMESEFRVYSSANNCTFEYVSQPFLMDLEGKQGNFKNLREFVFKNIDGYFKIYSKHTPINLVRDLPQGFSALEPLVDLPIGINITRFQTLLALHRSYLTPGDSSSGWTAGAAAYYVGYLQPRTFLLKYNENGTITDAVDCALDPLSETKCTLKSFTVEKGIYQTSNFRVQPTESIVRFPNITNLCPFGEVFNATRFASVYAWNRKRISNCVADYSVLYNSASFSTFKCYGVSPTKLNDLCFTNVYADSFVIRGDEVRQIAPGQTGKIADYNYKLPDDFTGCVIAWNSNNLDSKVGGNYNYLYRLFRKSNLKPFERDISTEIYQAGSTPCNGVEGFNCYFPLQSYGFQPTNGVGYQPYRVVVLSFELLHAPATVCGPKKSTNLVKNKCVNFNFNGLTGTGVLTESNKKFLPFQQFGRDIADTTDAVRDPQTLEILDITPCSFGGVSVITPGTNTSNQVAVLYQDVNCTEVPVAIHADQLTPTWRVYSTGSNVFQTRAGCLIGAEHVNNSYECDIPIGAGICASYQTQTNSPRRARSVASQSIIAYTMSLGAENSVAYSNNSIAICTNFTISVTTEILPVSMTKTSVDCTMYICGDSTECSNLLLQYGSFCTQLNRALTGIAVEQDKNTQEVFAQVKQIYKTPPIKDFGGFNFSQILPDPSKPSKRSFIEDLLFNKVTLADAGFIKQYGDCLGDIAARDLICAQKFNGLTVLPPLLTDEMIAQYTSALLAGTITSGWTFGAGAALQIPFAMQMAYRFNGIGVTQNVLYENQKLIANQFNSAIGKIQDSLSSTASALGKLQDVVNQNAQALNTLVKQLSSNFGAISSVLNDILSRLDKVEAEVQIDRLITGRLQSLQTYVTQQLIRAAEIRASANLAATKMSECVLGQSKRVDFCGKGYHLMSFPQSAPHGVVFLHVTYVCAQEKNFTTAPAICHDGKAHFPREGVFVSNGTHWFVTQRNFYEPQIITTDNTFVSGNCDVVIGIVNNTVYDPLQLELDSFKEELDKYFKNHTSPDVDLGDISGINASVVNIQKEIDRLNEVAKNLNESLIDLQELGKYEQYIKGGGGSDIIKLLNEQVNKEMQSSNLYMSMSSWCYTHSLDGAGLFLFDHAAEEYEHAKKLIIFLNENNVPVQLTSISAPEHKFEGLTQIFQKAYEHEQHISESINNIVDHAIKSKDHATFNFLQWYVAEQHEEEVLFKDILDKIELIGNENHGLYLADQYVKGIAKSRKS

SEQ ID NO: 5109 - protein, 1379 aa, Artificial Sequence
  SARS-CoV-2/India/1-31/2020__EPI_ISL_413523 spike protein (1-1211)(P715C_P1069C) Ferritin construct
MFVFLVLLPLVSSQCVNLTTRTQLPPAYTNSFTRGVYYPDKVFRSSVLHSTQDLFLPFFSNVTWFHAIHVSGTNGTKRFDNPVLPFNDGVYFASTEKSNIIRGWIFGTTLDSKTQSLLIVNNATNVVIKVCEFQFCNDPFLGVYYHKNNKSWMESEFRVYSSANNCTFEYVSQPFLMDLEGKQGNFKNLREFVFKNIDGYFKIYSKHTPINLVRDLPQGFSALEPLVDLPIGINITRFQTLLALHRSYLTPGDSSSGWTAGAAAYYVGYLQPRTFLLKYNENGTITDAVDCALDPLSETKCTLKSFTVEKGIYQTSNFRVQPTESIVRFPNITNLCPFGEVFNATRFASVYAWNRKRISNCVADYSVLYNSASFSTFKCYGVSPTKLNDLCFTNVYADSFVIRGDEVRQIAPGQTGKIADYNYKLPDDFTGCVIAWNSNNLDSKVGGNYNYLYRLFRKSNLKPFERDISTEIYQAGSTPCNGVEGFNCYFPLQSYGFQPTNGVGYQPYRVVVLSFELLHAPATVCGPKKSTNLVKNKCVNFNFNGLTGTGVLTESNKKFLPFQQFGRDIADTTDAVRDPQTLEILDITPCSFGGVSVITPGTNTSNQVAVLYQDVNCTEVPVAIHADQLTPTWRVYSTGSNVFQTRAGCLIGAEHVNNSYECDIPIGAGICASYQTQTNSPRRARSVASQSIIAYTMSLGAENSVAYSNNSIAICTNFTISVTTEILPVSMTKTSVDCTMYICGDSTECSNLLLQYGSFCTQLNRALTGIAVEQDKNTQEVFAQVKQIYKTPPIKDFGGFNFSQILPDPSKPSKRSFIEDLLFNKVTLADAGFIKQYGDCLGDIAARDLICAQKFNGLTVLPPLLTDEMIAQYTSALLAGTITSGWTFGAGAALQIPFAMQMAYRFNGIGVTQNVLYENQKLIANQFNSVIGKIQDSLSSTASALGKLQDVVNQNAQALNTLVKQLSSNFGAISSVLNDILSRLDKVEAEVQIDRLITGRLQSLQTYVTQQLIRAAEIRASANLAATKMSECVLGQSKRVDFCGKGYHLMSFPQSAPHGVVFLHVTYVCAQEKNFTTAPAICHDGKAHFPREGVFVSNGTHWFVTQRNFYEPQIITTDNTFVSGNCDVVIGIVNNTVYDPLQPELDSFKEELDKYFKNHTSPDVDLGDISGINASVVNIQKEIDRLNEVAKNLNESLIDLQELGKYEQYIKGGGGSDIIKLLNEQVNKEMQSSNLYMSMSSWCYTHSLDGAGLFLFDHAAEEYEHAKKLIIFLNENNVPVQLTSISAPEHKFEGLTQIFQKAYEHEQHISESINNIVDHAIKSKDHATFNFLQWYVAEQHEEEVLFKDILDKIELIGNENHGLYLADQYVKGIAKSRKS

SEQ ID NO: 5110 - protein, 1379 aa, Artificial Sequence
  SARS-CoV-2/Guangdong/GD2020087-P0008/2020__EPI_ISL_413863 spike protein (1-1211)(P715C_P1069C) Ferritin construct
MFVFLVLLPLVSSQCVNLTTRTQLPPAYTNSFTRGVYYPDKVFRSSVLHSTQDLFLPFFSNVTWFHAIHVSGTNGTKRFDNPVLPFNDGVYFASTEKSNIIRGWIFGTTLDSKTQSLLIVNNATNVVIKVCEFQFCNDPFLGVYYHKNNKSWMESEFRVYSSANNCTFEYVSQPFLMDLEGKQGNFKNLREFVFKNIDGYFKIYSKHTPINLVRDLPQGFSALEPLVDLPIGINITRFQTLLALHRSYLTPGDSSSGWTAGAAAYYVGYLQPRTFLLKYNENGTITDAVDCALDPLSETKCTLKSFTVEKGIYQTSNFRVQPTESIVRFPNITNLCPFGEVFNATRFASVYAWNRKRISNCVADYSVLYNSASFSTFKCYGVSPTKLNDLCFTNVYADSFVIRGDEVREIAPGQTGKIADYNYKLPDDFTGCVIAWNSNNLDSKVGGNYNYLYRLFRKSNLKPFERDISTEIYQAGSTPCNGVEGFNCYFPLQSYGFQPTNGVGYQPYRVVVLSFELLHAPATVCGPKKSTNLVKNKCVNFNFNGLTGTGVLTESNKKFLPFQQFGRDIADTTDAVRDPQTLEILDITPCSFGGVSVITPGTNTSNQVAVLYQDVNCTEVPVAIHADQLTPTWRVYSTGSNVFQTRAGCLIGAEHVNNSYECDIPIGAGICASYQTQTNSPRRARSVASQSIIAYTMSLGAENSVAYSNNSIAICTNFTISVTTEILPVSMTKTSVDCTMYICGDSTECSNLLLQYGSFCTQLNRALTGIAVEQDKNTQEVFAQVKQIYKTPPIKDFGGFNFSQILPDPSKPSKRSFIEDLLFNKVTLADAGFIKQYGDCLGDIAARDLICAQKFNGLTVLPPLLTDEMIAQYTSALLAGTITSGWTFGAGAALQIPFAMQMAYRFNGIGVTQNVLYENQKLIANQFNSAIGKIQDSLSSTASALGKLQDVVNQNAQALNTLVKQLSSNFGAISSVLNDILSRLDKVEAEVQIDRLITGRLQSLQTYVTQQLIRAAEIRASANLAATKMSECVLGQSKRVDFCGKGYHLMSFPQSAPHGVVFLHVTYVCAQEKNFTTAPAICHDGKAHFPREGVFVSNGTHWFVTQRNFYEPQIITTDNTFVSGNCDVVIGIVNNTVYDPLQPELDSFKEELDKYFKNHTSPDVDLGDISGINASVVNIQKEIDRLNEVAKNLNESLIDLQELGKYEQYIKGGGGSDIIKLLNEQVNKEMQSSNLYMSMSSWCYTHSLDGAGLFLFDHAAEEYEHAKKLIIFLNENNVPVQLTSISAPEHKFEGLTQIFQKAYEHEQHISESINNIVDHAIKSKDHATFNFLQWYVAEQHEEEVLFKDILDKIELIGNENHGLYLADQYVKGIAKSRKS

SEQ ID NO: 5111 - protein, 1379 aa, Artificial Sequence
  SARS-CoV-2/Sweden/01/2020__EPI_ISL_411951 spike protein (1-1211)(P715C_P1069C) Ferritin construct
MFVFLVLLPLVSSQCVNLTTRTQLPPAYTNSFTRGVYYPDKVFRSSVLHSTQDLFLPFFSNVTWFHAIHVSGTNGTKRFDNPVLPFNDGVYFASTEKSNIIRGWIFGTTLDSKTQSLLIVNNATNVVIKVCEFQFCNDPFLGVYYHKNNKSWMESEFRVYSSANNCTFEYVSQPFLMDLEGKQGNFKNLREFVFKNIDGYFKIYSKHTPINLVRDLPQGFSALEPLVDLPIGINITRFQTLLALHRSYLTPGDSSSGWTAGAAAYYVGYLQPRTFLLKYNENGTITDAVDCALDPLSETKCTLKSFTVEKGIYQTSNFRVQPTESIVRFPNITNLCPFGEVFNATRFASVYAWNRKRISNCVADYSVLYNSASFSTFKCYGVSPTKLNDLCFTNVYADSFVIRGDEVRQIAPGQTGKIADYNYKLPDDFTGCVIAWNSNNLDSKVGGNYNYLYRLFRKSNLKPFERDISTEIYQAGSTPCNGVEGFNCYFPLQSYGFQPTNGVGYQPYRVVVLSFELLHAPATVCGPKKSTNLVKNKCVNFNFNGLTGTGVLTESNKKFLPFQQFGRDIADTTDAVRDPQTLEILDITPCSFGGVSVITPGTNTSNQVAVLYQDVNCTEVPVAIHADQLTPTWRVYSTGSNVFQTRAGCLIGAEHVNNSYECDIPIGAGICASYQTQTNSPRRARSVASQSIIAYTMSLGAENSVAYSNNSIAICTNFTISVTTEILPVSMTKTSVDCTMYICGDSTECSNLLLQYGSFCTQLNRALTGIAVEQDKNTQEVFAQVKQIYKTPPIKDCGGFNFSQILPDPSKPSKRSFIEDLLFNKVTLADAGFIKQYGDCLGDIAARDLICAQKFNGLTVLPPLLTDEMIAQYTSALLAGTITSGWTFGAGAALQIPFAMQMAYRFNGIGVTQNVLYENQKLIANQFNSAIGKIQDSLSSTASALGKLQDVVNQNAQALNTLVKQLSSNFGAISSVLNDILSRLDKVEAEVQIDRLITGRLQSLQTYVTQQLIRAAEIRASANLAATKMSECVLGQSKRVDFCGKGYHLMSFPQSAPHGVVFLHVTYVCAQEKNFTTAPAICHDGKAHFPREGVFVSNGTHWFVTQRNFYEPQIITTDNTFVSGNCDVVIGIVNNTVYDPLQPELDSFKEELDKYFKNHTSPDVDLGDISGINASVVNIQKEIDRLNEVAKNLNESLIDLQELGKYEQYIKGGGGSDIIKLLNEQVNKEMQSSNLYMSMSSWCYTHSLDGAGLFLFDHAAEEYEHAKKLIIFLNENNVPVQLTSISAPEHKFEGLTQIFQKAYEHEQHISESINNIVDHAIKSKDHATFNFLQWYVAEQHEEEVLFKDILDKIELIGNENHGLYLADQYVKGIAKSRKS

SEQ ID NO: 5112 - protein, 1379 aa, Artificial Sequence
  SARS-CoV-2/Tianmen/HBCDC-HB-07/2020__EPI_ISL_412983 spike protein (1-1211)(P715C_P1069C) Ferritin construct
MFVFLVLLPLVSSQCVNLTTRTQLPPAYTNSFTRGVYYPDKVFRSSVLHSTQDLFLPFFSNVTWFHAIHVSGTNGTKRFDNPVLPFNDGVYFASTEKSNIIRGWIFGTTLDSKTQSLLIVNNATNVVIKVCEFQFCNDPFLGVYYHKNNKSWMESEFRVYSSANNCTFEYVSQPFLMDLEGKQGNFKNLREFVFKNIDGYFKIYSKHTPINLVRDLPQGFSALEPLVDLPIGINITRFQTLLALHRSYLTPGDSSSGWTAGAAAYYVGYLQPRTFLLKYNENGTITDAVDCALDPLSETKCTLKSFTVEKGIYQTSNFRVQPTESIVRFPNITNLCPFGEVFNATRFASVYAWNRKRISNCVADYSVLYNSASFSTFKCYGVSPTKLNDLCFTNVYADSFVIRGDEVRQIAPGQTGKIADYNYKLPDDFTGCVIAWNSNNLDSKVGGNYNYLYRLFRKSNLKPFERDISTEIYQAGSTPCNGVEGFNCYFPLQSYGFQPTNGVGYQPYRVVVLSFELLHAPATVCGPKKSTNLVKNKCVNFNFNGLTGTGVLTESNKKFLPFQQFGRDIADTTDAVRDPQTLEILDITPCSFGGVSVITPGTNTSNQVAVLYQDLNCTEVPVAIHADQLTPTWRVYSTGSNVFQTRAGCLIGAEHVNNSYECDIPIGAGICASYQTQTNSPRRARSVASQSIIAYTMSLGAENSVAYSNNSIAICTNFTISVTTEILPVSMTKTSVDCTMYICGDSTECSNLLLQYGSFCTQLNRALTGIAVEQDKNTQEVFAQVKQIYKTPPIKDFGGFNFSQILPDPSKPSKRSFIEDLLFNKVTLADAGFIKQYGDCLGDIAARDLICAQKFNGLTVLPPLLTDEMIAQYTSALLAGTITSGWTFGAGAALQIPFAMQMAYRFNGIGVTQNVLYENQKLIANQFNSAIGKIQDSLSSTASALGKLQDVVNQNAQALNTLVKQLSSNFGAISSVLNDILSRLDKVEAEVQIDRLITGRLQSLQTYVTQQLIRAAEIRASANLAATKMSECVLGQSKRVDFCGKGYHLMSFPQSAPHGVVFLHVTYVCAQEKNFTTAPAICHDGKAHFPREGVFVSNGTHWFVTQRNFYEPQIITTDNTFVSGNCDVVIGIVNNTVYDPLQPELDSFKEELDKYFKNHTSPDVDLGDISGINASVVNIQKEIDRLNEVAKNLNESLIDLQELGKYEQYIKGGGGSDIIKLLNEQVNKEMQSSNLYMSMSSWCYTHSLDGAGLFLFDHAAEEYEHAKKLIIFLNENNVPVQLTSISAPEHKFEGLTQIFQKAYEHEQHISESINNIVDHAIKSKDHATFNFLQWYVAEQHEEEVLFKDILDKIELIGNENHGLYLADQYVKGIAKSRKS

SEQ ID NO: 5113 - protein, 1379 aa, Artificial Sequence
  SARS-CoV-2/Hong Kong/case42_VM20002493/2020__EPI_ISL_414527 spike protein (1-1211)(P715C_P1069C) Ferritin construct
MFVFLVLLPLVSSQCVNLTTRTQLPPAYTNSFTRGVYYPDKVFRSSVLHSTQDLFLPFFSNVTWFHAIHVSGTNGTKRFDNPVLPFNDGVYFASTEKSNIIRGWIFGTTLDSKTQSLLIVNNATNVVIKVCEFQFCNDPFLGVYYHKNNKSWMESEFRVYSSANNCTFEYVSQPFLMDLEGKQGNFKNLREFVFKNIDGYFKIYSKHTPINLVRDLPQGFSALEPLVDLPIGINITRFQTLLALHRSYLTPGDSSSGWTAGAAAYYVGYLQPRTFLLKYNENGTITDAVDCALDPLSETKCTLKSFTVEKGIYQTSNFRVQPTESIVRFPNITNLCPFGEVFNATRFASVYAWNRKRISNCVADYSVLYNSASFSTFKCYGVSPTKLNDLCFTNVYADSFVIRGDEVRQIAPGQTGKIADYNYKLPDDFTGCVIAWNSNNLDSKVGGNYNYLYRLFRKSNLKPFERDISTEIYQAGSTPCNGVEGFNCYFPLQSYGFQPTNGVGYQPYRVVVLSFELLHAPATVCGPKKSTNLVKNKCVNFNFNGLTGTGVLTESNKKFLPFQQFGRDIADTTDAVRDPQTLEILDITPCSFGGVSVITPGTNTSNQVAVLYQDVNCTEVPVAIHADQLTPTWRVYSTGSNVFQTRAGCLIGAEHVNNSYECDIPIGAGICASYQTQTNSPRRARSVASQSIIAYTMSLGAENSVAYSNNSIAICTNFAISVTTEILPVSMTKTSVDCTMYICGDSTECSNLLLQYGSFCTQLNRALTGIAVEQDKNTQEVFAQVKQIYKTPPIKDFGGFNFSQILPDPSKPSKRSFIEDLLFNKVTLADAGFIKQYGDCLGDIAARDLICAQKFNGLTVLPPLLTDEMIAQYTSALLAGTITSGWTFGAGAALQIPFAMQMAYRFNGIGVTQNVLYENQKLIANQFNSAIGKIQDSLSSTASALGKLQDVVNQNAQALNTLVKQLSSNFGAISSVLNDILSRLDKVEAEVQIDRLITGRLQSLQTYVTQQLIRAAEIRASANLAATKMSECVLGQSKRVDFCGKGYHLMSFPQSAPHGVVFLHVTYVCAQEKNFTTAPAICHDGKAHFPREGVFVSNGTHWFVTQRNFYEPQIITTDNTFVSGNCDVVIGIVNNTVYDPLQPELDSFKEELDKYFKNHTSPDVDLGDISGINASVVNIQKEIDRLNEVAKNLNESLIDLQELGKYEQYIKGGGGSDIIKLLNEQVNKEMQSSNLYMSMSSWCYTHSLDGAGLFLFDHAAEEYEHAKKLIIFLNENNVPVQLTSISAPEHKFEGLTQIFQKAYEHEQHISESINNIVDHAIKSKDHATFNFLQWYVAEQHEEEVLFKDILDKIELIGNENHGLYLADQYVKGIAKSRKS

SEQ ID NO: 5114 - protein, 1379 aa, Artificial Sequence
  SARS-CoV-2/USA/CruiseA-23/2020__EPI_ISL_414482 spike protein (1-1211)(P715C_P1069C) Ferritin construct
MFVFLVLLPLVSSQCVNLTTRTQLPPAYTNSFTRGVYYPDKVFRSSVLHSTQDLFLPFFSNVTWFHAIHVSGTNGTKRFDNPVLPFNDGVYFASTEKSNIIRGWIFGTTLDSKTQSLLIVNNATNVVIKVCEFQFCNDPFLGVYYHKNNKSWMESEFRVYSSANNCTFEYVSQPFLMDLEVKQGNFKNLREFVFKNIDGYFKIYSKHTPINLVRDLPQGFSALEPLVDLPIGINITRFQTLLALHRSYLTPGDSSSGWTAGAAAYYVGYLQPRTFLLKYNENGTITDAVDCALDPLSETKCTLKSFTVEKGIYQTSNFRVQPTESIVRFPNITNLCPFGEVFNATRFASVYAWNRKRISNCVADYSVLYNSASFSTFKCYGVSPTKLNDLCFTNVYADSFVIRGDEVRQIAPGQTGKIADYNYKLPDDFTGCVIAWNSNNLDSKVGGNYNYLYRLFRKSNLKPFERDISTEIYQAGSTPCNGVEGFNCYFPLQSYGFQPTNGVGYQPYRVVVLSFELLHAPATVCGPKKSTNLVKNKCVNFNFNGLTGTGVLTESNKKFLPFQQFGRDIADTTDAVRDPQTLEILDITPCSFGGVSVITPGTNTSNQVAVLYQDVNCTEVPVAIHADQLTPTWRVYSTGSNVFQTRAGCLIGAEHVNNSYECDIPIGAGICASYQTQTNSPRRARSVASQSIIAYTMSLGAENSVAYSNNSIAICTNFTISVTTEILPVSMTKTSVDCTMYICGDSTECSNLLLQYGSFCTQLNRALTGIAVEQDKNTQEVFAQVKQIYKTPPIKDFGGFNFSQILPDPSKPSKRSFIEDLLFNKVTLADAGFIKQYGDCLGDIAARDLICAQKFNGLTVLPPLLTDEMIAQYTSALLAGTITSGWTFGAGAALQIPFAMQMAYRFNGIGVTQNVLYENQKLIANQFNSAIGKIQDSLSSTASALGKLQDVVNQNAQALNTLVKQLSSNFGAISSVLNDILSRLDKVEAEVQIDRLITGRLQSLQTYVTQQLIRAAEIRASANLAATKMSECVLGQSKRVDFCGKGYHLMSFPQSAPHGVVFLHVTYVCAQEKNFTTAPAICHDGKAHFPREGVFVSNGTHWFVTQRNFYEPQIITTDNTFVSGNCDVVIGIVNNTVYDPLQPELDSFKEELDKYFKNHTSPDVDLGDISGINASVVNIQKEIDRLNEVAKNLNESLIDLQELGKYEQYIKGGGGSDIIKLLNEQVNKEMQSSNLYMSMSSWCYTHSLDGAGLFLFDHAAEEYEHAKKLIIFLNENNVPVQLTSISAPEHKFEGLTQIFQKAYEHEQHISESINNIVDHAIKSKDHATFNFLQWYVAEQHEEEVLFKDILDKIELIGNENHGLYLADQYVKGIAKSRKS

SEQ ID NO: 5115 - protein, 1379 aa, Artificial Sequence
  SARS-CoV-2/Hong Kong/case85_VM20002868/2020__EPI_ISL_414519 spike protein (1-1211)(P715C_P1069C) Ferritin construct
MFVFLVLVPLVSSQCVNLTTRTQLPPAYTNSFTRGVYYPDKVFRSSVLHSTQDLFLPFFSNVTWFHAIHVSGTNGTKRFDNPVLPFNDGVYFASTEKSNIIRGWIFGTTLDSKTQSLLIVNNATNVVIKVCEFQFCNDPFLGVYYHKNNKSWMESEFRVYSSANNCTFEYVSQPFLMDLEGKQGNFKNLREFVFKNIDGYFKIYSKHTPINLVRDLPQGFSALEPLVDLPIGINITRFQTLLALHRSYLTPGDSSSGWTAGAAAYYVGYLQPRTFLLKYNENGTITDAVDCALDPLSETKCTLKSFTVEKGIYQTSNFRVQPTESIVRFPNITNLCPFGEVFNATRFASVYAWNRKRISNCVADYSVLYNSASFSTFKCYGVSPTKLNDLCFTNVYADSFVIRGDEVRQIAPGQTGKIADYNYKLPDDFTGCVIAWNSNNLDSKVGGNYNYLYRLFRKSNLKPFERDISTEIYQAGSTPCNGVEGFNCYFPLQSYGFQPTNGVGYQPYRVVVLSFELLHAPATVCGPKKSTNLVKNKCVNFNFNGLTGTGVLTESNKKFLPFQQFGRDIADTTDAVRDPQTLEILDITPCSFGGVSVITPGTNTSNQVAVLYQDVNCTEVPVAIHADQLTPTWRVYSTGSNVFQTRAGCLIGAEHVNNSYECDIPIGAGICASYQTQTNSPRRARSVASQSIIAYTMSLGAENSVAYSNNSIAICTNFTISVTTEILPVSMTKTSVDCTMYICGDSTECSNLLLQYGSFCTQLNRALTGIAVEQDKNTQEVFAQVKQIYKTPPIKDFGGFNFSQILPDPSKPSKRSFIEDLLFNKVTLADAGFIKQYGDCLGDIAARDLICAQKFNGLTVLPPLLTDEMIAQYTSALLAGTITSGWTFGAGAALQIPFAMQMAYRFNGIGVTQNVLYENQKLIANQFNSAIGKIQDSLSSTASALGKLQDVVNQNAQALNTLVKQLSSNFGAISSVLNDILSRLDKVEAEVQIDRLITGRLQSLQTYVTQQLIRAAEIRASANLAATKMSECVLGQSKRVDFCGKGYHLMSFPQSAPHGVVFLHVTYVCAQEKNFTTAPAICHDGKAHFPREGVFVSNGTHWFVTQRNFYEPQIITTDNTFVSGNCDVVIGIVNNTVYDPLQPELDSFKEELDKYFKNHTSPDVDLGDISGINASVVNIQKEIDRLNEVAKNLNESLIDLQELGKYEQYIKGGGGSDIIKLLNEQVNKEMQSSNLYMSMSSWCYTHSLDGAGLFLFDHAAEEYEHAKKLIIFLNENNVPVQLTSISAPEHKFEGLTQIFQKAYEHEQHISESINNIVDHAIKSKDHATFNFLQWYVAEQHEEEVLFKDILDKIELIGNENHGLYLADQYVKGIAKSRKS

SEQ ID NO: 5116 - protein, 1379 aa, Artificial Sequence; identical to SEQ ID NO: 5106
  SARS-CoV-2/England/200990660/2020__EPI_ISL_414523 spike protein (1-1211)(P715C_P1069C) Ferritin construct

SEQ ID NO: 5117 - protein, 1379 aa, Artificial Sequence
  SARS-CoV-2/Australia/NSW09/2020__EPI_ISL_413595 spike protein (1-1211)(P715C_P1069C) Ferritin construct
MFVFLVLLPLVSSQCVNLTTRTQLPPAYTNSFTRGVYYPDKVFRSSVLHSTQDLFLPFFSNVTWFHAIHVSGTNGTKRFDNPVLPFNDGVYFASTEKSNIIRGWIFGTTLDSKTQSLLIVNNATNVVIKVCEFQFCNDPFLGVYYHKNNKSWMESEFRVYSSANNCTFEYVSQPFLMDLEGKQGNFKNLREFVFKNIDGYFKIYSKHTPINLVRDLPQGFSALEPLVDLPIGINITRFQTLLALHRSYLTPGDSSSGWTAGAAAYYVGYLQPRTFLLKYNENGTITDAVDCALDPLSETKCTLKSFTVEKGIYQTSNFRVQPTESIVRFPNITNLCPFGEVFNATRFASVYAWNRKRISNCVADYSVLYNSASFSTFKCYGVSPTKLNDLCFTNVYADSFVIRGDEVRQIAPGQTGKIADYNYKLPDDFTGCVIAWNSNNLDSKVGGNYNYLYRLFRKSNLKPFERDISTEIYQAGSTPCNGVEGFNCYFPLQSYGFQPTNGVGYQPYRVVVLSFELLHAPATVCGPKKSTNLVKNKCVNFNFNGLTGTGVLTESNKKFLPFQQFGRDIADTTDAVRDPQTLEILDITPCSFGGVSVITPGTNTSNQVAVLYQDVNCTEVPVAIHADQLTPTWRVYSTGSNVFQTRAGCLIGAEHVNNSYECDIPIGAGICASYQTQTNSPRRARSVASQSIIAYTMSLGAENSVAYSNNSIAICTNFTISVTTEILPVSMTKTSVDCTMYICGDSTECSNLLLQYGSFCTQLNRALTGIAVEQDKNTQEVFAQVKQIYKTPPIKDFGGFNFSQILPDPSKPSKRSFIEDLLFNKVTLADAGFIKQYGDCLGDIAARDLICAQKFNGLTVLPPLLTDEMIAQYTSALLAGTITSGWTFGAGAALQIPFAMQMAYRFNGIGVTQNVLYENQKLIANQFNSAIGKIQDSLSFTASALGKLQDVVNQNAQALNTLVKQLSSNFGAISSVLNDILSRLDKVEAEVQIDRLITGRLQSLQTYVTQQLIRAAEIRASANLAATKMSECVLGQSKRVDFCGKGYHLMSFPQSAPHGVVFLHVTYVCAQEKNFTTAPAICHDGKAHFPREGVFVSNGTHWFVTQRNFYEPQIITTDNTFVSGNCDVVIGIVNNTVYDPLQPELDSFKEELDKYFKNHTSPDVDLGDISGINASVVNIQKEIDRLNEVAKNLNESLIDLQELGKYEQYIKGGGGSDIIKLLNEQVNKEMQSSNLYMSMSSWCYTHSLDGAGLFLFDHAAEEYEHAKKLIIFLNENNVPVQLTSISAPEHKFEGLTQIFQKAYEHEQHISESINNIVDHAIKSKDHATFNFLQWYVAEQHEEEVLFKDILDKIELIGNENHGLYLADQYVKGIAKSRKS

SEQ ID NO: 5118 - protein, 1379 aa, Artificial Sequence; identical to SEQ ID NO: 5098
  SARS-CoV-2/Australia/NSW10/2020__EPI_ISL_413596 spike protein (1-1211)(P715C_P1069C) Ferritin construct

SEQ ID NO: 5119 - protein, 1379 aa, Artificial Sequence
  SARS-CoV-2/Switzerland/1000477797/2020__EPI_ISL_413023 spike protein (1-1211)(P715C_P1069C) Ferritin construct
MFVFLVLLPLVSSQCVNLTTRTQLPPAYTNSFTRGVYYPDKVFRSSVLHSTQDLFLPFFSNVTWFHAIHVSGTNGTKRFDNPVLPFNDGVYFASTEKSNIIRGWIFGTTLDSKTQSLLIVNNATNVVIKVCEFQFCNDPFLGVYYHKNNKSWMESEFRVYSSANNCTFEYVSQPFLMDLEGKQGNFKNLREFVFKNIDGYFNIYSKHTPINLVRDLPQGFSALEPLVDLPIGINITRFQTLLALHRSYLTPGDSSSGWTAGAAAYYVGYLQPRTFLLKYNENGTITDAVDCALDPLSETKCTLKSFTVEKGIYQTSNFRVQPTESIVRFPNITNLCPFGEVFNATRFASVYAWNRKRISNCVADYSVLYNSASFSTFKCYGVSPTKLNDLCFTNVYADSFVIRGDEVRQIAPGQTGKIADYNYKLPDDFTGCVIAWNSNNLDSKVGGNYNYLYRLFRKSNLKPFERDISTEIYQAGSTPCNGVEGFNCYFPLQSYGFQPTNGVGYQPYRVVVLSFELLHAPATVCGPKKSTNLVKNKCVNFNFNGLTGTGVLTESNKKFLPFQQFGRDIADTTDAVRDPQTLEILDITPCSFGGVSVITPGTNTSNQVAVLYQGVNCTEVPVAIHADQLTPTWRVYSTGSNVFQTRAGCLIGAEHVNNSYECDIPIGAGICASYQTQTNSPRRARSVASQSIIAYTMSLGAENSVAYSNNSIAICTNFTISVTTEILPVSMTKTSVDCTMYICGDSTECSNLLLQYGSFCTQLNRALTGIAVEQDKNTQEVFAQVKQIYKTPPIKDFGGFNFSQILPDPSKPSKRSFIEDLLFNKVTLADAGFIKQYGDCLGDIAARDLICAQKFNGLTVLPPLLTDEMIAQYTSALLAGTITSGWTFGAGAALQIPFAMQMAYRFNGIGVTQNVLYENQKLIANQFNSAIGKIQDSLSSTASALGKLQDVVNQNAQALNTLVKQLSSNFGAISSVLNDILSRLDKVEAEVQIDRLITGRLQSLQTYVTQQLIRAAEIRASANLAATKMSECVLGQSKRVDFCGKGYHLMSFPQSAPHGVVFLHVTYVCAQEKNFTTAPAICHDGKAHFPREGVFVSNGTHWFVTQRNFYEPQIITTDNTFVSGNCDVVIGIVNNTVYDPLQPELDSFKEELDKYFKNHTSPDVDLGDISGINASVVNIQKEIDRLNEVAKNLNESLIDLQELGKYEQYIKGGGGSDIIKLLNEQVNKEMQSSNLYMSMSSWCYTHSLDGAGLFLFDHAAEEYEHAKKLIIFLNENNVPVQLTSISAPEHKFEGLTQIFQKAYEHEQHISESINNIVDHAIKSKDHATFNFLQWYVAEQHEEEVLFKDILDKIELIGNENHGLYLADQYVKGIAKSRKS

SEQ ID NO: 5120 - protein, 1379 aa, Artificial Sequence
  SARS-CoV-2/Belgium/BA-02291/2020__EPI_ISL_415159 spike protein (1-1211)(P715C_P1069C) Ferritin construct
MFVFLVLLPLVSSQCVNLTTRTQLPPAYTNSFTRGVYYPDKVFRSSVLHSTQDLFLPFFSNVTWFHAIHVSGTNGTKRFDNPVLPFNDGVYFASTEKSNIIRGWIFGTTLDSKTQSLLIVNNATNVVIKVCEFQFCNDPFLGVYYHKNNKSWMESEFRVYSSANNCTFEYVSQPFLMDLEGKQGNFKNLREFVFKNIDGYFKIYSKHTPINLVRDLPQGFSALEPLVDLPIGINITRFQTLLALHRSYLTPGDSSSGWTAGAAAYYVGYLQPRTFLLKYNENGTITDAVDCALDPLSETKCTLKSFTVEKGIYQTSNFRVQPTESIVRFPNITNLCPFGEVFNATRFASVYAWNRKRISNCVADYSVLYNSASFSTFKCYGVSPTKLNDLCFTNVYADSFVIRGDEVRQIAPGQTGKIADYNYKLPDDFTGCVIAWNSNNLDSKVGGNYNYLYRLFRRSNLKPFERDISTEIYQAGSTPCNGVEGFNCYFPLQSYGFQPTNGVGYQPYRVVVLSFELLPAPATVCGPKKSTNLVKNKCVNFNFNGLTGTGVLTESNKKFLPFQQFGRDIADTTDAVRDPQTLEILDITPCSFGGVSVITPGTNTSNQVAVLYQGVNCTEVPVAIHADQLTPTWRVYSTGSNVFQTRAGCLIGAEHVNNSYECDIPIGAGICASYQTQTNSPRRARSVASQSIIAYTMSLGAENSVAYSNNSIAICTNFTISVTTEILPVSMTKTSVDCTMYICGDSTECSNLLLQYGSFCTQLNRALTGIAVEQDKNTQEVFAQVKQIYKTPPIKDFGGFNFSQILPDPSKPSKRSFIEDLLFNKVTLADAGFIKQYGDCLGDIAARDLICAQKFNGLTVLPPLLTDEMIAQYTSALLAGTITSGWTFGAGAALQIPFAMQMAYRFNGIGVTQNVLYENQKLIANQFNSAIGKIQDSLSSAAPALGKLQDVVNQNAQALNTLVKQLSSNFGAISSVLNDILSRLDKVEAEVQIDRLITGRLQSLQTYVTQQLIRAAEIRASANLAATKMSECVLGQSKRVDFCGKGYHLMSFPQSAPHGVVFLHVTYVCAQEKNFTTAPAICHDGKAHFPREGVFVSNGTHWFVTQRNFYEPQIITTDNTFVSGNCDVVIGIVNNTVYDPLQPELDSFKEELDKYFKNHTSPDVDLGDISGINASVVNIQKEIDRLNEVAKNLNESLIDLQELGKYEQYIKGGGGSDIIKLLNEQVNKEMQSSNLYMSMSSWCYTHSLDGAGLFLFDHAAEEYEHAKKLIIFLNENNVPVQLTSISAPEHKFEGLTQIFQKAYEHEQHISESINNIVDHAIKSKDHATFNFLQWYVAEQHEEEVLFKDILDKIELIGNENHGLYLADQYVKGIAKSRKS

SEQ ID NO: 5121 - protein, 1379 aa, Artificial Sequence
  SARS-CoV-2/USA/WA8-UW5/2020__EPI_ISL_413486 spike protein (1-1211)(P715C_P1069C) Ferritin construct
MFVFLVLLPLVSSQCVNLTTRTQLPPAYTNSFTRGVYYPDKVFRSSVLHSTQDLFLPFFSNVTWFHAIHVSGTNGTKRFDNPVLPFNDGVYFASTEKSNIIRGWIFGTTLDSKTQSLLIVNNATNVVIKVCEFQFCNDPFLGVYYHKNNKSWMESEFRVYSSANNCTFEYVSQPFLMDLEGKQGNFKNLREFVFKNIDGYFKIYSKHTPINLVRDLPQGFSALEPLVDLPIGINITRFQTLLALHRSYLTPGDSSSGWTAGAAAYYVGYLQPRTFLLKYNENGTITDAVDCALDPLSETKCTLKSFTVEKGIYQTSNFRVQPTESIVRFPNITNLCPFGEVFNATRFASVYAWNRKRISNCVADYSVLYNSASFSTFKCYGVSPTKLNDLCFTNVYADSFVIRGDEVRQIAPGQTGKIADYNYKLPDDFTGCVIAWNSNNLDSKVGGNYNYLYRLFRKSNLKPFERDISTEIYQAGSTPCNGVEGFNCYFPLQSYGFQPTNGVGYQPYRVVVLSFELLHAPATVCGPKKSTNLVKNKCVNFNFNGLTGTGVLTESNKKFLPFQQFGRDIADTTDAVRDPQTLEILDITPCSFGGVSVITPGTNTSNQVAVLYQDVNCTEVPVAIHADQLTPTWRVYSTGSNVFQTRAGCLIGAEYVNNSYECDIPIGAGICASYQTQTNSPRRARSVASQSIIAYTMSLGAENSVAYSNNSIAICTNFTISVTTEILPVSMTKTSVDCTMYICGDSTECSNLLLQYGSFCTQLNRALTGIAVEQDKNTQEVFAQVKQIYKTPPIKDFGGFNFSQILPDPSKPSKRSFIEDLLFNKVTLADAGFIKQYGDCLGDIAARDLICAQKFNGLTVLPPLLTDEMIAQYTSALLAGTITSGWTFGAGAALQIPFAMQMAYRFNGIGVTQNVLYENQKLIANQFNSAIGKIQDSLSSTASALGKLQDVVNQNAQALNTLVKQLSSNFGAISSVLNDILSRLDKVEAEVQIDRLITGRLQSLQTYVTQQLIRAAEIRASANLAATKMSECVLGQSKRVDFCGKGYHLMSFPQSAPHGVVFLHVTYVCAQEKNFTTAPAICHDGKAHFPREGVFVSNGTHWFVTQRNFYEPQIITTDNTFVSGNCDVVIGIVNNTVYDPLQPELDSFKEELDKYFKNHTSPDVDLGDISGINASVVNIQKEIDRLNEVAKNLNESLIDLQELGKYEQYIKGGGGSDIIKLLNEQVNKEMQSSNLYMSMSSWCYTHSLDGAGLFLFDHAAEEYEHAKKLIIFLNENNVPVQLTSISAPEHKFEGLTQIFQKAYEHEQHISESINNIVDHAIKSKDHATFNFLQWYVAEQHEEEVLFKDILDKIELIGNENHGLYLADQYVKGIAKSRKS

SEQ ID NO: 5122 - protein, 1379 aa, Artificial Sequence
  SARS-CoV-2/England/20102000506/2020__EPI_ISL_415147 spike protein (1-1211)(P715C_P1069C) Ferritin construct
MFVFLVLLPLVSSQCVNLTTRTQLPPAYTNSFTRGVYYPDKVFRSSVLHSTQDLFLPFFSNVTWFHAIHVSGTNGTKRFDNPVLPFNDGVYFASTEKSNIIRGWIFGTTLDSKTQSLLIVNNATNVVIKVCEFQFCNDPFLGVYYHKNNKSWMESEFRVYSSANNCTFEYVSQPFLMDLEGKQGNFKNLREFVFKNIDGYFKIYSKHTPINLVRDLPQGFSALEPLVDLPIGINITRFQTLLALHRSYLTPGDSSSGWTAGAAAYYVGYLQPRTFLLKYNENGTITDAVDCALDPLSETKCTLKSFTVEKGIYQTSNFRVQPTESIVRFPNITNLCPFGEVFNATRFASVYAWNRKRISNCVADYSVLYNSASFSTFKCYGVSPTKLNDLCFTNVYADSFVIRGDEVRQIAPGQTGKIADYNYKLPDDFTGCVIAWNSNNLDSKVGGNYNYLYRLFRKSNLKPFERDISTEIYQAGSTPCNGVEGFNCYFPLQSYGFQPTNGVGYQPYRVVVLSFELLHAPATVCGPKKSTNLVKNKCVNFNFNGLTGTGVLTESNKKFLPFQQFGRDIADTTDAVRDPQTLEILDITPCSFGGVSVITPGTNTSNQVAVLYQGVNCTEVPVAIHADQLTPTWRVYSTGSNVFQTRAGCLIGAEHVNNSYECDIPIGAGICASYQTQTNSPRRARSVASQSIIAYTMSLGAENSVAYSNNSIAICTNFTISVTTEILPVSMTKTSVDCTMYICGDSTECSNLLLQYGSFCTQLNRALTGIAVEQDKNTQEVFAQVKQIYKTPPIKDFGGFNFSQILPDPSKPSKRSFIEDLLFNKVTLADAGFIKQYGYCLGDIAARDLICAQKFNGLTVLPPLLTDEMIAQYTSALLAGTITSGWTFGAGAALQIPFAMQMAYRFNGIGVTQNVLYENQKLIANQFNSAIGKIQDSLSSTASALGKLQDVVNQNAQALNTLVKQLSSNFGAISSVLNDILSRLDKVEAEVQIDRLITGRLQSLQTYVTQQLIRAAEIRASANLAATKMSECVLGQSKRVDFCGKGYHLMSFPQSAPHGVVFLHVTYVCAQEKNFTTAPAICHDGKAHFPREGVFVSNGTHWFVTQRNFYEPQIITTDNTFVSGNCDVVIGIVNNTVYDPLQPELDSFKEELDKYFKNHTSPDVDLGDISGINASVVNIQKEIDRLNEVAKNLNESLIDLQELGKYEQYIKGGGGSDIIKLLNEQVNKEMQSSNLYMSMSSWCYTHSLDGAGLFLFDHAAEEYEHAKKLIIFLNENNVPVQLTSISAPEHKFEGLTQIFQKAYEHEQHISESINNIVDHAIKSKDHATFNFLQWYVAEQHEEEVLFKDILDKIELIGNENHGLYLADQYVKGIAKSRKS

SEQ ID NO: 5123 - protein, 1379 aa, Artificial Sequence
  SARS-CoV-2/Belgium/VAG-03013/2020__EPI_ISL_415155 spike protein (1-1211)(P715C_P1069C) Ferritin construct
MFVFLVLLPLVSSQCVNLTTRTQLPPAYTNSFTRGVYYPDKVFRSSVLHSTQDLFLPFFSNVTWFHAIHVSGTNGTKRFDNPVLPFNDGVYFASTEKSNIIRGWIFGTTLDSKTQSLLIVNNATNVVIKVCEFQFCNDPFLGVYYHKNNKSWMESEFRVYSSANNCTFEYVSQPFLMDLEGKQGNFKNLREFVFKNIDGYFKIYSKHTPINLVRDLPQGFSALEPLVDLPIGINITRFQTLLALHRSYLTPGDSSSGWTAGAAAYYVGYLQPRTFLLKYNENGTITDAVDCALDPLSETKCTLKSFTVEKGIYQTSNFRVQPTESIVRFPNITNLCPFGEVFNATRFASVYAWNRKRISNCVADYSVLYNSASFSTFKCYGVSPTKLNDLCFTNVYADSFVIRGDEVRQIAPGQTGKIADYNYKLPDDFTGCVIAWNSNNLDSKVGGNYNYLYRLFRKSNLKPFERDISTEIYQAGSTPCNGVEGFNCYFPLQSYGFQPTNGVGYQPYRVVVLSFELLHAPATVCGPKKSTNLVKNKCVNFNFNGLTGTGVLTESNKKFLPFQQFGRDIADTTDAVRDPQTLEILDITPCSFGGVSVITPGTNTSNQVAVLYQGVNCTEVPVAIHADQLTPTWRVYSTGSNVFQTRAGCLIGAEHVNNSYECDIPIGAGICASYQTQTNSPRRARSVASQSIIAYTMSLGAENSVAYSNNSIAICTNFTISVTTEILPVSMTKTSVDCTMYICGDSTECSNLLLQYGSFCTQLNRALTGIAVEQDKNTQEVFAQVKQIYKTPPIKDFGGFNFSQILPDPSKPSKRSFIEDLLFNKVTLADAGFIKQYGDCLGDIAARDLICAQKFNGLTVLPPLLTDEMIAQYTSALLAGTITSGWTFGAGAALQIPFAMQMAYRFNGIGVTQNVLYENQKLIANQFNSAIGKIQDSLSSTATALGKLQDVVNQNAQALNTLVKQLSSNFGAISSVLNDILSRLDKVEAEVQIDRLITGRLQSLQTYVTQQLIRAAEIRASANLAATKMSECVLGQSKRVDFCGKGYHLMSFPQSAPHGVVFLHVTYVCAQEKNFTTAPAICHDGKAHFPREGVFVSNGTHWFVTQRNFYEPQIITTDNTFVSGNCDVVIGIVNNTVYDPLQPELDSFKEELDKYFKNHTSPDVDLGDISGINASVVNIQKEIDRLNEVAKNLNESLIDLQELGKYEQYIKGGGGSDIIKLLNEQVNKEMQSSNLYMSMSSWCYTHSLDGAGLFLFDHAAEEYEHAKKLIIFLNENNVPVQLTSISAPEHKFEGLTQIFQKAYEHEQHISESINNIVDHAIKSKDHATFNFLQWYVAEQHEEEVLFKDILDKIELIGNENHGLYLADQYVKGIAKSRKS

SEQ ID NO: 5124 - protein, 1379 aa, Artificial Sequence
  SARS-CoV-2/Belgium/BC-03016/2020__EPI_ISL_415157 spike protein (1-1211)(P715C_P1069C) Ferritin construct
MFVFLVLLPLVSSQCVNLTTRTQLPPAYTNSFTRGVYYPDKVFRSSVLHSTQDLFLPFFSNVTWFHAIHVSGTNGTKRFDNPVLPFNDGVYFASTEKSNIIRGWIFGTTLDSKTQSLLIVNNATNVVIKVCEFQFCNDPFLGVYYHKNNKSWMESEFRVYSSANNCTFEYVSQPFLMDLEGKQGNFKNLREFVFKNIDGYFKIYSKHTPINLVRDLPQGFSALEPLVDLPIGINITRFQTLLALHRSYLTPGDSSSGWTAGAAAYYVGYLQPRTFLLKYNENGTITDAVDCALDPLSETKCTLKSFTVEKGIYQTSNFRVQPTESIVRFPNITNLCPFGEVFNATRFASVYAWNRKRISNCVADYSVLYNSASFSTFKCYGVSPTKLNDLCFTNVYADSFVIRGDEVRQIAPGQTGKIADYNYKLPDDFTGCVIAWNSNNLDSKVGGNYNYLYRLFRKSNLKPFERDISTEIYQAGSTPCNGVEGFNCYFPLQSYGFQPTNGVGYQPYRVVVLSFELLHAPATVCGPKKSTNLVKNKCVNFNFNGLTGTGVLTESNKKFLPFQQFGRDIADTTDAVRDPQTLEILDITPCSFGGVSVITPGTNTSNQVAVLYQGVNCTEVPVAIHADQLTPTWRVYSTGSNVFQTRAGCLIGAEHVNNSYECDIPIGAGICASYQTQTNSPRRARSVASQSIIAYTMSLGAENSVAYSNNSIAICTNFTISVTTEILPVSMTKTSVDCTMYICGDSTECSNLLLQYGSFCTQLNRALTGIAVEQDKNTQEVFAQVKQIYKTPPIKDFGGFNFSQILPDPSKPSKRSFIEDLLFNKVTLADAGFIKQYGDCLGDIAARDLICAQKFNGLTVLPPLLTDEMIAQYTSALLAGTITSGWTFGAGAALQIPFAMQMAYRFNGIGVTQNVLYENQKLIANQFNSAIGKIQDSLSSTAPALGKLQDVVNQNAQALNTLVKQLSSNFGAISSVLNDILSRLDKVEAEVQIDRLITGRLQSLQTYVTQQLIRAAEIRASANLAATKMSECVLGQSKRVDFCGKGYHLMSFPQSAPHGVVFLHVTYVCAQEKNFTTAPAICHDGKAHFPREGVFVSNGTHWFVTQRNFYEPQIITTDNTFVSGNCDVVIGIVNNTVYDPLQPELDSFKEELDKYFKNHTSPDVDLGDISGINASVVNIQKEIDRLNEVAKNLNESLIDLQELGKYEQYIKGGGGSDIIKLLNEQVNKEMQSSNLYMSMSSWCYTHSLDGAGLFLFDHAAEEYEHAKKLIIFLNENNVPVQLTSISAPEHKFEGLTQIFQKAYEHEQHISESINNIVDHAIKSKDHATFNFLQWYVAEQHEEEVLFKDILDKIELIGNENHGLYLADQYVKGIAKSRKS

SEQ ID NO: 5125 - protein, 1379 aa, Artificial Sequence
  SARS-CoV-2/Germany/BavPat3/2020__EPI_ISL_414521 spike protein (1-1211)(P715C_P1069C) Ferritin construct
MFVFLVLLPLVSSQCVNLTTRTQLPPAYTNSFTRGVYYPDKVFRSSVLHSTQDLFLPFFSNVTWFHAIHVSGTNGTKRFDNPVLPFNDGVYFASTEKSNIIRGWIFGTTLDSKTQSLLIVNNATNVVIKVCEFQFCNDPFLGVYYHKNNKSWMESEFRVYSSANNCTFEYVSQPFLMDLEGKQGNFKNLREFVFKNIDGYFKIYSKHTPINLVRDLPQGFSALEPLVDLPIGINITRFQTLLALHRSYLTPGDSSSGWTAGAAAYYVGYLQPRTFLLKYNENGTITDAVDCALDPLSETKCTLKSFTVEKGIYQTSNFRVQPTESIVRFPNITNLCPFGEVFNATRFASVYAWNRKRISNCVADYSVLYNSASFSTFKCYGVSPTKLNDLCFTNVYADSFVIRGDEVRQIAPGQTGKIADYNYKLPDDFTGCVIAWNSNNLDSKVGGNYNYLYRLFRKSNLKPFERDISTEIYQAGSTPCNGVEGFNCYFPLQSYGFQPTNGVGYQPYRVVVLSFELLHAPATVCGPKKSTNLVKNKCVNFNFNGLTGTGVLTESNKKFLPFQQFGRDIADTTDAVRDPQTLEILDITPCSFGGVSVITPGTNTSNQVAVLYQDVNCTEVPVAIHADQLTPTWRVYSTGSNVFQTRAGCLIGAEHVNNSYECDIPIGAGICASYQTQTNSPRRARSVASQSIIAYTMSLGAENSVAYSNNSIAICTNFTISVTTEILPVSMTKTSVDCTMYICGDSTECSNLLLQYGSFCTQLNRALTGIAVEQDKNTQQVFAQVKQIYKTPPIKDFGGFNFSQILPDPSKPSKRSFIEDLLFNKVTLADAGFIKQYGDCLGDIAARDLICAQKFNGLTVLPPLLTDEMIAQYTSALLAGTITSGWTFGAGAALQIPFAMQMAYRFNGIGVTQNVLYENQKLIANQFNSAIGKIQDSLSSTASALGKLQDVVNQNAQALNTLVKQLSSNFGAISSVLNDILSRLDKVEAEVQIDRLITGRLQSLQTYVTQQLIRAAEIRASANLAATKMSECVLGQSKRVDFCGKGYHLMSFPQSAPHGVVFLHVTYVCAQEKNFTTAPAICHDGKAHFPREGVFVSNGTHWFVTQRNFYEPQIITTDNTFVSGNCDVVIGIVNNTVYDPLQPELDSFKEELDKYFKNHTSPDVDLGDISGINASVVNIQKEIDRLNEVAKNLNESLIDLQELGKYEQYIKGGGGSDIIKLLNEQVNKEMQSSNLYMSMSSWCYTHSLDGAGLFLFDHAAEEYEHAKKLIIFLNENNVPVQLTSISAPEHKFEGLTQIFQKAYEHEQHISESINNIVDHAIKSKDHATFNFLQWYVAEQHEEEVLFKDILDKIELIGNENHGLYLADQYVKGIAKSRKS

SEQ ID NO: 5126 - protein, 1379 aa, Artificial Sequence
  SARS-CoV-2/France/HF1805/2020__EPI_ISL_414628 spike protein (1-1211)(P715C_P1069C) Ferritin construct
MFVFLVLLPLVSSQCVNLTTRTQLPPAYTNSFTRGVYYPDKVFRSSVLHSTQDLFLPFFSNVTWFHAIHVSGTNGTKRFDNPVLPFNDGVYFASTEKSNIIRGWIFGTTLDSKTQSLLIVNNATNVVIKVCEFQFCNDPFLGVYYHKNNKSWMESEFRVYSSANNCTFEYVSQPFLMDLEGKQGNFKNLREFVFKNIDGYFKIYSKHTPINLVRDLPQGFSALEPLVDLPIGINITRFQTLLALHRSYLTPGDSSSGWTAGAAAYYVGYLQPRTFLLKYNENGTITDAVDCALDPLSETKCTLKSFTVEKGIYQTSNFRVQPTESIVRFPNITNLCPFGEVFNATRFASVYAWNRKRISNCVADYSVLYNSASFSTFKCYGVSPTKLNDLCFTNVYADSFVIRGDEVRQIAPGQTGKIADYNYKLPDDFTGCVIAWNSNNLDSKVGGNYNYLYRLFRKSNLKPFERDISTEIYQAGSTPCNGVEGFNCYFPLQSYGFQPTNGVGYQPYRVVVLSFELLHAPATVCGPKKSTNLVKNKCVNFNFNGLTGTGVLTESNKKFLPFQQFGRDIADTTDAVRDPQTLEILDITPCSFGGVSVITPGTNTSNQVAVLYQGVNCTEVPVAIHADQLTPTWRVYSTGSNVFQTRAGCLIGAEHVNNSYECDIPIGAGICASYQTQTNSPRRARSVASQSIIAYTMSLGAENSVAYSNNSIAICTNFTISVTTEILPVSMTKTSVDCTMYICGDSTECSNLLLQYGSFCTQLNRALTGIAVEQDKNTQEVFAQVKQIYKTPPIKDFGGFNFSQILPDPSKPSKRSFIEDLLFNKVTLADAGFIKQYGDCLGDIAARDLICAQKFNGLTVLPPLLTDEMIAQYTSALLAGTITSGWTFGAGAALQIPFAMQMAYRFNGIGVTQNVLYENQKLIANQFNSAIGKIQDSLSSTASALGKLQDVVNQNAQALNTLVKQLSSNFGAISSVLNDILSRLDKVEAEVQIDRLITGRLQSLQTYVTQQLIRAAEIRASANLAATKMSECVLGQSKRVDFCGKGYHLMSFPQSAPHGVVFLHVTYVCAQEKNFTTAPAICHDGKAHFPREGVFVSNGTHWFVTQRNFYEPQIITTDNTFVSGNCDVVIGVVNNTVYDPLQPELDSFKEELDKYFKNHTSPDVDLGDISGINASVVNIQKEIDRLNEVAKNLNESLIDLQELGKYEQYIKGGGGSDIIKLLNEQVNKEMQSSNLYMSMSSWCYTHSLDGAGLFLFDHAAEEYEHAKKLIIFLNENNVPVQLTSISAPEHKFEGLTQIFQKAYEHEQHISESINNIVDHAIKSKDHATFNFLQWYVAEQHEEEVLFKDILDKIELIGNENHGLYLADQYVKGIAKSRKS

SEQ ID NO: 5127 - protein, 1379 aa, Artificial Sequence
  SARS-CoV-2/Netherlands/ZuidHolland_9/2020__EPI_ISL_414445 spike protein (1-1211)(P715C_P1069C) Ferritin construct
MFVFLVLLPLVSSQCVNLTTRTQLPPAYTNSFTRGVYYPDKVFRSSVLHSTQDLFLPFFSNVTWFHAIHVSGTNGTKRFDNPVLPFNDGVYFASTEKSNIIRGWIFGTTLDSKTQSLLIVNNATNVVIKVCEFQFCNDPFLGVYYHKNNKSWMESEFRVYSSANNCTFEYVSQPFLMDLEGKQGNFKNLREFVFKNIDGYFKIYSKHTPINLVRDLPQGFSALEPLVDLPIGINITRFQTLLALHRSYLTPGDSSSGWTAGAAAYYVGYLQPRTFLLKYNENGTITDAVDCALDPLSETKCTLKSFTVEKGIYQTSNFRVQPTESIVRFPNITNLCPFGEVFNATRFASVYAWNRKRISNCVADYSVLYNSASFSTFKCYGVSPTKLNDLCFTNVYADSFVIRGDEVRQIAPGQTGKIADYNYKLPDDFTGCVIAWNSNNLDSKVGGNYNYLYRLFRKSNLKPFERDISTEIYQAGSTPCNGVEGFNCYFPLQSYGFQPTNGVGYQPYRVVVLSFELLHAPATVCGPKKSTNLVKNKCVNFNFNGLTGTGVLTESNKKFLPFQQFGRDIADTTDAVRDPQTLEILDITPCSFGGVSVITPGTNTSNQVAVLYQGVNCTEVPVAIHADQLTPTWRVYSTGSNVFQTRAGCLIGAEHVNNSYECDIPIGAGICASYQTQTNSPRRARSVASQSIIAYTMSLGAENSVAYSNNSIAICTNFTISVTTEILPVSMTKTSVDCTMYICGDSTECSNLLLQYGSFCTQLNRALTGIAVEQDKNTQEVFAQVKQIYKTPPIKDFGGFNFSQILPDPSKPSKRSFIEDLLFNKVTLADAGFIKQYGDCLGDIAARDLICVQKFNGLTVLPPLLTDEMIAQYTSALLAGTITSGWTFGAGAALQIPFAMQMAYRFNGIGVTQNVLYENQKLIANQFNSAIGKIQDSLSSTASALGKLQDVVNQNAQALNTLVKQLSSNFGAISSVLNDILSRLDKVEAEVQIDRLITGRLQSLQTYVTQQLIRAAEIRASANLAATKMSECVLGQSKRVDFCGKGYHLMSFPQSAPHGVVFLHVTYVCAQEKNFTTAPAICHDGKAHFPREGVFVSNGTHWFVTQRNFYEPQIITTDNTFVSGNCDVVIGIVNNTVYDPLQPELDSFKEELDKYFKNHTSPDVDLGDISGINASVVNIQKEIDRLNEVAKNLNESLIDLQELGKYEQYIKGGGGSDIIKLLNEQVNKEMQSSNLYMSMSSWCYTHSLDGAGLFLFDHAAEEYEHAKKLIIFLNENNVPVQLTSISAPEHKFEGLTQIFQKAYEHEQHISESINNIVDHAIKSKDHATFNFLQWYVAEQHEEEVLFKDILDKIELIGNENHGLYLADQYVKGIAKSRKS

SEQ ID NO: 5128 - protein, 1379 aa, Artificial Sequence
  SARS-CoV-2/Finland/FIN03032020A/2020__EPI_ISL_413602 spike protein (1-1211)(P715C_P1069C) Ferritin construct
MFVFLVLLPLVSSQCVNLTTRTQLPPAYTNSFTRGVYYPDKVFRSSVLHSTQDLFLPFFSNVTWFHAIHVSGTNGTKRFDNPVLPFNDGVYFASTEKSNIIRGWIFGTTLDSKTQSLLIVNNATNVVIKVCEFQFCNDPFLGVYYHKNNKSWMESEFRVYSSANNCTFEYVSQPFLMDLEGKQGNFKNLREFVFKNIDGYFKIYSKHTPINLVRDLPQGFSALEPLVDLPIGINITRFQTLLALHRSYLTPGDSSSGWTAGAAAYYVGYLQPRTFLLKYNENGTITDAVDCALDPLSETKCTLKSFTVEKGIYQTSNFRVQPTESIVRFPNITNLCPFGEVFNATRFASVYAWNRKRISNCVADYSVLYNSASFSTFKCYGVSPTKLNDLCFTNVYADSFVIRGDEVRQIAPGQTGKIADYNYKLPDDFTGCVISWNSNNLDSKVGGNYNYLYRLFRKSNLKPFERDISTEIYQAGSTPCNGVEGFNCYFPLQSYGFQPTNGVGYQPYRVVVLSFELLHAPATVCGPKKSTNLVKNKCVNFNFNGLTGTGVLTESNKKFLPFQQFGRDIADTTDAVRDPQTLEILDITPCSFGGVSVITPGTNTSNQVAVLYQGVNCTEVPVAIHADQLTPTWRVYSTGSNVFQTRAGCLIGAEHVNNSYECDIPIGAGICASYQTQTNSPRRARSVASQSIIAYTMSLGAENSVAYSNNSIAICTNFTISVTTEILPVSMTKTSVDCTMYICGDSTECSNLLLQYGSFCTQLNRALTGIAVEQDKNTQEVFAQVKQIYKTPPIKDFGGFNFSQILPDPSKPSKRSFIEDLLFNKVTLADAGFIKQYGDCLGDIAARDLICAQKFNGLTVLPPLLTDEMIAQYTSALLAGTITSGWTFGAGAALQIPFAMQMAYRFNGIGVTQNVLYENQKLIANQFNSAIGKIQDSLSSTASALGKLQDVVNQNAQALNTLVKQLSSNFGAISSVLNDILSRLDKVEAEVQIDRLITGRLQSLQTYVTQQLIRAAEIRASANLAATKMSECVLGQSKRVDFCGKGYHLMSFPQSAPHGVVFLHVTYVCAQEKNFTTAPAICHDGKAHFPREGVFVSNGTHWFVTQRNFYEPQIITTDNTFVSGNCDVVIGIVNNTVYDPLQPELDSFKEELDKYFKNHTSPDVDLGDISGINASVVNIQKEIDRLNEVAKNLNESLIDLQELGKYEQYIKGGGGSDIIKLLNEQVNKEMQSSNLYMSMSSWCYTHSLDGAGLFLFDHAAEEYEHAKKLIIFLNENNVPVQLTSISAPEHKFEGLTQIFQKAYEHEQHISESINNIVDHAIKSKDHATFNFLQWYVAEQHEEEVLFKDILDKIELIGNENHGLYLADQYVKGIAKSRKS

SEQ ID NO: 5129 - protein, 1379 aa, Artificial Sequence
  SARS-CoV-2/France/GE1977/2020__EPI_ISL_414632 spike protein (1-1211)(P715C_P1069C) Ferritin construct
MFVFLVLLPLVSSQCVNLTTRTQLPPAYTNSFTRGVYYPDKVFRSSVLHSTQDLFLPFFSNVTWFHAIHVSGTNGTKRFDNPVLPFNDGVYFASTEKSNIIRGWIFGTTLDSKTQSLLIVNNATNVVIKVCEFQFCNDPFLGVYYHKNNKSWMESEFRVYSSANNCTFEYVSQPFLMDLEGKQGNFKNLREFVFKNIDGYFKIYSKHTPINLVRDLPQGFSALEPLVDLPIGINITRFQTLLALHRSYLTPGDSSSGWTAGAAAYYVGYLQPRTFLLKYNENGTITDAVDCALDPLSETKCTLKSFTVEKGIYQTSNFRVQPTESIVRFPNITNLCPFGEVFNATRFASVYAWNRKRISNCVADYSVLYNSASFSTFKCYGVSPTKLNDLCFTNVYADSFVIRGDEVRQIAPGQTGKIADYNYKLPDDFTGCVIAWNSNNLDSKVGGNYNYLYRLFRKSNLKPFERDISTEIYQAGSTPCNGVEGFNCYFPLQSYGFQPTNGVGYQPYRVVVLSFELLHAPATVCGPKKSTNLVKNKCVNFNFNGLTGTGVLTESNKKFLPFQQFGRDIADTTDAVRDPQTLEILDITPCSFGGVSVITPGTNTSNQVAVLYQGVNCTEVPVAIHADQLTPTWRVYSTGSNVFQTRAGCLIGAEHVNNSYECDIPIGAGICASYQTQTNSPRRARSVASQSIIAYTMSLGAENSVAYSNNSIAICTNFTISVTTEILPVSMTKTSVDCTMYICGDSTECSNLLLQYGSFCTQLNRALTGIAVEQDKNTQEVFAQVKQIYKTPPIKDFGGFNFSQILPDPSKPSKRSFIEDLLFNKVTLADAGFIKQYGDCLGDIAARDLICAQKFNGLTVLPPLLTDEMIAQYTSALLAGTITSGWTFGAGAALQIPFAMQMAYRFNGIGVTQNVLYENQKLIANQFNSAIGKIQDSLFSTASALGKLQDVVNQNAQALNTLVKQLSSNFGAISSVLNDILSRLDKVEAEVQIDRLITGRLQSLQTYVTQQLIRAAEIRASANLAATKMSECVLGQSKRVDFCGKGYHLMSFPQSAPHGVVFLHVTYVCAQEKNFTTAPAICHDGKAHFPREGVFVSNGTHWFVTQRNFYEPQIITTDNTFVSGNCDVVIGIVNNTVYDPLQPELDSFKEELDKYFKNHTSPDVDLGDISGINASVVNIQKEIDRLNEVAKNLNESLIDLQELGKYEQYIKGGGGSDIIKLLNEQVNKEMQSSNLYMSMSSWCYTHSLDGAGLFLFDHAAEEYEHAKKLIIFLNENNVPVQLTSISAPEHKFEGLTQIFQKAYEHEQHISESINNIVDHAIKSKDHATFNFLQWYVAEQHEEEVLFKDILDKIELIGNENHGLYLADQYVKGIAKSRKS

SEQ ID NO: 5130 - protein, 1379 aa, Artificial Sequence
  SARS-CoV-2/Finland/FIN-313/2020__EPI_ISL_414641 spike protein (1-1211)(P715C_P1069C) Ferritin construct
MFVFLVLLPLVSSQCVNLTTRTQLPPAYTNSFTRGVYYPDKVFRSSVLHSTQDLFLPFFSNVTWFHAIHVSGTNGTKRFDNPVLPFNDGVYFASTEKSNIIRGWIFGTTLDSKTQSLLIVNNATNVVIKVCEFQFCNDPFLGVYYHKNNKSWMESEFRVYSSANNCTFEYVSQPFLMDLEGKQGNFKNLREFVFKNIDGYFKIYSKHTPINLVRDLPQGFSALEPLVDLPIGINITRFKTLLALHRSYLTPGDSSSGWTAGAAAYYVGYLQPRTFLLKYNENGTITDAVDCALDPLSETKCTLKSFTVEKGIYQTSNFRVQPTESIVRFPNITNLCPFGEVFNATRFASVYAWNRKRISNCVADYSVLYNSASFSTFKCYGVSPTKLNDLCFTNVYADSFVIRGDEVRQIAPGQTGKIADYNYKLPDDFTGCVIAWNSNNLDSKVGGNYNYLYRLFRKSNLKPFERDISTEIYQAGSTPCNGVEGFNCYFPLQSYGFQPTNGVGYQPYRVVVLSFELLHAPATVCGPKKSTNLVKNKCVNFNFNGLTGTGVLTESNKKFLPFQQFGRDIADTTDAVRDPQTLEILDITPCSFGGVSVITPGTNTSNQVAVLYQGVNCTEVPVAIHADQLTPTWRVYSTGSNVFQTRAGCLIGAEHVNNSYECDIPIGAGICASYQTQTNSPRRARSVASQSIIAYTMSLGAENSVAYSNNSIAICTNFTISVTTEILPVSMTKTSVDCTMYICGDSTECSNLLLQYGSFCTQLNRALTGIAVEQDKNTQEVFAQVKQIYKTPPIKDFGGFNFSQILPDPSKPSKRSFIEDLLFNKVTLADAGFIKQYGDCLGDIAARDLICAQKFNGLTVLPPLLTDEMIAQYTSALLAGTITSGWTFGAGAALQIPFAMQMAYRFNGIGVTQNVLYENQKLIANQFNSAIGKIQDSLSSTASALGKLQDVVNQNAQALNTLVKQLSSNFGAISSVLNDILSRLDKVEAEVQIDRLITGRLQSLQTYVTQQLIRAAEIRASANLAATKMSECVLGQSKRVDFCGKGYHLMSFPQSAPHGVVFLHVTYVCAQEKNFTTAPAICHDGKAHFPREGVFVSNGTHWFVTQRNFYEPQIITTDNTFVSGNCDVVIGIVNNTVYDPLQPELDSFKEELDKYFKNHTSPDVDLGDISGINASVVNIQKEIDRLNEVAKNLNESLIDLQELGKYEQYIKGGGGSDIIKLLNEQVNKEMQSSNLYMSMSSWCYTHSLDGAGLFLFDHAAEEYEHAKKLIIFLNENNVPVQLTSISAPEHKFEGLTQIFQKAYEHEQHISESINNIVDHAIKSKDHATFNFLQWYVAEQHEEEVLFKDILDKIELIGNENHGLYLADQYVKGIAKSRKS

SEQ ID NO: 5131 - protein, 1379 aa, Artificial Sequence
  SARS-CoV-2/Netherlands/ZuidHolland_2/2020__EPI_ISL_414556 spike protein (1-1211)(P715C_P1069C) Ferritin construct
MFVFLVLLPLVSSQCVNLTTRTQLPPAYTNSFTRGVYYPDKVFRSSVLHSTQDLFLPFFSNVTWFHAIHVSGTNGTKRFDNPVLPFNDGVYFASTEKSNIIRGWIFGTTLDSKTQSLLIVNNATNVVIKVCEFQFCNDPFLGVYYHKNNKSWMESEFRVYSSANNCTFEYVSQPFLMDLEGKQGNFKNLREFVFKNIDGYFKIYSKHTPINLVRDLPQGFSALEPLVDLPIGINITRFQTLLALHRSYLTPGDSSSGWTAGAAAYYVGYLQPRTFLLKYNENGTITDAVDCALDPLSETKCTLKSFTVEKGIYQTSNFRVQPTESIVRFPNITNLCPFGEVFNATRFASVYAWNRKRISNCVADYSVLYNSASFSTFKCYGVSPTKLNDLCFTNVYADSFVIRGDEVRQIAPGQTGKIADYNYKLPDDFTGCVIAWNSNNLDSKVGGNYNYLYRLFRKSNLKPFERDISTEIYQAGSTPCNGVEGFNCYFPLQSYGFQPTNGVGYQPYRVVVLSFELLHAPATVCGPKKSTNLVKNKCVNFNFNGLTGTGVLTESNKKFLPFQQFGRDIADTTDAVRDPQTLEILDITPCSFGGVSVITPGTNTSNQVAVLYQGVNCTEVPVAIHADQLTPTWRVYSTGSNVFQTRAGCLIGAEHVNNSYECDIPIGAGICASYQTQTNSPRRARSVASQSIIAYTMSLGAENSVAYSNNSIAICTNFTISVTTEILPVSMTKTSVDCTMYICGDSTECSNLLLQYGSFCTQLNRALTGIALEQDKNTQEVFAQVKQIYKTPPIKDFGGFNFSQILPDPSKPSKRSFIEDLLFNKVTLADAGFIKQYGDCLGDIAARDLICAQKFNGLTVLPPLLTDEMIAQYTSALLAGTITSGWTFGAGAALQIPFAMQMAYRFNGIGVTQNVLYENQKLIANQFNSAIGKIQDSLSSTASALGKLQDVVNQNAQALNTLVKQLSSNFGAISSVLNDILSRLDKVEAEVQIDRLITGRLQSLQTYVTQQLIRAAEIRASANLAATKMSECVLGQSKRVDFCGKGYHLMSFPQSAPHGVVFLHVTYVCAQEKNFTTAPAICHDGKAHFPREGVFVSNGTHWFVTQRNFYEPQIITTDNTFVSGNCDVVIGIVNNTVYDPLQPELDSFKEELDKYFKNHTSPDVDLGDISGINASVVNIQKEIDRLNEVAKNLNESLIDLQELGKYEQYIKGGGGSDIIKLLNEQVNKEMQSSNLYMSMSSWCYTHSLDGAGLFLFDHAAEEYEHAKKLIIFLNENNVPVQLTSISAPEHKFEGLTQIFQKAYEHEQHISESINNIVDHAIKSKDHATFNFLQWYVAEQHEEEVLFKDILDKIELIGNENHGLYLADQYVKGIAKSRKS

SEQ ID NO: 5132 - protein, 1379 aa, Artificial Sequence
  SARS-CoV-2/USA/WA-UW31/2020__EPI_ISL_414618 spike protein (1-1211)(P715C_P1069C) Ferritin construct
MFVFLVLLPLVSSQCVNLTTRTQLPPAYTNSFTRGVYYPDKVFRSSVLHSTQDLFLPFFSNVTWFHAIHVSGTNGTKRFDNPVLPFNDGVYFASTEKSNIIRGWIFGTTLDSKTQSLLIVNNATNVVIKVCEFQFCNDPFLGVYYHKNNKSWMESEFRVYSSANNCTFEYVSQPFLMDLEGKQGNFKNLREFVFKNIDGYFKIYSKHTPINLVRDLPQGFSALEPLVDLPIGINITRFQTLLALHRSYLTPGDSSSGWTAGAAAYYVGYLQPRTFLLKYNENGTITDAVDCALDPLSETKCTLKSFTVEKGIYQTSNFRVQPTESIVRFPNITNLCPFGEVFNATRFASVYAWNRKRISNCVADYSVLYNSASFSTFKCYGVSPTKLNDLCFTNVYADSFVIRGDEVRQIAPGQTGKIADYNYKLPDDFTGCVIAWNSNNLDSKVGGNYNYLYRLFRKSNLKPFERDISTEIYQAGSTPCNGAEGFNCYFPLQSYGFQPTNGVGYQPYRVVVLSFELLHAPATVCGPKKSTNLVKNKCVNFNFNGLTGTGVLTESNKKFLPFQQFGRDIADTTDAVRDPQTLEILDITPCSFGGVSVITPGTNTSNQVAVLYQDVNCTEVPVAIHADQLTPTWRVYSTGSNVFQTRAGCLIGAEHVNNSYECDIPIGAGICASYQTQTNSPRRARSVASQSIIAYTMSLGAENSVAYSNNSIAICTNFTISVTTEILPVSMTKTSVDCTMYICGDSTECSNLLLQYGSFCTQLNRALTGIAVEQDKNTQEVFAQVKQIYKTPPIKDFGGFNFSQILPDPSKPSKRSFIEDLLFNKVTLADAGFIKQYGDCLGDIAARDLICAQKFNGLTVLPPLLTDEMIAQYTSALLAGTITSGWTFGAGAALQIPFAMQMAYRFNGIGVTQNVLYENQKLIANQFNSAIGKIQDSLSSTASALGKLQDVVNQNAQALNTLVKQLSSNFGAISSVLNDILSRLDKVEAEVQIDRLITGRLQSLQTYVTQQLIRAAEIRASANLAATKMSECVLGQSKRVDFCGKGYHLMSFPQSAPHGVVFLHVTYVCAQEKNFTTAPAICHDGKAHFPREGVFVSNGTHWFVTQRNFYEPQIITTDNTFVSGNCDVVIGIVNNTVYDPLQPELDSFKEELDKYFKNHTSPDVDLGDISGINASVVNIQKEIDRLNEVAKNLNESLIDLQELGKYEQYIKGGGGSDIIKLLNEQVNKEMQSSNLYMSMSSWCYTHSLDGAGLFLFDHAAEEYEHAKKLIIFLNENNVPVQLTSISAPEHKFEGLTQIFQKAYEHEQHISESINNIVDHAIKSKDHATFNFLQWYVAEQHEEEVLFKDILDKIELIGNENHGLYLADQYVKGIAKSRKS

SEQ ID NO: 5133 - protein, 1379 aa, Artificial Sequence
  SARS-CoV-2/South Korea/SNU01/2020__EPI_ISL_411929 spike protein (1-1211)(P715C_P1069C) Ferritin construct
MFVFLVLLPLVSSQCVNLTTRTQLPPAYTNSFTRGVYYPDKVFRSSVLHSTQDLFLPFFSNVTWFHAIHVSGTNGTKRFDNPVLPFNDGVYFASTEKSNIIRGWIFGTTLDSKTQSLLIVNNATNVVIKVCEFQFCNDPFLGVYYHKNNKSWMESEFRVYSSANNCTFEYVSQPFLMDLEGKQGNFKNLREFVFKNIDGYFKIYSKHTPINLVRDLPQGFWALEPLVDLPIGINITRFQTLLALHRSYLTPGDSSSGWTAGAAAYYVGYLQPRTFLLKYNENGTITDAVDCALDPLSETKCTLKSFTVEKGIYQTSNFRVQPTESIVRFPNITNLCPFGEVFNATRFASVYAWNRKRISNCVADYSVLYNSASFSTFKCYGVSPTKLNDLCFTNVYADSFVIRGDEVRQIAPGQTGKIADYNYKLPDDFTGCVIAWNSNNLDSKVGGNYNYLYRLFRKSNLKPFERDISTEIYQAGSTPCNGVEGFNCYFPLQSYGFQPTNGVGYQPYRVVVLSFELLHAPATVCGPKKSTNLVKNKCVNFNFNGLTGTGVLTESNKKFLPFQQFGRDIADTTDAVRDPQTLEILDITPCSFGGVSVITPGTNTSNQVAVLYQDVNCTEVPVAIHADQLTPTWRVYSTGSNVFQTRAGCLIGAEHVNNSYECDIPIGAGICASYQTQTNSPRRARSVASQSIIAYTMSLGAENSVAYSNNSIAICTNFTISVTTEILPVSMTKTSVDCTMYICGDSTECSNLLLQYGSFCTQLNRALTGIAVEQDKNTQEVFAQVKQIYKTPPIKDFGGFNFSQILPDPSKPSKRSFIEDLLFNKVTLADAGFIKQYGDCLGDIAARDLICAQKFNGLTVLPPLLTDEMIAQYTSALLAGTITSGWTFGAGAALQIPFAMQMAYRFNGIGVTQNVLYENQKLIANQFNSAIGKIQDSLSSTASALGKLQDVVNQNAQALNTLVKQLSSNFGAISSVLNDILSRLDKVEAEVQIDRLITGRLQSLQTYVTQQLIRAAEIRASANLAATKMSECVLGQSKRVDFCGKGYHLMSFPQSAPHGVVFLHVTYVCAQEKNFTTAPAICHDGKAHFPREGVFVSNGTHWFVTQRNFYEPQIITTDNTFVSGNCDVVIGIVNNTVYDPLQPELDSFKEELDKYFKNHTSPDVDLGDISGINASVVNIQKEIDRLNEVAKNLNESLIDLQELGKYEQYIKGGGGSDIIKLLNEQVNKEMQSSNLYMSMSSWCYTHSLDGAGLFLFDHAAEEYEHAKKLIIFLNENNVPVQLTSISAPEHKFEGLTQIFQKAYEHEQHISESINNIVDHAIKSKDHATFNFLQWYVAEQHEEEVLFKDILDKIELIGNENHGLYLADQYVKGIAKSRKS

SEQ ID NO: 5134 - protein, 1379 aa, Artificial Sequence
  SARS-CoV-2/China/WF0004/2020__EPI_ISL_413694 spike protein (1-1211)(P715C_P1069C) Ferritin construct
MFVFLVLLPLVSSQCVNLTTRTQLPPAYTNSFTRGVYYPDKVFRSSVLHSTQDLFLPFFSNVTWFHAIHVSGTNGTKRFDNPVLPFNDGVYFASTEKSNIIRGWIFGTTLDSKTQSLLIVNNATNVVIKVCEFQFCNDPFLGVYYHKNNKSWTESEFRVYSSANNCTFEYVSQPFLMDLEGKQGNFKNLREFVFKNIDGYFKIYSKHTPINLVRDLPQGFSALEPLVDLPIGINITRFQTLLALHRSYLTPGDSSSGWTAGAAAYYVGYLQPRTFLLKYNENGTITDAVDCALDPLSETKCTLKSFTVEKGIYQTSNFRVQPTESIVRFPNITNLCPFGEVFNATRFASVYAWNRKRISNCVADYSVLYNSASFSTFKCYGVSPTKLNDLCFTNVYADSFVIRGDEVRQIAPGQTGKIADYNYKLPDDFTGCVIAWNSNNLDSKVGGNYNYLYRLFRKSNLKPFERDISTEIYQAGSTPCNGVEGFNCYFPLQSYGFQPTNGVGYQPYRVVVLSFELLHAPATVCGPKKSTNLVKNKCVNFNFNGLTGTGVLTESNKKFLPFQQFGRDIADTTDAVRDPQTLEILDITPCSFGGVSVITPGTNTSNQVAVLYQDVNCTEVPVAIHADQLTPTWRVYSTGSNVFQTRAGCLIGAEHVNNSYECDIPIGAGICASYQTQTNSPRRARSVASQSIIAYTMSLGAENSVAYSNNSIAICTNFTISVTTEILPVSMTKTSVDCTMYICGDSTECSNLLLQYGSFCTQLNRALTGIAVEQDKNTQEVFAQVKQIYKTPPIKDFGGFNFSQILPDPSKPSKRSFIEDLLFNKVTLADAGFIKQYGDCLGDIAARDLICAQKFNGLTVLPPLLTDEMIAQYTSALLAGTITSGWTFGAGAALQIPFAMQMAYRFNGIGVTQNVLYENQKLIANQFNSAIGKIQDSLSSTASALGKLQDVVNQNAQALNTLVKQLSSNFGAISSVLNDILSRLDKVEAEVQIDRLITGRLQSLQTYVTQQLIRAAEIRASANLAATKMSECVLGQSKRFDFCGKGYHLMSFPQSAPHGVVFLHVTYVCAQEKNFTTAPAICHDGKAHFPREGVFVSNGTHWFVTQRNFYEPQIITTDNTFVSGNCDVVIGIVNNTVYDPLQPELDSFKEELDKYFKNHTSPDVDLGDISGINASVVNIQKEIDRLNEVAKNLNESLIDLQELGKYEQYIKGGGGSDIIKLLNEQVNKEMQSSNLYMSMSSWCYTHSLDGAGLFLFDHAAEEYEHAKKLIIFLNENNVPVQLTSISAPEHKFEGLTQIFQKAYEHEQHISESINNIVDHAIKSKDHATFNFLQWYVAEQHEEEVLFKDILDKIELIGNENHGLYLADQYVKGIAKSRKS

SEQ ID NO: 5135 - protein, 1379 aa, Artificial Sequence
  SARS-CoV-2/China/WF0028/2020__EPI_ISL_413791 spike protein (1-1211)(P715C_P1069C) Ferritin construct
MFVFLVLLPLVSSQCVNLTTRTQLPPAYTNSFTRGVYYPDKVFRSSVLHSTQDLFLPFFSNVTWFHAIHVSGTNGTKRFDNPVLPFNDGVYFASTEKSNIIRGWIFGTTLDSKTQSLLIVNNATNVVIKVCEFQFCNDPFLGVYYHKNNKSWMESEFRVYSSANNCTFEYVSQPFLMDLEGKQGNFKNLREFVFKNIDGYFKIYSKHTPINLVRDLPQGFSALEPLVDLPIGINITRFQTLLALHRSYLTPGDSSSGWTAGAAAYYVGYLQPRTFLLKYNENGTITDAVDCALDPLSETKCTLKSFTVEKGIYQTSNFRVQPTESIVRFPNITNLCPFGEVFNATRFASVYAWNRKRISNCVADYSVLYNSASFSTFKCYGVSPTKLNDLCFTNVYADSFVIRGDEVRQIAPGQTGKIADYNYKLPDDFTGCVIAWNSNNLDSKVGGNYNYLYRLFRKSNLKPFERDISTEIYQAGSTPCNGVEGFNCYFPLQSYGFQPTNGVGYQPYRVVVLSFELLHAPATVCGPKKSTNLVKNKCVNFNFNGLTGTGVLTESNKKFLPFQQFGRDIADTTDAVRDPQTLEILDITPCSFGGVSVITPGTNTSNQVAVLYQDVNCTEVPVAIHADQLTPTWRVYSTGSNVFQTRAGCLIGAEHVNNSYECDIPIGAGICASYQTQTNSPRRARSVASQSIIAYTMSLGAENSVAYSNNSIAICTNFTISVTTEILPVSMTKTSVDCTMYICGDSTECSNLLLQYGSFCTQLNRALTGIAVEQDKNTQEVFAQVKQIYKTPPIKDFGGFNFSQILPDPSKPSKRSFIEDLLFNKVTLADAGFIKQYGDCLGDIAARDLICAQKFNGLTVLPPLLTDEMIAQYTSALLAGTITSGWTFGAGAALQIPFAMQMAYRFNGIGVTQNVLYENQKLIANQFNSAIGKIQDSLSSTASALGKLQDVVNQNAQALNTLVKQLSSNFGAISSVLNDILSRLDKVEAEVQIDRLITGRLQSLQTYVTQQLIRAAEIRASANLAATKMSECVLGQSKRVDFCGKGYHLMSFPQSAPHGVVFLHVTYVCAQEKNFTTAPAICHDGKAHFPREGVFVSNGTHWFVTQRNFYEPQIITTDNTFVSGNCDVVIGIVNNTVYDPLQPELESFKEELDKYFKNHTSPDVDLGDISGINASVVNIQKEIDRLNEVAKNLNESLIDLQELGKYEQYIKGGGGSDIIKLLNEQVNKEMQSSNLYMSMSSWCYTHSLDGAGLFLFDHAAEEYEHAKKLIIFLNENNVPVQLTSISAPEHKFEGLTQIFQKAYEHEQHISESINNIVDHAIKSKDHATFNFLQWYVAEQHEEEVLFKDILDKIELIGNENHGLYLADQYVKGIAKSRKS

SEQ ID NO: 5136 - protein, 1379 aa, Artificial Sequence
  SARS-CoV-2/2019-nCoV/USA-CruiseA-18/2020__MT159716.1 spike protein (1-1211)(P715C_P1069C) Ferritin construct
MFVFLVLLPLVSSQCVNLTTRTQLPPAYTNSFTRGVYYPDKVFRSSVLHSTQDLFLPFFSNVTWFHAIHVSGTNGTKRFDNPVLPFNDGVYFASTEKSNIIRGWIFGTTLDSKTQSLLIVNNATNVVIKVCEFQFCNDPFLGVYYHKNNKSWMESELRVYSSANNCTFEYVSQPFLMDLEGKQGNFKNLREFVFKNIDGYFKIYSKHTPINLVRDLPQGFSALEPLVDLPIGINITRFQTLLALHRSYLTPGDSSSGWTAGAAAYYVGYLQPRTFLLKYNENGTITDAVDCALDPLSETKCTLKSFTVEKGIYQTSNFRVQPTESIVRFPNITNLCPFGEVFNATRFASVYAWNRKRISNCVADYSVLYNSASFSTFKCYGVSPTKLNDLCFTNVYADSFVIRGDEVRQIAPGQTGKIADYNYKLPDDFTGCVIAWNSNNLDSKVGGNYNYLYRLFRKSNLKPFERDISTEIYQAGSTPCNGVEGFNCYFPLQSYGFQPTNGVGYQPYRVVVLSFELLHAPATVCGPKKSTNLVKNKCVNFNFNGLTGTGVLTESNKKFLPFQQFGRDIADTTDAVRDPQTLEILDITPCSFGGVSVITPGTNTSNQVAVLYQDVNCTEVPVAIHADQLTPTWRVYSTGSNVFQTRAGCLIGAEHVNNSYECDIPIGAGICASYQTQTNSPRRARSVASQSIIAYTMSLGAENSVAYSNNSIAICTNFTISVTTEILPVSMTKTSVDCTMYICGDSTECSNLLLQYGSFCTQLNRALTGIAVEQDKNTQEVFAQVKQIYKTPPIKDFGGFNFSQILPDPSKPSKRSFIEDLLFNKVTLADAGFIKQYGDCLGDIAARDLICAQKFNGLTVLPPLLTDEMIAQYTSALLAGTITSGWTFGAGAALQIPFAMQMAYRFNGIGVTQNVLYENQKLIANQFNSAIGKIQDSLSSTASALGKLQDVVNQNAQALNTLVKQLSSNFGAISSVLNDILSRLDKVEAEVQIDRLITGRLQSLQTYVTQQLIRAAEIRASANLAATKMSECVLGQSKRVDFCGKGYHLMSFPQSAPHGVVFLHVTYVCAQEKNFTTAPAICHDGKAHFPREGVFVSNGTHWFVTQRNFYEPQIITTDNTFVSGNCDVVIGIVNNTVYDPLQPELDSFKEELDKYFKNHTSPDVDLGDISGINASVVNIQKEIDRLNEVAKNLNESLIDLQELGKYEQYIKGGGGSDIIKLLNEQVNKEMQSSNLYMSMSSWCYTHSLDGAGLFLFDHAAEEYEHAKKLIIFLNENNVPVQLTSISAPEHKFEGLTQIFQKAYEHEQHISESINNIVDHAIKSKDHATFNFLQWYVAEQHEEEVLFKDILDKIELIGNENHGLYLADQYVKGIAKSRKS

SEQ ID NO: 5137 - protein, 1379 aa, Artificial Sequence
  SARS-CoV-2/SARS-CoV-2/Yunnan-01/human/2020/CHN__MT049951.1 spike protein (1-1211)(P715C_P1069C) Ferritin construct
MFVFLVLLPLVSSQCVNLTTRTQLPPANTNSFTRGVYYPDKVFRSSVLHSTQDLFLPFFSNVTWFHAIHVSGTNGTKRFDNPVLPFNDGVYFASTEKSNIIRGWIFGTTLDSKTQSLLIVNNATNVVIKVCEFQFCNDPFLGVYYHKNNKSWMESEFRVYSSANNCTFEYVSQPFLMDLEGKQGNFKNLREFVFKNIDGYFKIYSKHTPINLVRDLPQGFSALEPLVDLPIGINITRFQTLLALHRSYLTPGDSSSGWTAGAAAYYVGYLQPRTFLLKYNENGTITDAVDCALDPLSETKCTLKSFTVEKGIYQTSNFRVQPTESIVRFPNITNLCPFGEVFNATRFASVYAWNRKRISNCVADYSVLYNSASFSTFKCYGVSPTKLNDLCFTNVYADSFVIRGDEVRQIAPGQTGKIADYNYKLPDDFTGCVIAWNSNNLDSKVGGNYNYLYRLFRKSNLKPFERDISTEIYQAGSTPCNGVEGFNCYFPLQSYGFQPTNGVGYQPYRVVVLSFELLHAPATVCGPKKSTNLVKNKCVNFNFNGLTGTGVLTESNKKFLPFQQFGRDIADTTDAVRDPQTLEILDITPCSFGGVSVITPGTNTSNQVAVLYQDVNCTEVPVAIHADQLTPTWRVYSTGSNVFQTRAGCLIGAEHVNNSYECDIPIGAGICASYQTQTNSPRRARSVASQSIIAYTMSLGAENSVAYSNNSIAICTNFTISVTTEILPVSMTKTSVDCTMYICGDSTECSNLLLQYGSFCTQLNRALTGIAVEQDKNTQEVFAQVKQIYKTPPIKDFGGFNFSQILPDPSKPSKRSFIEDLLFNKVTLADAGFIKQYGDCLGDIAARDLICAQKFNGLTVLPPLLTDEMIAQYTSALLAGTITSGWTFGAGAALQIPFAMQMAYRFNGIGVTQNVLYENQKLIANQFNSAIGKIQDSLSSTASALGKLQDVVNQNAQALNTLVKQLSSNFGAISSVLNDILSRLDKVEAEVQIDRLITGRLQSLQTYVTQQLIRAAEIRASANLAATKMSECVLGQSKRVDFCGKGYHLMSFPQSAPHGVVFLHVTYVCAQEKNFTTAPAICHDGKAHFPREGVFVSNGTHWFVTQRNFYEPQIITTDNTFVSGNCDVVIGIVNNTVYDPLQPELDSFKEELDKYFKNHTSPDVDLGDISGINASVVNIQKEIDRLNEVAKNLNESLIDLQELGKYEQYIKGGGGSDIIKLLNEQVNKEMQSSNLYMSMSSWCYTHSLDGAGLFLFDHAAEEYEHAKKLIIFLNENNVPVQLTSISAPEHKFEGLTQIFQKAYEHEQHISESINNIVDHAIKSKDHATFNFLQWYVAEQHEEEVLFKDILDKIELIGNENHGLYLADQYVKGIAKSRKS

SEQ ID NO: 5138 - protein, 1379 aa, Artificial Sequence
  SARS-CoV-2/USA/WA-UW292/2020__EPI_ISL_418077 spike protein (1-1211)(P715C_P1069C) Ferritin construct
MFVFLVLLPLVSSQCVNLTTRTQLPPAYTNSFTRGVYYPDKVFRSSVLHSTQDLFLPFFSNVTWFHAIHVSGTNGTKRFDNPVLPFNDGVYFASTEKSNIIRGWIFGTTLDSKTQSLLIVNNATNVVIKVCEFQFCNDPFLGVYYHKNNKSWMESEFRVYSSANNCTFEYVSQPFLMDLEGKQGNFKNLREFVFKNIDGYFKIYSKHTPINLVRDLPQGFSALEPLVDLPIGINITRFQTLLALHRSYLTPGDSSSGWTAGAAAYYVGYLQPRTFLLKYNENGTITDAVDCALDPLSETKCTLKSFTVEKGIYQTSNFRVQPTESIVRFPNITNLCPFGEVFNATRFASVYAWNRKRISNCVADYSVLYNSASFSTFKCYGVSPTKLNDLCFTNVYADSFVIRGDEVRQIAPGQTGKIADYNYKLPDDFTGCVIAWNSNNLDSKVGGNYNYLYRLFRKSNLKPFERDISTEIYQASSTPCNGVEGFNCYFPLQSYGFQPTNGVGYQPYRVVVLSFELLHAPATVCGPKKSTNLVKNKCVNFNFNGLTGTGVLTESNKKFLPFQQFGRDIADTTDAVRDPQTLEILDITPCSFGGVSVITPGTNTSNQVAVLYQDVNCTEVPVAIHADQLTPTWRVYSTGSNVFQTRAGCLIGAEHVNNSYECDIPIGAGICASYQTQTNSPRRARSVASQSIIAYTMSLGAENSVAYSNNSIAICTNFTISVTTEILPVSMTKTSVDCTMYICGDSTECSNLLLQYGSFCTQLNRALTGIAVEQDKNTQEVFAQVKQIYKTPPIKDFGGFNFSQILPDPSKPSKRSFIEDLLFNKVTLADAGFIKQYGDCLGDIAARDLICAQKFNGLTVLPPLLTDEMIAQYTSALLAGTITSGWTFGAGAALQIPFAMQMAYRFNGIGVTQNVLYENQKLIANQFNSAIGKIQDSLSSTASALGKLQDVVNQNAQALNTLVKQLSSNFGAISSVLNDILSRLDKVEAEVQIDRLITGRLQSLQTYVTQQLIRAAEIRASANLAATKMSECVLGQSKRVDFCGKGYHLMSFPQSAPHGVVFLHVTYVCAQEKNFTTAPAICHDGKAHFPREGVFVSNGTHWFVTQRNFYEPQIITTDNTFVSGNCDVVIGIVNNTVYDPLQPELDSFKEELDKYFKNHTSPDVDLGDISGINASVVNIQKEIDRLNEVAKNLNESLIDLQELGKYEQYIKGGGGSDIIKLLNEQVNKEMQSSNLYMSMSSWCYTHSLDGAGLFLFDHAAEEYEHAKKLIIFLNENNVPVQLTSISAPEHKFEGLTQIFQKAYEHEQHISESINNIVDHAIKSKDHATFNFLQWYVAEQHEEEVLFKDILDKIELIGNENHGLYLADQYVKGIAKSRKS

SEQ ID NO: 5139 - protein, 1379 aa, Artificial Sequence
  SARS-CoV-2/Iceland/192/2020__EPI_ISL_417819 spike protein (1-1211)(P715C_P1069C) Ferritin construct
MFVFFVLLPLVSSQCVNLTTRTQLPPAYTNSFTRGVYYPDKVFRSSVLHSTQDLFLPFFSNVTWFHAIHVSGTNGTKRFDNPVLPFNDGVYFASTEKSNIIRGWIFGTTLDSKTQSLLIVNNATNVVIKVCEFQFCNDPFLGVYYHKNNKSWMESEFRVYSSANNCTFEYVSQPFLMDLEGKQGNFKNLREFVFKNIDGYFKIYSKHTPINLVRDLPQGFSALEPLVDLPIGINITRFQTLLALHRSYLTPGDSSSGWTAGAAAYYVGYLQPRTFLLKYNENGTITDAVDCALDPLSETKCTLKSFTVEKGIYQTSNFRVQPTESIVRFPNITNLCPFGEVFNATRFASVYAWNRKRISNCVADYSVLYNSASFSTFKCYGVSPTKLNDLCFTNVYADSFVIRGDEVRQIAPGQTGKIADYNYKLPDDFTGCVIAWNSNNLDSKVGGNYNYLYRLFRKSNLKPFERDISTEIYQAGSTPCNGVEGFNCYFPLQSYGFQPTNGVGYQPYRVVVLSFELLHAPATVCGPKKSTNLVKNKCVNFNFNGLTGTGVLTESNKKFLPFQQFGRDIADTTDAVRDPQTLEILDITPCSFGGVSVITPGTNTSNQVAVLYQGVNCTEVPVAIHADQLTPTWRVYSTGSNVFQTRAGCLIGAEHVNNSYECDIPIGAGICASYQTQTNSPRRARSVASQSIIAYTMSLGAENSVAYSNNSIAICTNFTISVTTEILPVSMTKTSVDCTMYICGDSTECSNLLLQYGSFCTQLNRALTGIAVEQDKNTQEVFAQVKQIYKTPPIKDFGGFNFSQILPDPSKPSKRSFIEDLLFNKVTLADAGFIKQYGDCLGDIAARDLICAQKFNGLTVLPPLLTDEMIAQYTSALLAGTITSGWTFGAGAALQIPFAMQMAYRFNGIGVTQNVLYENQKLIANQFNSAIGKIQDSLSSTASALGKLQDVVNQNAQALNTLVKQLSSNFGAISSVLNDILSRLDKVEAEVQIDRLITGRLQSLQTYVTQQLIRAAEIRASANLAATKMSECVLGQSKRVDFCGKGYHLMSFPQSAPHGVVFLHVTYVCAQEKNFTTAPAICHDGKAHFPREGVFVSNGTHWFVTQRNFYEPQIITTDNTFVSGNCDVVIGIVNNTVYDPLQPELDSFKEELDKYFKNHTSPDVDLGDISGINASVVNIQKEIDRLNEVAKNLNESLIDLQELGKYEQYIKGGGGSDIIKLLNEQVNKEMQSSNLYMSMSSWCYTHSLDGAGLFLFDHAAEEYEHAKKLIIFLNENNVPVQLTSISAPEHKFEGLTQIFQKAYEHEQHISESINNIVDHAIKSKDHATFNFLQWYVAEQHEEEVLFKDILDKIELIGNENHGLYLADQYVKGIAKSRKS

SEQ ID NO: 5140 - protein, 1379 aa, Artificial Sequence
  SARS-CoV-2/Belgium/ULG-6939/2020__EPI_ISL_417020 spike protein (1-1211)(P715C_P1069C) Ferritin construct
MFVFLVLLPLVSSQCVNLTTRTQLPPAYTNSFTRGVYYPDKVFRSSVLHSTQDLFLPFFSNVTWFHAIHVSGTNGTKRFDNPVLPFNDGVYFASTEKSNIIRGWIFGTTLDSKTQSLLIVNNATNVVIKVCEFQFCNDPFLGVYYHKNNKSWMESEFRVYSSANNCTFEYVSQPFLMDLEGKQGNFKNLREFVFKNIDGYFKIYSKHTPINLVRDLPQGFSALEPLVDLPIGINITRFQTLLALHRSYLTPGDSSSGWTAGAAAYYVGYLQPRTFLLKYNENGTITDAVDCALDPLSETKCTLKSFTVEKGIYQTSNFRVQPTESIVRFPNITNLCPFGEVFNATRFASVYAWNRKRISNCVADYSVLYNSASFSTFKCYGVSPTKLNDLCFTNVYADSFVIRGDEVRQIAPGQTGKIADYNYKLPDDFTGCVIAWNSNNLDSKVGGNYNYLYRLFRKSNLKPFERDISTEIYQAGSTPCNGVEGFNCYFPLQSYGFQPTNGVGYQPYRVVVLSFELLHAPATVCGPKKSTNLVKNKCVNFNFNGLTGTGVLTESNKKFLPFQQFGRDIADTTDAVRDPQTLEILDITPCSFGGVSVITPGTNTSNQVAVLYQGVNCTEVPVAIHADQLTPTWRVYSTGSNVFQTRAGCLIGAEHVNNSYECDIPIGAGICASYQTQTNSPRRARSVASQSIIAYTMSLGAENSVVYSNNSIAICTNFTISVTTEILPVSMTKTSVDCTMYICGDSTECSNLLLQYGSFCTQLNRALTGIAVEQDKNTQEVFAQVKQIYKTPPIKDFGGFNFSQILPDPSKPSKRSFIEDLLFNKVTLADAGFIKQYGDCLGDIAARDLICAQKFNGLTVLPPLLTDEMIAQYTSALLAGTITSGWTFGAGAALQIPFAMQMAYRFNGIGVTQNVLYENQKLIANQFNSAIGKIQDSLSSTASALGKLQDVVNQNAQALNTLVKQLSSNFGAISSVLNDILSRLDKVEAEVQIDRLITGRLQSLQTYVTQQLIRAAEIRASANLAATKMSECVLGQSKRVDFCGKGYHLMSFPQSAPHGVVFLHVTYVCAQEKNFTTAPAICHDGKAHFPREGVFVSNGTHWFVTQRNFYEPQIITTDNTFVSGNCDVVIGIVNNTVYDPLQPELDSFKEELDKYFKNHTSPDVDLGDISGINASVVNIQKEIDRLNEVAKNLNESLIDLQELGKYEQYIKGGGGSDIIKLLNEQVNKEMQSSNLYMSMSSWCYTHSLDGAGLFLFDHAAEEYEHAKKLIIFLNENNVPVQLTSISAPEHKFEGLTQIFQKAYEHEQHISESINNIVDHAIKSKDHATFNFLQWYVAEQHEEEVLFKDILDKIELIGNENHGLYLADQYVKGIAKSRKS

SEQ ID NO: 5141 - protein, 1379 aa, Artificial Sequence
  SARS-CoV-2/France/HF2496/2020__EPI_ISL_418231 spike protein (1-1211)(P715C_P1069C) Ferritin construct
MFVFLVLLPLVSSQCVNLTTRTQLPPAYTNSFTRGVYYPDKVFRSSVLHSTQDLFLPFFSNVTWFHAIHVSGTNGTKRFDNPVLPFNDGVYFASTEKSNIIRGWIFGTTLDSKTQSLLIVNNATNVVIKVCEFQFCNDPFLGVYYHKNNKSWMESEFRVYSSANNCTFEYVSQPFLMDLEGKQGNFKNLREFVFKNIDGYFKIYSKHTPINLVRDLPQGFSALEPLVDLPIGINITRFQTLLALHRSYLTPGDSSSGWTAGAAAYYVGYLQPRTFLLKYNENGTITDAVDCALDPLSETKCTLKSFTVEKGIYQTSNFRVQPTESIVRFPNITNLCPFGEVFNATRFASVYAWNRKRISNCVADYSVLYNSASFSTFKCYGVSPTKLNDLCFTNVYADSFVIRGDEVRQIAPGQTGKIADYNYKLPDDFTGCVIAWNSNNLDSKVGGNYNYLYRLFRKSNLKPFERDISTEIYQAGSTPCNGVEGFNCYFPLQSYGFQPTNGVGYQPYRVVVLSFELLHAPATVCGPKKSTNLVKNKCVNFNFNGLTGTGVLTESNKKFLPFQQFGRDIADTTDAVRDPQTLEILDITPCSFGGVSVITPGTNTSNQVAVLYQGVNCTEVPVAIHADQLTPTWRVYSTGSNVFQTRAGCLIGAEHVNNSYECDIPIGAGICASYQTQTNSPRRARSVASQSIIAYTMSLGAENSVAYSNNSIAICTNFTISVTTEILPVSMTKTSVDCTMYICGDSTECSNLLLQYGSFCTQLNRALTGIAVEQDKNTQEVFAQVKQIYKTPPIKDFGGFNFSQILPDPSKPSKRSFIEDLLFNKVTLADAGFIKQYGDCLGDIVARDLICAQKFNGLTVLPPLLTDEMIAQYTSALLAGTITSGWTFGAGAALQIPFAMQMAYRFNGIGVTQNVLYENQKLIANQFNSAIGKIQDSLSSTASALGKLQDVVNQNAQALNTLVKQLSSNFGAISSVLNDILSRLDKVEAEVQIDRLITGRLQSLQTYVTQQLIRAAEIRASANLAATKMSECVLGQSKRVDFCGKGYHLMSFPQSAPHGVVFLHVTYVCAQEKNFTTAPAICHDGKAHFPREGVFVSNGTHWFVTQRNFYEPQIITTDNTFVSGNCDVVIGIVNNTVYDPLQPELDSFKEELDKYFKNHTSPDVDLGDISGINASVVNIQKEIDRLNEVAKNLNESLIDLQELGKYEQYIKGGGGSDIIKLLNEQVNKEMQSSNLYMSMSSWCYTHSLDGAGLFLFDHAAEEYEHAKKLIIFLNENNVPVQLTSISAPEHKFEGLTQIFQKAYEHEQHISESINNIVDHAIKSKDHATFNFLQWYVAEQHEEEVLFKDILDKIELIGNENHGLYLADQYVKGIAKSRKS

SEQ ID NO: 5142 - protein, 1379 aa, Artificial Sequence
  SARS-CoV-2/USA/WA-UW291/2020__EPI_ISL_418076 spike protein (1-1211)(P715C_P1069C) Ferritin construct
MFVFLVLLPLVSSQCVNLTTRTQLPPAYTNSFTRGVYYPDKVFRSSVLHSTQDLFLPFFSNVTWFHAIHVSGTNGTKRFDNPVLPFNDGVYFASTEKSNIIRGWIFGTTLDSKTQSLLIVNNATNVVIKVCEFQFCNDPFLGVYYHKNNKSWMESEFRVYSSANNCTFEYVSQPFLMDLEGKQGNFKNLREFVFKNIDGYFKIYSKHTPINLVRDLPQGFSALEPLVDLPIGINITRFQTLLALHRSYLTPGDSSSGWTAGAAAYYVGYLQPRTFLLKYNENGTITDAVDCALDPLSETKCTLKSFTVEKGIYQTSNFRVQPTESIVRFPNITNLCPFGEVFNATRFASVYAWNRKRISNCVADYSVLYNSASFSTFKCYGVSPTKLNDLCFTNVYADSFVIRGDEVRQIAPGQTGKIADYNYKLPDDFTGCVIAWNSNNLDSKVGGNYNYLYRLFRKSNLKPFERDISTEIYQAGSTPCNGVEGFNCYFPLQSYGFQPTNGVGYQPYRVVVLSFELLHAPATVCGPKKSTNLVKNKCVNFNFNGLTGTGVLTESNKKFLPFQQFGRDIADTTDAVRDPQTLEILDITPCSFGGVSVITPGTNTSNQVAVLYQGVNCTEVPVAIHADQLTPTWRVYSTGSNVFQTRAGCLIGAEHVNNSYECDIPIGAGICASYQTQTNSPRRARSVASQSIIAYTMSLGAENSVAYSNNSIAICTNFTISVTTEILPVSMTKTSVDCTMYICGDSTECSNLLLQYGSFCTQLNRALTGIAVEQDKNTQEVFAQVKQIYKTPPIKDFGGFNFSQILPDPSKPSKRSFIEDLLFNKVTLADAGFIKQYGDCLGDIAARDLICAQKFNGLTVLPPLLTDEMIAQYTSALLAGTITSGWTFGAGAALQIPFAMQMAYRFNGIGVTQNVLYENQKLIANQFNSAIGKIQYSLSSTASALGKLQDVVNQNAQALNTLVKQLSSNFGAISSVLNDILSRLDKVEAEVQIDRLITGRLQSLQTYVTQQLIRAAEIRASANLAATKMSECVLGQSKRVDFCGKGYHLMSFPQSAPHGVVFLHVTYVCAQEKNFTTAPAICHDGKAHFPREGVFVSNGTHWFVTQRNFYEPQIITTDNTFVSGNCDVVIGIVNNTVYDPLQPELDSFKEELDKYFKNHTSPDVDLGDISGINASVVNIQKEIDRLNEVAKNLNESLIDLQELGKYEQYIKGGGGSDIIKLLNEQVNKEMQSSNLYMSMSSWCYTHSLDGAGLFLFDHAAEEYEHAKKLIIFLNENNVPVQLTSISAPEHKFEGLTQIFQKAYEHEQHISESINNIVDHAIKSKDHATFNFLQWYVAEQHEEEVLFKDILDKIELIGNENHGLYLADQYVKGIAKSRKS

SEQ ID NO: 5143 - protein, 1379 aa, Artificial Sequence; identical to SEQ ID NO: 5106
  SARS-CoV-2/Portugal/PT0034/2020__EPI_ISL_418019 spike protein (1-1211)(P715C_P1069C) Ferritin construct

SEQ ID NO: 5144 - protein, 1379 aa, Artificial Sequence
  SARS-CoV-2/Iceland/202/2020__EPI_ISL_417750 spike protein (1-1211)(P715C_P1069C) Ferritin construct
MFVFLVLLPLVSSQCVNLTTRTQLPPAYTNSFTRGVYYPDKVFRSSVLHSTQDLFLPFFSNVTWFHAIHVSGTNGTKRFDNPVLPFNDGVYFASTEKSNIIRGWIFGTTLDSKTQSLLIVNNATNVVIKVCEFQFCNDPFLGVYYHKNNKSWMESEFRVYSSANNCTFEYVSQPFLMDLEGKQGNFKNLREFVFKNIDGYFKIYSKHTPINLVRDLPQGFSALEPLVDLPIGINITRFQTLLALHRSYLTPGDSSSGWTAGAAAYYVGYLQPRTFLLKYNENGTITDAVDCALDPLSETKCTLKSFTVEKGIYQTSNFRVQPTESIVRFPNITNLCPFGEVFNATRFASVYAWNRKRISNCVADYSVLYNSASFSTFKCYGVSPTKLNDLCFTNVYADSFVIRGDEVRQIAPGQTGKIADYNYKLPDDFTGCVIAWNSNNLDSKVGGNYNYLYRLFRKSNLKPFERDISTEIYQAGSTPCNGVEGFNCYFPLQSYGFQPTNGVGYQPYRVVVLSFELLHAPATVCGPKKSTNLVKNKCVNFNFNGLTGTGVLTESNKKFLPFQQFGRDIADTTDAVRDPQTLEILDITPCSFGGVSVITPGTNTSNQVAVLYQDVNCTEVPVAIHADQLTPTWRVYSTGSNVFQTRAGCLIGAEHVNNSYECDIPIGAGICASYQTQTNSPRRARSVASQSIIAYTMSLGAENSVAYSNNSIAICTNFTISVTTEILPVSMTKTSVDCTMYICGDSTECSNLLLQYGSFCTQLNRALTGIAVEQDKNTQEVFAQVKQIYKTPPIKDFGGFNFSQILPDPSKPSKRSFIEDLLFNKVTLADAGFIKQYGDCLGDIAARDLICAQKFNGLTVLPPLLTDEMIAQYTSALLAGTITSGWTFGAGAALQIPFAMQMAYRFNGIGVTQNVLYENQKLIANQFNSAIGKIQDSLSSTASALGKLQDVVNQNAQALNTLVKQLSSNFGAISSVLNDILSRLDKVEAEVQIDRLITGRLQSLQTYVTQQLIRAAEIRASANLAATKMSECVLGQSKRVDFCGKGYHLMSFPQSAPHGVVFLHVTYVCAQEKNFTTAPAICHDGKAHFPREGVFVSNGTHWFVTQRNFYEPQIITTDNTFVSGNCDVVIGIVNNTVYDPLQPELDSFKEELDKYFKNHTSPDVDLGDIPGINASVVNIQKEIDRLNEVAKNLNESLIDLQELGKYEQYIKGGGGSDIIKLLNEQVNKEMQSSNLYMSMSSWCYTHSLDGAGLFLFDHAAEEYEHAKKLIIFLNENNVPVQLTSISAPEHKFEGLTQIFQKAYEHEQHISESINNIVDHAIKSKDHATFNFLQWYVAEQHEEEVLFKDILDKIELIGNENHGLYLADQYVKGIAKSRKS

SEQ ID NO: 5145 - protein, 1379 aa, Artificial Sequence
  SARS-CoV-2/USA/WA-UW261/2020__EPI_ISL_418046 spike protein (1-1211)(P715C_P1069C) Ferritin construct
MFVFLVLLPLVSSQCVNLTTRTQLPPAYTNSFTRGVYYPDKVFRSSVLHSTQDLFLPFFSNVTWFHAIHVSGTNGTKRFDNPVLPFNDGVYFASTEKSNIIRGWIFGTTLDSKTQSLLIVNNATNVVIKVCEFQFCNDPFLGVYYHKNNKSWMESEFRVYSSANNCTFEYVSQPFLMDLEGKQGNFKNLREFVFKNIDGYFKIYSKHTPINLVRDLPQGFSALEPLVDLPIGINITRFQTLLALHRSYLTPGDSSSGWTAGAAAYYVGYLQPRTFLLKYNENGTITDAVDCALDPLSETKCTLKSFTVEKGIYQTSNFRVQPTESIVRFPNITNLCPFGEVFNATRFTSVYAWNRKRISNCVADYSVLYNSASFSTFKCYGVSPTKLNDLCFTNVYADSFVIRGDEVRQIAPGQTGKIADYNYKLPDDFTGCVIAWNSNNLDSKVGGNYNYLYRLFRKSNLKPFERDISTEIYQAGSTPCNGVEGFNCYFPLQSYGFQPTNGVGYQPYRVVVLSFELLHAPATVCGPKKSTNLVKNKCVNFNFNGLTGTGVLTESNKKFLPFQQFGRDIADTTDAVRDPQTLEILDITPCSFGGVSVITPGTNTSNQVAVLYQDVNCTEVPVAIHADQLTPTWRVYSTGSNVFQTRAGCLIGAEHVNNSYECDIPIGAGICASYQTQTNSPRRARSVASQSIIAYTMSLGAENSVAYSNNSIAICTNFTISVTTEILPVSMTKTSVDCTMYICGDSTECSNLLLQYGSFCTQLNRALTGIAVEQDKNTQEVFAQVKQIYKTPPIKDFGGFNFSQILPDPSKPSKRSFIEDLLFNKVTLADAGFIKQYGDCLGDIAARDLICAQKFNGLTVLPPLLTDEMIAQYTSALLAGTITSGWTFGAGAALQIPFAMQMAYRFNGIGVTQNVLYENQKLIANQFNSAIGKIQDSLSSTASALGKLQDVVNQNAQALNTLVKQLSSNFGAISSVLNDILSRLDKVEAEVQIDRLITGRLQSLQTYVTQQLIRAAEIRASANLAATKMSECVLGQSKRVDFCGKGYHLMSFPQSAPHGVVFLHVTYVCAQEKNFTTAPAICHDGKAHFPREGVFVSNGTHWFVTQRNFYEPQIITTDNTFVSGNCDVVIGIVNNTVYDPLQPELDSFKEELDKYFKNHTSPDVDLGDISGINASVVNIQKEIDRLNEVAKNLNESLIDLQELGKYEQYIKGGGGSDIIKLLNEQVNKEMQSSNLYMSMSSWCYTHSLDGAGLFLFDHAAEEYEHAKKLIIFLNENNVPVQLTSISAPEHKFEGLTQIFQKAYEHEQHISESINNIVDHAIKSKDHATFNFLQWYVAEQHEEEVLFKDILDKIELIGNENHGLYLADQYVKGIAKSRKS

SEQ ID NO: 5146 - protein, 1379 aa, Artificial Sequence
  SARS-CoV-2/Portugal/PT0035/2020__EPI_ISL_418020 spike protein (1-1211)(P715C_P1069C) Ferritin construct
MFVFLVLLPLVSSQCVNLTTRTQLPPAYTNSFTRGVYYPDKVFRSSVLHSTQDLFLPFFSNVTWFHAIHVSGTNGTKRFDNPVLPFNDGVYFASTEKSNIIRGWIFGTTLDSKTQSLLIVNNATNVVIKVCEFQFCNDPFLGVYYHKNNKSWMESEFRVYSSANNCTFEYVSQPFLMDLEGKQGNFKNLREFVFKNIDGYFKIYSKHTPINLVRDLPQGFSALEPLVDLPIGINITRFQTLLALHRSYLTPGDSSSGWTAGAAAYYVGYLQPRTFLLKYNENGTITDAVDCALDPLSETKCTLKSFTVEKGIYQTSNFRVQPTESIVRFPNITNLCPFGEVFNATRFASVYAWNRKRISNCVADYSVLYNSASFSTFKCYGVSPTKLNDLCFTNVYADSFVIRGDEVRQIAPGQTGKIADYNYKLPDDFTGCVIAWNSNNLDSKVGGNYNYLYRLFRKSNLKPFERDISTEIYQAGSTPCNGVEGFNCYFPLQSYGFQPTNGVGYQPYRVVVLSFELLHAPATVCGPKKSTNLVKNKCVNFNFNGLTGTGVLTESNKKFLPFQQFGRDIADTTDAVRDPQTLEILDITPCSFGGVSVITPGTNTSNQVAVLYQDVNCTEVPVAIHADQLTPTWRVYSTGSNVFQTRAGCLIGAEHVNNSYECDIPIGAGICASYQTQTNSPRRARSVASQSIIAYTMSLGAENSVAYSNNSIAICTNFTISVTTEILPVSMTKTSVDCTMYICGDSTECSNLLLQYGSFCTQLNRALTGIAVEQDKNTQEVFAQVKQIYKTPPIKDFGGFNFSQILPDPSKPSKRSFIEDLLFNKVTLADAGFIKQYGDCLGDISARDLICAQKFNGLTVLPPLLTDEMIAQYTSALLAGTITSGWTFGAGAALQIPFAMQMAYRFNGIGVTQNVLYENQKLIANQFNSAIGKIQDSLSSTASALGKLQDVVNQNAQALNTLVKQLSSNFGAISSVLNDILSRLDKVEAEVQIDRLITGRLQSLQTYVTQQLIRAAEIRASANLAATKMSECVLGQSKRVDFCGKGYHLMSFPQSAPHGVVFLHVTYVCAQEKNFTTAPAICHDGKAHFPREGVFVSNGTHWFVTQRNFYEPQIITTDNTFVSGNCDVVIGIVNNTVYDPLQPELDSFKEELDKYFKNHTSPDVDLGDISGINASVVNIQKEIDRLNEVAKNLNESLIDLQELGKYEQYIKGGGGSDIIKLLNEQVNKEMQSSNLYMSMSSWCYTHSLDGAGLFLFDHAAEEYEHAKKLIIFLNENNVPVQLTSISAPEHKFEGLTQIFQKAYEHEQHISESINNIVDHAIKSKDHATFNFLQWYVAEQHEEEVLFKDILDKIELIGNENHGLYLADQYVKGIAKSRKS

SEQ ID NO: 5147 - protein, 1379 aa, Artificial Sequence
  SARS-CoV-2/USA/NY-NYUMC7/2020__EPI_ISL_418192 spike protein (1-1211)(P715C_P1069C) Ferritin construct
MFVFLVLLPLVSSQCVNLTTRTQLPPAYTNSFTRGVYYPDKVFRSSVLHSTQDLFLPFFSNVTWFHAIHVSGTNGTKRFDNPVLPFNDGVYFASTEKSNIIRGWIFGTTLDSKTQSLLIVNNATNVVIKVCEFQFCNDPFLGVYHHKNNKSWMESEFRVYSSANNCTFEYVSQPFLMDLEGKQGNFKNLREFVFKNIDGYFKIYSKHTPINLVRDLPQGFSALEPLVDLPIGINITRFQTLLALHRSYLTPGDSSSGWTAGAAAYYVGYLQPRTFLLKYNENGTITDAVDCALDPLSETKCTLKSFTVEKGIYQTSNFRVQPTESIVRFPNITNLCPFGEVFNATRFASVYAWNRKRISNCVADYSVLYNSASFSTFKCYGVSPTKLNDLCFTNVYADSFVIRGDEVRQIAPGQTGKIADYNYKLPDDFTGCVIAWNSNNLDSKVGGNYNYLYRLFRKSNLKPFERDISTEIYQAGSTPCNGVEGFNCYFPLQSYGFQPTNGVGYQPYRVVVLSFELLHAPATVCGPKKSTNLVKNKCVNFNFNGLTGTGVLTESNKKFLPFQQFGRDIADTTDAVRDPQTLEILDITPCSFGGVSVITPGTNTSNQVAVLYQGVNCTEVPVAIHADQLTPTWRVYSTGSNVFQTRAGCLIGAEHVNNSYECDIPIGAGICASYQTQTNSPRRARSVASQSIIAYTMSLGAENSVAYSNNSIAICTNFTISVTTEILPVSMTKTSVDCTMYICGDSTECSNLLLQYGSFCTQLNRALTGIAVEQDKNTQEVFAQVKQIYKTPPIKDFGGFNFSQILPDPSKPSKRSFIEDLLFNKVTLADAGFIKQYGDCLGDIAARDLICAQKFNGLTVLPPLLTDEMIAQYTSALLAGTITSGWTFGAGAALQIPFAMQMAYRFNGIGVTQNVLYENQKLIANQFNSAIGKIQDSLSSTASALGKLQDVVNQNAQALNTLVKQLSSNFGAISSVLNDILSRLDKVEAEVQIDRLITGRLQSLQTYVTQQLIRAAEIRASANLAATKMSECVLGQSKRVDFCGKGYHLMSFPQSAPHGVVFLHVTYVCAQEKNFTTAPAICHDGKAHFPREGVFVSNGTHWFVTQRNFYEPQIITTDNTFVSGNCDVVIGIVNNTVYDPLQPELDSFKEELDKYFKNHTSPDVDLGDISGINASVVNIQKEIDRLNEVAKNLNESLIDLQELGKYEQYIKGGGGSDIIKLLNEQVNKEMQSSNLYMSMSSWCYTHSLDGAGLFLFDHAAEEYEHAKKLIIFLNENNVPVQLTSISAPEHKFEGLTQIFQKAYEHEQHISESINNIVDHAIKSKDHATFNFLQWYVAEQHEEEVLFKDILDKIELIGNENHGLYLADQYVKGIAKSRKS

SEQ ID NO: 5148 - protein, 1379 aa, Artificial Sequence
  SARS-CoV-2/Iceland/189/2020__EPI_ISL_417709 spike protein (1-1211)(P715C_P1069C) Ferritin construct
MFVFLVLLPLVSSQCVNLTTRTQLPPAYTNSFTRGVYYPDKVFRSSVLHSTQDLFLPFFSNVTWFHAIHVSGTNGTKRFDNPVLPFNDGVYFASTEKSNIIRGWIFGTTLDSKTQSLLIVNNATNVVIKVCEFQFCNDPFLGVYYHKNNKSWMESEFRVYSSANNCTFEYVSQPFLMDLEGKQGNFKNLREFVFKNIDGYFKIYSKHTPINLVRDLPQGFSALEPLVDLPIGINITRFQTLLALHRSYLTPGDSSSGWTAGAAAYYVGYLQPRTFLLKYNENGTITDAVDCALDPLSETKCTLKSFTVEKGIYQTSNFRVQPTESIVRFPNITNLCPFGEVFNATRFASVYAWNRKRISNCVADYSVLYNSASFSTFKCYGVSPTKLNDLCFTNVYADSFVIRGDEVRQIAPGQTGKIADYNYKLPDDFTGCVIAWNSNNLDSKVGGNYNYLYRLFRKSNLKPFERDISTEIYQAGSTPCNGVEGFNCYFPLQSYGFQPTNGVGYQPYRVVVLSFELLHAPATVCGPKKSTNLVKNKCVNFNFNGLTGTGVLTESNKKFLPFQQFGRDIADTTDAVRDPQTLEILDITPCSFGGVSVITPGTNTSNQVAVLYQGVNCTEVPVAIHADQLTPTWRVYSTGSNVFQTRAGCLIGAEHVNNSYECDIPIGAGICASYQTQTNSPRRARSVASQSIIAYTMSLGAENSVAYSNNSIAICTNFTISVTTEILPVSMTKTSVDCTMYICGDSTECSNLLLQYGSFCTQLNRALTGIAVEQDKNTQEVFAQVKQIYKTPPIKDFGGFNFSQILPDPSKPSKRSFIEDLLFNKVTLADAGFTKQYGDCLGDIAARDLICAQKFNGLTVLPPLLTDEMIAQYTSALLAGTITSGWTFGAGAALQIPFAMQMAYRFNGIGVTQNVLYENQKLIANQFNSAIGKIQDSLSSTASALGKLQDVVNQNAQALNTLVKQLSSNFGAISSVLNDILSRLDKVEAEVQIDRLITGRLQSLQTYVTQQLIRAAEIRASANLAATKMSECVLGQSKRVDFCGKGYHLMSFPQSAPHGVVFLHVTYVCAQEKNFTTAPAICHDGKAHFPREGVFVSNGTHWFVTQRNFYEPQIITTDNTFVSGNCDVVIGIVNNTVYDPLQPELDSFKEELDKYFKNHTSPDVDLGDISGINASVVNIQKEIDRLNEVAKNLNESLIDLQELGKYEQYIKGGGGSDIIKLLNEQVNKEMQSSNLYMSMSSWCYTHSLDGAGLFLFDHAAEEYEHAKKLIIFLNENNVPVQLTSISAPEHKFEGLTQIFQKAYEHEQHISESINNIVDHAIKSKDHATFNFLQWYVAEQHEEEVLFKDILDKIELIGNENHGLYLADQYVKGIAKSRKS

SEQ ID NO: 5149 - protein, 1379 aa, Artificial Sequence
  SARS-CoV-2/Australia/NSW56/2020__EPI_ISL_417408 spike protein (1-1211)(P715C_P1069C) Ferritin construct
MFVFLVLLPLVSSQCVNLTTRTQLPPAYTNSFTRGVYYPDKVFRSSVLHSTQDLFLPFFSNVTWFHAIHVSGTNGTKRFDNPVLPFNDGVYFASTEKSNIIRGWIFGTTLDSKTQSLLIVNNATNVVIKVCEFQFCNDPFLGVYYHKNNKSWMESEFRVYSSANNCTFEYVSQPFLMDLEGKQGNFKNLREFVFKNIDGYFKIYSKHTPINLVRDLPQGFSALEPLVDLPIGINITRFQTLLALHRSYLTPGDSSSGWTAGAAAYYVGYLQPRTFLLKYNENGTITDAVDCALDPLSETKCTLKSFTVEKGIYQTSNFRVQPTESIVRFPNITNLCPFGEVFNATRFASVYAWNRKRISNCVADYSVLYNSASFSTFKCYGVSPTKLNDLCFTNVYADSFVIRGDEVRQIAPGQTGKIADYNYKLPDDFTGCVIAWNSNNLDSKVGGNYNYLYRLFRKSNLKPFERDISTEIYQAGSTPCNGVEGFNCYFPLQSYGFQPTNGVGYQPYRVVVLSFELLHAPATVCGPKKSTNLVKNKCVNFNFNGLTGTGVLTESNKKFLPFQQFGRDIADTTDAVRDPQTLEILDITPCSFGGVSVITPGTNTSNQVAVLYQDVNCTEVPVAIHADQLTPTWRVYSTGSNVFQTRAGCLIGAEHVNNSYECDIPIGAGICASYQTQTNSPRRARSVASQSIIAYTMSLGAENSVAYSNNSIAICTNFTISVTTEILPVSMTKTSVDCTMYICGDSTECSNLLLQYGSFCTQLNRALTGIAVEQDKNTQEVFAQVKQIYKTPPIKDFGGFNFSQILPDSSKPSKRSFIEDLLFNKVTLADAGFIKQYGDCLGDIAARDLICAQKFNGLTVLPPLLTDEMIAQYTSALLAGTITSGWTFGAGAALQIPFAMQMAYRFNGIGVTQNVLYENQKLIANQFNSAIGKIQDSLSSTASALGKLQDVVNQNAQALNTLVKQLSSNFGAISSVLNDILSRLDKVEAEVQIDRLITGRLQSLQTYVTQQLIRAAEIRASANLAATKMSECVLGQSKRVDFCGKGYHLMSFPQSAPHGVVFLHVTYVCAQEKNFTTAPAICHDGKAHFPREGVFVSNGTHWFVTQRNFYEPQIITTDNTFVSGNCDVVIGIVNNTVYDPLQPELDSFKEELDKYFKNHTSPDVDLGDISGINASVVNIQKEIDRLNEVAKNLNESLIDLQELGKYEQYIKGGGGSDIIKLLNEQVNKEMQSSNLYMSMSSWCYTHSLDGAGLFLFDHAAEEYEHAKKLIIFLNENNVPVQLTSISAPEHKFEGLTQIFQKAYEHEQHISESINNIVDHAIKSKDHATFNFLQWYVAEQHEEEVLFKDILDKIELIGNENHGLYLADQYVKGIAKSRKS

SEQ ID NO: 5150 - protein, 1379 aa, Artificial Sequence
  SARS-CoV-2/Iceland/280/2020__EPI_ISL_417608 spike protein (1-1211)(P715C_P1069C) Ferritin construct
MFVFLVLLPLVSSQCVNLTTRTQLPPAYTNSFTRGVYYPDKVFRSSVLHSTQDLFLPFFSNVTWFHAIHVSGTNGTKRFDNPVLPFNDGVYFASTEKSNIIRGWIFGTTLDSKTQSLLIVNNATNVVIKVCEFQFCNDPFLGVYYHKNNKSWMESEFRVYSSANNCTFEYVSQPFLMDLEGKQGNFKNLREFVFKNIDGYFKIYSKHTPINLVRDLPQGFSALEPLVDLPIGINITRFQTLLALHRSYLTPGDSSSGWTAGAAAYYVGYLQPRTFLLKYNENGTITDAVDCALDPLSETKCTLKSFTVEKGIYQTSNFRVQPTESIVRFPNITNLCPFGEVFNATRFASVYAWNRKRISNCVADYSVLYNSASFSTFKCYGVSPTKLNDLCFTNVYADSFVIRGDEVRQIAPGQTGKIADYNYKLPDDFTGCVIAWNSNNLDSKVGGNYNYLYRLFRKSNLKPFERDISTEIYQAGSTPCNGVEGFNCYFPLQSYGFQPTNGVGYQPYRVVVLSFELLHAPATVCGPKKSTNLVKNKCVNFNFNGLTGTGVLTESNKKFLPFQQFGRDIADTTDAVRDPQTLEILDITPCSFGGVSVITPGTNTSNQVAVLYQGVNCTEVPVAIHADQLTPTWRVYSTGSNVFQTRAGCLIGAEHVNNSYECDIPIGAGICASYHTQTNSPRRARSVASQSIIAYTMSLGAENSVAYSNNSIAICTNFTISVTTEILPVSMTKTSVDCTMYICGDSTECSNLLLQYGSFCTQLNRALTGIAVEQDKNTQEVFAQVKQIYKTPPIKDFGGFNFSQILPDPSKPSKRSFIEDLLFNKVTLADAGFIKQYGDCLGDIAARDLICAQKFNGLTVLPPLLTDEMIAQYTSALLAGTITSGWTFGAGAALQIPFAMQMAYRFNGIGVTQNVLYENQKLIANQFNSAIGKIQDSLSSTASALGKLQDVVNQNAQALNTLVKQLSSNFGAISSVLNDILSRLDKVEAEVQIDRLITGRLQSLQTYVTQQLIRAAEIRASANLAATKMSECVLGQSKRVDFCGKGYHLMSFPQSAPHGVVFLHVTYVCAQEKNFTTAPAICHDGKAHFPREGVFVSNGTHWFVTQRNFYEPQIITTDNTFVSGNCDVVIGIVNNTVYDPLQPELDSFKEELDKYFKNHTSPDVDLGDISGINASVVNIQKEIDRLNEVAKNLNESLIDLQELGKYEQYIKGGGGSDIIKLLNEQVNKEMQSSNLYMSMSSWCYTHSLDGAGLFLFDHAAEEYEHAKKLIIFLNENNVPVQLTSISAPEHKFEGLTQIFQKAYEHEQHISESINNIVDHAIKSKDHATFNFLQWYVAEQHEEEVLFKDILDKIELIGNENHGLYLADQYVKGIAKSRKS

SEQ ID NO: 5151 - protein, 1379 aa, Artificial Sequence; identical to SEQ ID NO: 5106
  SARS-CoV-2/Iceland/247/2020__EPI_ISL_417575 spike protein (1-1211)(P715C_P1069C) Ferritin construct

SEQ ID NO: 5152 - protein, 1379 aa, Artificial Sequence
  SARS-CoV-2/Iceland/238/2020__EPI_ISL_417566 spike protein (1-1211)(P715C_P1069C) Ferritin construct
MFVFLVLLPLVSSQCVNLTTRTQLPPAYTNSFTRGVYYPDKVFRSSVLHSTQDLFLPFFSNVTWFHAIHVSGTNGTKRFDNPVLPFNDGVYFASTEKSNIIRGWIFGTTLDSKTQSLLIVNNATNVVIKVCEFQFCNDPFLGVYYHKNNKSWMESEFRVYSSANNCTFEYVSQPFLMDLEGKQGNFKNLREFVFKNIDGYFKIYSKHTPINLVRDLPQGFSALEPLVDLPIGINITRFQTLLALHRSYLTPGDSSSGWTAGAAAYYVGYLQPRTFLLKYNENGTITDAVDCALDPLSETKCTLKSFTVEKGIYQTSNFRVQPTESIVRFPNITNLCPFGEVFNATRFASVYAWNRKRISNCVADYSVLYNSASFSTFKCYGVSPTKLNDLCFTNVYADSFVIRGDEVRQIAPGQTGKIADYNYKLPDDFTGCVIAWNSNNLDSKVGGNYNYLYRLFRKSNLKPFERDISTEIYQAGSTPCNGVEGFNCYFPLQSYGFQPTNGVGYQPYRVVVLSFELLHAPATVCGPKKSTNLVKNKCVNFNFNGLTGTGVLTESNKKFLPFQQFGRDIADTTDAVRDPQTLEILDITPCSFGGVSVITPGTNTSNQVAVLYQGVNCTEVPVAIHADQLTPTWRVYSTGSNVFQTRAGCLIGAEHVNNSYECDIPIGAGICASYQTQTNSPRRARSVASQSIIAYTMSLGAENSVAYSNNSIAICTNFTISVTTEILPVSMTKTSVDCTMYICGDSTECSNLLLQYGSFCTQLNRALTGIAVEQDKNTQEVFAQVKQIYKTPPIKDFGGFNFSQILPDPSKPSKRSFIEDLLFNKVTLADVGFIKQYGDCLGDIAARDLICAQKFNGLTVLPPLLTDEMIAQYTSALLAGTITSGWTFGAGAALQIPFAMQMAYRFNGIGVTQNVLYENQKLIANQFNSAIGKIQDSLSSTASALGKLQDVVNQNAQALNTLVKQLSSNFGAISSVLNDILSRLDKVEAEVQIDRLITGRLQSLQTYVTQQLIRAAEIRASANLAATKMSECVLGQSKRVDFCGKGYHLMSFPQSAPHGVVFLHVTYVCAQEKNFTTAPAICHDGKAHFPREGVFVSNGTHWFVTQRNFYEPQIITTDNTFVSGNCDVVIGIVNNTVYDPLQPELDSFKEELDKYFKNHTSPDVDLGDISGINASVVNIQKEIDRLNEVAKNLNESLIDLQELGKYEQYIKGGGGSDIIKLLNEQVNKEMQSSNLYMSMSSWCYTHSLDGAGLFLFDHAAEEYEHAKKLIIFLNENNVPVQLTSISAPEHKFEGLTQIFQKAYEHEQHISESINNIVDHAIKSKDHATFNFLQWYVAEQHEEEVLFKDILDKIELIGNENHGLYLADQYVKGIAKSRKS

SEQ ID NO: 5153 - protein, 1379 aa, Artificial Sequence
  SARS-CoV-2/Greece/16/2020__EPI_ISL_418265 spike protein (1-1211)(P715C_P1069C) Ferritin construct
MFVFLVLLPLVSSQCVNLTTRTQLPPAYTNSFTRGVYYPDKVFRSSVLHSTQDLFLPFFSNVTWFHAIHVSGTNGTKRFDNPVLPFNDGVYFASTEKSNIIRGWIFGTTLDSKTQSLLIVNNATNVVIKVCEFQFCNDPFLGVYYHKNNKSWMESEFRVYSSANNCTFEYVSQPFLMDLEGKQGNFKNLREFVFKNVDGYFKIYSKHTPINLVRDLPQGFSALEPLVDLPIGINITRFQTLLALHRSYLTPGDSSSGWTAGAAAYYVGYLQPRTFLLKYNENGTITDAVDCALDPLSETKCTLKSFTVEKGIYQTSNFRVQPTESIVRFPNITNLCPFGEVFNATRFASVYAWNRKRISNCVADYSVLYNSASFSTFKCYGVSPTKLNDLCFTNVYADSFVIRGDEVRQIAPGQTGKIADYNYKLPDDFTGCVIAWNSNNLDSKVGGNYNYLYRLFRKSNLKPFERDISTEIYQAGSTPCNGVEGFNCYFPLQSYGFQPTNGVGYQPYRVVVLSFELLHAPATVCGPKKSTNLVKNKCVNFNFNGLTGTGVLTESNKKFLPFQQFGRDIADTTDAVRDPQTLEILDITPCSFGGVSVITPGTNTSNQVAVLYQDVNCTEVPVAIHADQLTPTWRVYSTGSNVFQTRAGCLIGAEHVNNSYECDIPIGAGICASYQTQTNSPRRARSVASQSIIAYTMSLGAENSVAYSNNSIAICTNFTISVTTEILPVSMTKTSVDCTMYICGDSTECSNLLLQYGSFCTQLNRALTGIAVEQDKNTQEVFAQVKQIYKTPPIKDFGGFNFSQILPDPSKPSKRSFIEDLLFNKVTLADAGFIKQYGDCLGDIAARDLICAQKFNGLTVLPPLLTDEMIAQYTSALLAGTITSGWTFGAGAALQIPFAMQMAYRFNGIGVTQNVLYENQKLIANQFNSAIGKIQDSLSSTASALGKLQDVVNQNAQALNTLVKQLSSNFGAISSVLNDILSRLDKVEAEVQIDRLITGRLQSLQTYVTQQLIRAAEIRASANLAATKMSECVLGQSKRVDFCGKGYHLMSFPQSAPHGVVFLHVTYVCAQEKNFTTAPAICHDGKAHFPREGVFVSNGTHWFVTQRNFYEPQIITTDNTFVSGNCDVVIGIVNNTVYDPLQPELDSFKEELDKYFKNHTSPDVDLGDISGINASVVNIQKEIDRLNEVAKNLNESLIDLQELGKYEQYIKGGGGSDIIKLLNEQVNKEMQSSNLYMSMSSWCYTHSLDGAGLFLFDHAAEEYEHAKKLIIFLNENNVPVQLTSISAPEHKFEGLTQIFQKAYEHEQHISESINNIVDHAIKSKDHATFNFLQWYVAEQHEEEVLFKDILDKIELIGNENHGLYLADQYVKGIAKSRKS

SEQ ID NO: 5154 - protein, 1379 aa, Artificial Sequence
  SARS-CoV-2/Iceland/319/2020__EPI_ISL_417648 spike protein (1-1211)(P715C_P1069C) Ferritin construct
MFVFLVLLPLVSSQCVNLTTRTQLPPAYTNSFTRGVYYPDKVFRSSVLHSTQDLFLPFFSNVTWFHAIHVSGTNGTKRFDNPVLPFNDGVYFASTEKSNIIRGWIFGTTLDSKTQSLLIVNNATNVVIKVCEFQFCNDPFLGVYYHKNNKSWMESEFRVYSSANNCTFEYVSQPFLIDLEGKQGNFKNLREFVFKNIDGYFKIYSKHTPINLVRDLPQGFSALEPLVDLPIGINITRFQTLLALHRSYLTPGDSSSGWTAGAAAYYVGYLQPRTFLLKYNENGTITDAVDCALDPLSETKCTLKSFTVEKGIYQTSNFRVQPTESIVRFPNITNLCPFGEVFNATRFASVYAWNRKRISNCVADYSVLYNSASFSTFKCYGVSPTKLNDLCFTNVYADSFVIRGDEVRQIAPGQTGKIADYNYKLPDDFTGCVIAWNSNNLDSKVGGNYNYLYRLFRKSNLKPFERDISTEIYQAGSTPCNGVEGFNCYFPLQSYGFQPTNGVGYQPYRVVVLSFELLHAPATVCGPKKSTNLVKNKCVNFNFNGLTGTGVLTESNKKFLPFQQFGRDIADTTDAVRDPQTLEILDITPCSFGGVSVITPGTNTSNQVAVLYQGVNCTEVPVAIHADQLTPTWRVYSTGSNVFQTRAGCLIGAEHVNNSYECDIPIGAGICASYQTQTNSPRRARSVASQSIIAYTMSLGAENSVAYSNNSIAICTNFTISVTTEILPVSMTKTSVDCTMYICGDSTECSNLLLQYGSFCTQLNRALTGIAVEQDKNTQEVFAQVKQIYKTPPIKDFGGFNFSQILPDPSKPSKRSFIEDLLFNKVTLADAGFIKQYGDCLGDIAARDLICAQKFNGLTVLPPLLTDEMIAQYTSALLAGTITSGWTFGAGAALQIPFAMQMAYRFNGIGVTQNVLYENQKLIANQFNSAIGKIQDSLSSTASALGKLQDVVNQNAQALNTLVKQLSSNFGAISSVLNDILSRLDKVEAEVQIDRLITGRLQSLQTYVTQQLIRAAEIRASANLAATKMSECVLGQSKRVDFCGKGYHLMSFPQSAPHGVVFLHVTYVCAQEKNFTTAPAICHDGKAHFPREGVFVSNGTHWFVTQRNFYEPQIITTDNTFVSGNCDVVIGIVNNTVYDPLQPELDSFKEELDKYFKNHTSPDVDLGDISGINASVVNIQKEIDRLNEVAKNLNESLIDLQELGKYEQYIKGGGGSDIIKLLNEQVNKEMQSSNLYMSMSSWCYTHSLDGAGLFLFDHAAEEYEHAKKLIIFLNENNVPVQLTSISAPEHKFEGLTQIFQKAYEHEQHISESINNIVDHAIKSKDHATFNFLQWYVAEQHEEEVLFKDILDKIELIGNENHGLYLADQYVKGIAKSRKS

SEQ ID NO: 5155 - protein, 1379 aa, Artificial Sequence
  SARS-CoV-2/Congo/94/2020__EPI_ISL_417947 spike protein (1-1211)(P715C_P1069C) Ferritin construct
MFVFLVLLPLVSSQCVNLTTRTQLPPAYTNSFTRGVYYPDKVFRSSVLHSTQDLFLPFFSNVTWFHAIHVSGTNGTKRFDNPVLPFNDGVYFASTEKSNIIRGWIFGTTLDSKTQSLLIVNNATNVVIKVCEFQFCNDPFLGVYYHKNNKSWMESEFRVYSSANNCTFEYVSQPFLMDLEGKQGNFKNLREFVFKNIDGYFKIYSKHTPINLVRDLPQGFSALEPLVDLPIGINITRFQTLLALHRSYLTPGDSSSGWTAGAAAYYVGYLQPRTFLLKYNENGTITDAVDCALDPLSETKCTLKSFTVEKGIYQTSNFRVQPTESIVRFPNITNLCPFGEVFNATRFASVYAWNRKRISNCVADYSVLYNSASFSTFKCYGVSPTKLNDLCFTNVYADSFVIRGDEVRQIAPGQTGKIADYNYKLPDDFTGCVIAWNSNNLDSKVGGNYNYLYRLFRKSNLKPFERDISTEIYQAGSTPCNGVEGFNCYFPLQSYGFQPTNGVGYQPYRVVVLSFELLHAPATVCGPKKSTNLVKNKCVNFNFNGLTGTGVLTESNKKFLPFQQFGRDIADTTDAVRDPQTLEILDITPCSFGGVSVITPGTNTSNQVAVLYQGVNCTEVPVAIHADQLTPTWRVYSTGSNVFQTRAGCLIGAEHVNNSYECDIPIGAGICASYQTQTNSPRRARSVASQSIIAYTMSLGAENSVAYSNNSIAICTNFTISVTTEILPVSMTKTSVDCTMYICGDSTECSNLLLQYGSFCTQLNRALTGIAVEQDKNTQEVFAQVKQIYKTPPIKDFGGFNFSQILPDPSKPSKRSFIEDILFNKVTLADAGFIKQYGDCLGDIAARDLICAQKFNGLTVLPPLLTDEMIAQYTSALLAGTITSGWTFGAGAALQIPFAMQMAYRFNGIGVTQNVLYENQKLIANQFNSAIGKIQDSLSSTASALGKLQDVVNQNAQALNTLVKQLSSNFGAISSVLNDILSRLDKVEAEVQIDRLITGRLQSLQTYVTQQLIRAAEIRASANLAATKMSECVLGQSKRVDFCGKGYHLMSFPQSAPHGVVFLHVTYVCAQEKNFTTAPAICHDGKAHFPREGVFVSNGTHWFVTQRNFYEPQIITTDNTFVSGNCDVVIGIVNNTVYDPLQPELDSFKEELDKYFKNHTSPDVDLGDISGINASVVNIQKEIDRLNEVAKNLNESLIDLQELGKYEQYIKGGGGSDIIKLLNEQVNKEMQSSNLYMSMSSWCYTHSLDGAGLFLFDHAAEEYEHAKKLIIFLNENNVPVQLTSISAPEHKFEGLTQIFQKAYEHEQHISESINNIVDHAIKSKDHATFNFLQWYVAEQHEEEVLFKDILDKIELIGNENHGLYLADQYVKGIAKSRKS

SEQ ID NO: 5156 - protein, 1379 aa, Artificial Sequence
  SARS-CoV-2/Congo/158/2020__EPI_ISL_417950 spike protein (1-1211)(P715C_P1069C) Ferritin construct
MFVFLVLLPLVSSQCVNLTTRTQLPPAYTNSFTRGVYYPDKVFRSSVLHSTQDLFLPFFSNVTWFHAIHVSGTNGTKRFDNPVLPFNDGVYFASTEKSNIIRGWIFGTTLDSKTQSLLIVNNATNVVIKVCEFQFCNDPFLGVYYHKNNKSWMESEFRVYSSANNCTFEYVSQPFLMDLEGKQGNFKNLREFVFKNIDGYFKIYSKHTPINLVRDLPQGFSALEPLVDLPIGINITRFQTLLALHRSYLTPGDSSSGWTAGAAAYYVGYLQPRTFLLKYNENGTITDAVDCALDPLSETKCTLKSFTVEKGIYQTSNFRVQPTESIVRFPNITNLCPFGEVFNATRFASVYAWNRKRISNCVADYSVLYNSASFSTFKCYGVSPTKLNDLCFTNVYADSFVIRGDEVRQIAPGQTGKIADYNYKLPDDFTGCVIAWNSNNLDSKVGGNYNYLYRLFRKSNLKPFERDISTEIYQAGSTPCNGVEGFNCYFPLQSYGFQPTNGVGYQPYRVVVLSFELLHAPATVCGPKKSTNLVKNKCVNFNFNGLTGTGVLTESNKKFLPFQQFGRDIADTTDAVRDPQTLEILDITPCSFGGVSVITPGTNTSNQVAVLYQDVNCTEVPVAIHADQLTPTWRVYSTGSNVFQTRAGCLIGAEHVNNSYECDIPIGAGICASYQTQTNSPRRARSVASQSIIAYTMSLGAENSVAYSNNSIAICTNFTISVTTEILPVSMTKTSVDCTMYICGDSTECSNLLLQYGSFCTQLNRALTGIAVEQDKNTQEVFAQVKQIYKTPPIKDFGGFNFSQILPDPSKPSKRSFIEDLLFNKVTLADAGFIKQYGDCLGDIAARDLICAQKFNGLTVLPPLLTDEMIAQYTSALLAGTITSGWTFGAGAALQIPFAMQMAYRFNGIGVTQNVLYENQKLIANQFNSAIGKIQDSLSSTASALGKLQDVVNQNAQALNTLVKQLSSNFGAISSVLNDILSRLDKVEAEVQIDRLITGRLQSLQTYVTQQLIRAAEIRASANLAATKMSECVLGQSKRVDFCGKGYHLMSFPQSAPHGVVFLHVTYVCAQEKNFTTAPAICHDGKAHFPREGVFVSNGTHWFVTQRNFYEPQIITTDNTFLSGNCDVVIGIVNNTVYDPLQPELDSFKEELDKYFKNHTSPDVDLGDISGINASVVNIQKEIDRLNEVAKNLNESLIDLQELGKYEQYIKGGGGSDIIKLLNEQVNKEMQSSNLYMSMSSWCYTHSLDGAGLFLFDHAAEEYEHAKKLIIFLNENNVPVQLTSISAPEHKFEGLTQIFQKAYEHEQHISESINNIVDHAIKSKDHATFNFLQWYVAEQHEEEVLFKDILDKIELIGNENHGLYLADQYVKGIAKSRKS

SEQ ID NO: 5157 - protein, 1379 aa, Artificial Sequence
  SARS-CoV-2/USA/UT-00034/2020__EPI_ISL_417977 spike protein (1-1211)(P715C_P1069C) Ferritin construct
MFVFLVLLPLVSSQCVNLTTRTQLPPAYTNSFTRGVYYPDKVFRSSVLHSTQDLFLPFFSNVTWFHAIHVSGTNGTKRFDNPVLPFNDGVYFASTEKSNIIRGWIFGTTLDSKTQSLLIVNNATNVVIKVCEFQFCNDPFLGVYYYKNNKSWMESEFRVYSSANNCTFEYVSQPFLMDLEGKQGNFKNLREFVFKNIDGYFKIYSKHTPINLVRDLPQGFSALEPLVDLPIGINITRFQTLLALHRSYLTPGDSSSGWTAGAAAYYVGYLQPRTFLLKYNENGTITDAVDCALDPLSETKCTLKSFTVEKGIYQTSNFRVQPTESIVRFPNITNLCPFGEVFNATRFASVYAWNRKRISNCVADYSVLYNSASFSTFKCYGVSPTKLNDLCFTNVYADSFVIRGDEVRQIAPGQTGKIADYNYKLPDDFTGCVIAWNSNNLDSKVGGNYNYLYRLFRKSNLKPFERDISTEIYQAGSTPCNGVEGFNCYFPLQSYGFQPTNGVGYQPYRVVVLSFELLHAPATVCGPKKSTNLVKNKCVNFNFNGLTGTGVLTESNKKFLPFQQFGRDIADTTDAVRDPQTLEILDITPCSFGGVSVITPGTNTSNQVAVLYQGVNCTEVPVAIHADQLTPTWRVYSTGSNVFQTRAGCLIGAEHVNNSYECDIPIGAGICASYQTQTNSPRRARSVASQSIIAYTMSLGAENSVAYSNNSIAICTNFTISVTTEILPVSMTKTSVDCTMYICGDSTECSNLLLQYGSFCTQLNRALTGIAVEQDKNTQEVFAQVKQIYKTPPIKDFGGFNFSQILPDPSKPSKRSFIEDLLFNKVTLADAGFIKQYGDCLGDIAARDLICAQKFNGLTVLPPLLTDEMIAQYTSALLAGTITSGWTFGAGAALQIPFAMQMAYRFNGIGVTQNVLYENQKLIANQFNSAIGKIQDSLSSTASALGKLQDVVNQNAQALNTLVKQLSSNFGAISSVLNDILSRLDKVEAEVQIDRLITGRLQSLQTYVTQQLIRAAEIRASANLAATKMSECVLGQSKRVDFCGKGYHLMSFPQSAPHGVVFLHVTYVCAQEKNFTTAPAICHDGKAHFPREGVFVSNGTHWFVTQRNFYEPQIITTDNTFVSGNCDVVIGIVNNTVYDPLQPELDSFKEELDKYFKNHTSPDVDLGDISGINASVVNIQKEIDRLNEVAKNLNESLIDLQELGKYEQYIKGGGGSDIIKLLNEQVNKEMQSSNLYMSMSSWCYTHSLDGAGLFLFDHAAEEYEHAKKLIIFLNENNVPVQLTSISAPEHKFEGLTQIFQKAYEHEQHISESINNIVDHAIKSKDHATFNFLQWYVAEQHEEEVLFKDILDKIELIGNENHGLYLADQYVKGIAKSRKS

SEQ ID NO: 5158 - protein, 1379 aa, Artificial Sequence
  SARS-CoV-2/USA/UT-00033/2020__EPI_ISL_417976 spike protein (1-1211)(P715C_P1069C) Ferritin construct
MFVFLVLLPLVSSQCVNLTTRTQLPPAYTNSFTRGVYYPDKVFRSSVLHSTQDLFLPFFSNVTWFHAIHVSGTNGTKRFDNPVLPFNDGVYFASTEKSNIIRGWIFGTTLDSKTQSLLIVNNATNVVIKVCEFQFCNDPFLGVYYHKNNKSWMESEFRVYSSANNCTFEYVSQPFLMDLEGKQGNFKNLREFVFKNIDGYFKIYSKHTPINLVRDLPQGFSALEPLVDLPIGINITRFQTLLALHRSYLTPGDSSSGLTAGAAAYYVGYLQPRTFLLKYNENGTITDAVDCALDPLSETKCTLKSFTVEKGIYQTSNFRVQPTESIVRFPNITNLCPFGEVFNATRFASVYAWNRKRISNCVADYSVLYNSASFSTFKCYGVSPTKLNDLCFTNVYADSFVIRGDEVRQIAPGQTGKIADYNYKLPDDFTGCVIAWNSNNLDSKVGGNYNYLYRLFRKSNLKPFERDISTEIYQAGSTPCNGVEGFNCYFPLQSYGFQPTNGVGYQPYRVVVLSFELLHAPATVCGPKKSTNLVKNKCVNFNFNGLTGTGVLTESNKKFLPFQQFGRDIADTTDAVRDPQTLEILDITPCSFGGVSVITPGTNTSNQVAVLYQGVNCTEVPVAIHADQLTPTWRVYSTGSNVFQTRAGCLIGAEHVNNSYECDIPIGAGICASYQTQTNSPRRARSVASQSIIAYTMSLGAENSVAYSNNSIAICTNFTISVTTEILPVSMTKTSVDCTMYICGDSTECSNLLLQYGSFCTQLNRALTGIAVEQDKNTQEVFAQVKQIYKTPPIKDFGGFNFSQILPDPSKPSKRSFIEDLLFNKVTLADAGFIKQYGDCLGDIAARDLICAQKFNGLTVLPPLLTDEMIAQYTSALLAGTITSGWTFGAGAALQIPFAMQMAYRFNGIGVTQNVLYENQKLIANQFNSAIGKIQDSLSSTASALGKLQDVVNQNAQALNTLVKQLSSNFGAISSVLNDILSRLDKVEAEVQIDRLITGRLQSLQTYVTQQLIRAAEIRASANLAATKMSECVLGQSKRVDFCGKGYHLMSFPQSAPHGVVFLHVTYVCAQEKNFTTAPAICHDGKAHFPREGVFVSNGTHWFVTQRNFYEPQIITTDNTFVSGNCDVVIGIVNNTVYDPLQPELDSFKEELDKYFKNHTSPDVDLGDISGINASVVNIQKEIDRLNEVAKNLNESLIDLQELGKYEQYIKGGGGSDIIKLLNEQVNKEMQSSNLYMSMSSWCYTHSLDGAGLFLFDHAAEEYEHAKKLIIFLNENNVPVQLTSISAPEHKFEGLTQIFQKAYEHEQHISESINNIVDHAIKSKDHATFNFLQWYVAEQHEEEVLFKDILDKIELIGNENHGLYLADQYVKGIAKSRKS

SEQ ID NO: 5159 - protein, 1379 aa, Artificial Sequence
  SARS-CoV-2/USA/WI-13/2020__EPI_ISL_417516 spike protein (1-1211)(P715C_P1069C) Ferritin construct
MFVFLVLLPLVSSQCVNLTTRTQLPPAYTNSFTRGVYYPDKVFRSSVLHSTQDLFLPFFSNVTWFHAIHVSGTNGTKRFDNPVLPFNDGVYFASTEKSNIIRGWIFGTTLDSKTQSLLIVNNATNVVIKVCEFQFCNDPFLGVYYHKNNKSWMESEFRVYSSANNCTFEYVSQPFLMDLEGKQGNFKNLREFVFKNIDGYFKIYSKHTPINLVRDLPQGFSALEPLVDLPIGINITRFQTLLALHRSYLTPGDSSSGWTAGAAAYYVGYLQPRTFLLKYNENGTITDAVDCALDPLSETKCTLKSFTVEKGIYQTSNFRVLPTESIVRFPNITNLCPFGEVFNATRFASVYAWNRKRISNCVADYSVLYNSASFSTFKCYGVSPTKLNDLCFTNVYADSFVIRGDEVRQIAPGQTGKIADYNYKLPDDFTGCVIAWNSNNLDSKVGGNYNYLYRLFRKSNLKPFERDISTEIYQAGSTPCNGVEGFNCYFPLQSYGFQPTNGVGYQPYRVVVLSFELLHAPATVCGPKKSTNLVKNKCVNFNFNGLTGTGVLTESNKKFLPFQQFGRDIADTTDAVRDPQTLEILDITPCSFGGVSVITPGTNTSNQVAVLYQGVNCTEVPVAIHADQLTPTWRVYSTGSNVFQTRAGCLIGAEHVNNSYECDIPIGAGICASYQTQTNSPRRARSVASQSIIAYTMSLGAENSVAYSNNSIAICTNFTISVTTEILPVSMTKTSVDCTMYICGDSTECSNLLLQYGSFCTQLNRALTGIAVEQDKNTQEVFAQVKQIYKTPPIKDFGGFNFSQILPDPSKPSKRSFIEDLLFNKVTLADAGFIKQYGDCLGDIAARDLICAQKFNGLTVLPPLLTDEMIAQYTSALLAGTITSGWTFGAGAALQIPFAMQMAYRFNGIGVTQNVLYENQKLIANQFNSAIGKIQDSLSSTASALGKLQDVVNQNAQALNTLVKQLSSNFGAISSVLNDILSRLDKVEAEVQIDRLITGRLQSLQTYVTQQLIRAAEIRASANLAATKMSECVLGQSKRVDFCGKGYHLMSFPQSAPHGVVFLHVTYVCAQEKNFTTAPAICHDGKAHFPREGVFVSNGTHWFVTQRNFYEPQIITTDNTFVSGNCDVVIGIVNNTVYDPLQPELDSFKEELDKYFKNHTSPDVDLGDISGINASVVNIQKEIDRLNEVAKNLNESLIDLQELGKYEQYIKGGGGSDIIKLLNEQVNKEMQSSNLYMSMSSWCYTHSLDGAGLFLFDHAAEEYEHAKKLIIFLNENNVPVQLTSISAPEHKFEGLTQIFQKAYEHEQHISESINNIVDHAIKSKDHATFNFLQWYVAEQHEEEVLFKDILDKIELIGNENHGLYLADQYVKGIAKSRKS

SEQ ID NO: 5160 - protein, 1378 aa, Artificial Sequence
  SARS-CoV-2/India/1-27/2020__EPI_ISL_413522 spike protein (1-1210)(P714C_P1068C) Ferritin construct
MFVFLVLLPLVSSQCVNLTTRTQLPPAYTNSFTRGVYYPDKVFRSSVLHSTQDLFLPFFSNVTWFHAIHVSGTNGTKRFDNPVLPFNDGVYFASTEKSNIIRGWIFGTTLDSKTQSLLIVNNATNVVIKVCEFQFCNDPFLGVYHKNNKSWMESEFRVYSSANNCTFEYVSQPFLMDLEGKQGNFKNLREFVFKNIDGYFKIYSKHTPINLVRDLPQGFSALEPLVDLPIGINITRFQTLLALHRSYLTPGDSSSGWTAGAAAYYVGYLQPRTFLLKYNENGTITDAVDCALDPLSETKCTLKSFTVEKGIYQTSNFRVQPTESIVRFPNITNLCPFGEVFNATRFASVYAWNRKRISNCVADYSVLYNSASFSTFKCYGVSPTKLNDLCFTNVYADSFVIRGDEVIQIAPGQTGKIADYNYKLPDDFTGCVIAWNSNNLDSKVGGNYNYLYRLFRKSNLKPFERDISTEIYQAGSTPCNGVEGFNCYFPLQSYGFQPTNGVGYQPYRVVVLSFELLHAPATVCGPKKSTNLVKNKCVNFNFNGLTGTGVLTESNKKFLPFQQFGRDIADTTDAVRDPQTLEILDITPCSFGGVSVITPGTNTSNQVAVLYQDVNCTEVPVAIHADQLTPTWRVYSTGSNVFQTRAGCLIGAEHVNNSYECDIPIGAGICASYQTQTNSPRRARSVASQSIIAYTMSLGAENSVAYSNNSIAICTNFTISVTTEILPVSMTKTSVDCTMYICGDSTECSNLLLQYGSFCTQLNRALTGIAVEQDKNTQEVFAQVKQIYKTPPIKDFGGFNFSQILPDPSKPSKRSFIEDLLFNKVTLADAGFIKQYGDCLGDIAARDLICAQKFNGLTVLPPLLTDEMIAQYTSALLAGTITSGWTFGAGAALQIPFAMQMAYRFNGIGVTQNVLYENQKLIANQFNSAIGKIQDSLSSTASALGKLQDVVNQNAQALNTLVKQLSSNFGAISSVLNDILSRLDKVEAEVQIDRLITGRLQSLQTYVTQQLIRAAEIRASANLAATKMSECVLGQSKRVDFCGKGYHLMSFPQSAPHGVVFLHVTYVCAQEKNFTTAPAICHDGKAHFPREGVFVSNGTHWFVTQRNFYEPQIITTDNTFVSGNCDVVIGIVNNTVYDPLQPELDSFKEELDKYFKNHTSPDVDLGDISGINASVVNIQKEIDRLNEVAKNLNESLIDLQELGKYEQYIKGGGGSDIIKLLNEQVNKEMQSSNLYMSMSSWCYTHSLDGAGLFLFDHAAEEYEHAKKLIIFLNENNVPVQLTSISAPEHKFEGLTQIFQKAYEHEQHISESINNIVDHAIKSKDHATFNFLQWYVAEQHEEEVLFKDILDKIELIGNENHGLYLADQYVKGIAKSRKS

SEQ ID NO: 5161 - protein, 1373 aa, Artificial Sequence
  SARS-CoV-2/pangolin/Guangxi/P4L/2017__EPI_ISL_410538 spike protein (1-1205)(P709C_P1063C) Ferritin construct
MFVFLFVLPLVSSQCVNLTTRTGIPPGYTNSSTRGVYYPDKVFRSSILHLTQDLFLPFFSNVTWFNTINYQGGFKKFDNPVLPFNDGVYFASTEKSNIIRGWIFGTTLDARTQSLLIVNNATNVVIKVCEFQFCTDPFLGVYYHNNNKTWVENEFRVYSSANNCTFEYISQPFLMDLEGKQGNFKNLREFVFKNVDGYFKIYSKHTPIDLVRDLPRGFAALEPLVDLPIGINITRFQTLLALHRSYLTPGNLESGWTTGAAAYYVGYLQQRTFLLSYNQNGTITDAVDCSLDPLSETKCTLKSLTVEKGIYQTSNFRVQPTISIVRFPNITNLCPFGEVFNASKFASVYAWNRKRISNCVADYSVLYNSTSFSTFKCYGVSPTKLNDLCFTNVYADSFVVKGDEVRQIAPGQTGVIADYNYKLPDDFTGCVIAWNSVKQDALTGGNYGYLYRLFRKSKLKPFERDISTEIYQAGSTPCNGQVGLNCYYPLERYGFHPTTGVNYQPFRVVVLSFELLNGPATVCGPKLSTTLVKDKCVNFNFNGLTGTGVLTTSKKQFLPFQQFGRDISDTTDAVRDPQTLEILDITPCSFGGVSVITPGTNTSNQVAVLYQDVNCTEVPMAIHAEQLTPAWRVYSAGANVFQTRAGCLVGAEHVNNSYECDIPVGAGICASYHSMSSLRSVNQRSIIAYTMSLGAENSVAYSNNSIAICTNFTISVTTEILPVSMTKTSVDCTMYICGDSIECSNLLLQYGSFCTQLNRALTGIAVEQDKNTQEVFAQVKQIYKTPPIKDFGGFNFSQILPDPSKPSKRSFIEDLLFNKVTLADAGFIKQYGDCLGDIAARDLICAQKFNGLTVLPPLLTDEMIAQYTSALLAGTITSGWTFGAGAALQIPFAMQMAYRFNGIGVTQNVLYENQKLIANQFNSAIGKIQDSLSSTASALGKLQDVVNQNAQALNTLVKQLSSNFGAISSVLNDILSRLDKVEAEVQIDRLITGRLQSLQTYVTQQLIRAAEIRASANLAATKMSECVLGQSKRVDFCGKGYHLMSFPQSAPHGVVFLHVTYVCAQEKNFTTAPAICHEGKAHFPREGVFVSNGTHWFITQRNFYEPQIITTDNTFVSGSCDVVIGIVNNTVYDPLQPELDSFKEELDKYFKNHTSPDVDLGDISGINASVVNIQKEIDRLNEVAKNLNESPIDLQELGKYEQYIKGGGGSDIIKLLNEQVNKEMQSSNLYMSMSSWCYTHSLDGAGLFLFDHAAEEYEHAKKLIIFLNENNVPVQLTSISAPEHKFEGLTQIFQKAYEHEQHISESINNIVDHAIKSKDHATFNFLQWYVAEQHEEEVLFKDILDKIELIGNENHGLYLADQYVKGIAKSRKS

SEQ ID NO: 5162 - protein, 1373 aa, Artificial Sequence
  SARS-CoV-2/pangolin/Guangxi/P5L/2017__EPI_ISL_410540 spike protein (1-1205)(P709C_P1063C) Ferritin construct
MFVFLFVLPLVSSQCVNLTTRTGIPPGYTNSSTRGVYYPDKVFRSSILHLTQDLFLPFFSNVTWFNTINYQGGFKKFDNPVLPFNDGVYFASTEKSNIIRGWIFGTTLDARTQSLLIVNNATNVVIKVCEFQFCTDPFLGVYYHNNNKTWVENEFRVYSSANNCTFEYISQPFLMDLEGKQGNFKNLREFVFKNVDGYFKIYSKHTPIDLVRDLPRGFAALEPLVDLPIGINITRFQTLLALHRSYLTPGKLESGWTTGAAAYYVGYLQQRTFLLSYNQNGTITDAVDCSLDPLSETKCTLKSLTVEKGIYQTSNFRVQPTISIVRFPNITNLCPFGEVFNASKFASVYAWNRKRISNCVADYSVLYNSTSFSTFKCYGVSPTKLNDLCFTNVYADSFVVKGDEVRQIAPGQTGVIADYNYKLPDDFTGCVIAWNSVKQDALTGGNYGYLYRLFRKSKLKPFERDISTEIYQAGSTPCNGQVGLNCYYPLERYGFHPTTGVNYQPFRVVVLSFELLNGPATVCGPKLSTTLVKDKCVNFNFNGLTGTGVLTTSKKQFLPFQQFGRDISDTTDAVRDPQTLEILDITPCSFGGVSVITPGTNTSNQVAVLYQDVNCTEVPMAIHAEQLTPAWRVYSAGANVFQTRAGCLVGAEHVNNSYECDIPVGAGICASYHSMSSFRSVNQRSIIAYTMSLGAENSVAYSNNSIAICTNFTISVTTEILPVSMTKTSVDCTMYICGDSIECSNLLLQYGSFCTQLNRALTGIAVEQDKNTQEVFAQVKQIYKTPPIKDFGGFNFSQILPDPSKPSKRSFIEDLLFNKVTLADAGFIKQYGDCLGDIAARDLICAQKFNGLTVLPPLLTDEMIAQYTSALLAGTITSGWTFGAGAALQIPFAMQMAYRFNGIGVTQNVLYENQKLIANQFNSAIGKIQDSLSSTASALGKLQDVVNQNAQALNTLVKQLSSNFGAISSVLNDILSRLDKVEAEVQIDRLITGRLQSLQTYVTQQLIRAAEIRASANLAATKMSECVLGQSKRVDFCGKGYHLMSFPQSAPHGVVFLHVTYVCAQEKNFTTAPAICHEGKAHFPREGVFVSNGTHWFITQRNFYEPQIITTDNTFVSGSCDVVIGIVNNTVYDPLQPELDSFKEELDKYFKNHTSPDVDLGDISGINASVVNIQKEIDRLNEVAKNLNESLIDLQELGKYEQYIKGGGGSDIIKLLNEQVNKEMQSSNLYMSMSSWCYTHSLDGAGLFLFDHAAEEYEHAKKLIIFLNENNVPVQLTSISAPEHKFEGLTQIFQKAYEHEQHISESINNIVDHAIKSKDHATFNFLQWYVAEQHEEEVLFKDILDKIELIGNENHGLYLADQYVKGIAKSRKS

SEQ ID NO: 5163 - protein, 1373 aa, Artificial Sequence
  SARS-CoV-2/pangolin/Guangxi/P5E/2017__EPI_ISL_410541 spike protein (1-1205)(P709C_P1063C) Ferritin construct
MFVFLFVLPLVSSQCVNLTTRTGIPPGYTNSSTRGVYYPDKVFRSSILHLTQDLFLPFFSNVTWFNTITYQGGSKKFDNPVLPFNDGVYFASTEKSNIIRGWIFGTTLDARTQSLLIVNNATNVVIKVCEFQFCTDPFLGVYYHNNNKTWVENEFRVYSSANNCTFEYISQPFLMDLEGKQGNFKNLREFVFKNVDGYFKIYSKHTPIDLVRDLPRGFAALEPLVDLPIGINITRFQTLLALHRSYLTPGKLESGWTTGAAAYYVGYLQQRTFLLSYNQNGTITDAVDCSLDPLSETKCTLKSLTVEKGIYQTSNFRVQPTISIVRFPNITNLCPFGEVFNASKFASVYAWNRKRISNCVADYSVLYNSTSFSTFKCYGVSPTKLNDLCFTNVYADSFVVKGDEVRQIAPGQTGVIADYNYKLPDDFTGCVIAWNSVKQDALTGDNYGYLYRLFRKSKLKPFERDISTEIYQAGSTPCNGQVGLNCYYPLERYGFHPTTGVNYQPFRVVVLSFELLNGPATVCGPKLSTTLVKDKCVNFNFNGLTGTGVLTTSKKQFLPFQQFGRDISDTTDAVRDPQTLEILDITPCSFGGVSVITPGTNTSNQVAVLYQDVNCTEVPMAIHAEQLTPAWRVYSAGANVFQTRAGCLVGAEHVNNSYECDIPVGAGICASYHSMSSFRSVNQRSIIAYTMSLGAENSVAYSNNSIAICTNFTISVTTEILPVSMTKTSVDCTMYICGDSIECSNLLLQYGSFCTQLNRALTGIAVEQDKNTQEVFAQVKQIYKTPPIKDFGGFNFSQILPDPSKPSKRSFIEDLLFNKVTLADAGFIKQYGDCLGDIAARDLICAQKFNGLTVLPPLLTDEMIAQYTSALLAGTITSGWTFGAGAALQIPFAMQMAYRFNGIGVTQNVLYENQKLIANQFNSAIGKIQDSLSSTASALGKLQDVVNQNAQALNTLVKQLSSNFGAISSVLNDILSRLDKVEAEVQIDRLITGRLQSLQTYVTQQLIRAAEIRASANLAATKMSECVLGQSKRVDFCGKGYHLMSFPQSAPHGVVFLHVTYVCAQEKNFTTAPAICHEGKAHFPREGVFVSNGTHWFITQRNFYEPQIITTDNTFVSGSCDVVIGIVNNTVYDPLQPELDSFKEELDKYFKNHTSPDVDLGDISGINASVVNIQKEIDRLNEVAKNLNESLIDLQELGKYEQYIKGGGGSDIIKLLNEQVNKEMQSSNLYMSMSSWCYTHSLDGAGLFLFDHAAEEYEHAKKLIIFLNENNVPVQLTSISAPEHKFEGLTQIFQKAYEHEQHISESINNIVDHAIKSKDHATFNFLQWYVAEQHEEEVLFKDILDKIELIGNENHGLYLADQYVKGIAKSRKS

SEQ ID NO: 5164 - protein, 1371 aa, Artificial Sequence
  SARS-CoV-2/pangolin/Guangxi/P1E/2017__EPI_ISL_410539 spike protein (1-1203)(P707C_P1061C) Ferritin construct
MFVFLFVLPLVSSQCVNLTTRTGIQPGYTNSSTRGVYYPDKVFRSSILHLTQDLFLPFFSNVTWFNTINYQGGFKKFDNPVLPFNDGVYFASTEKSNIIRGWIFGTTLDARTQSLLIVNNATNVVIKVCEFQFCTDPFLGVYYHNNNKTWVENEFRVYSSANNCTFEYISQPFLMDLEGKQGNFKNLREFVFKNVDGYFKIYSKHTPIDLVRDLPRGFAALEPLVDLPIGINITRFQTLLALHRSYLTPGKLESGWTTGAAAYYVGYLQQRTFLLSYNQNGTITDAVDCSLDPLSETKCTLKSLTVEKGIYQTSNFRVQPTISIVRFPNITNLCPFGEVFNASKFASVYAWNRKRISNCVADYSVLYNSTSFSTFKCYGVSPTKLNDLCFTNVYADSFVVKGDEVRQIAPGQTGVIADYNYKLPDDFTGCVIAWNSVKQDALTGGNYLYRLFRKSKLKPFERDISTEIYQAGSTPCNGQVGLNCYYPLERYGFHPTTGVNYQPFRVVVLSFELLNGPATVCGPKLSTTLVKDKCVNFNFNGLTGTGVLTTSKKQFLPFQQFGRDISDTTDAVRDPQTLEILDITPCSFGGVSVITPGTNTSNQVAVLYQDVNCTEVPMAIHAEQLTPAWRVYSAGANVFQTRAGCLVGAEHVNNSYECDIPVGAGICASYHSMSSLRSVNQRSIIAYTMSLGAENSVAYSNNSIAICTNFTISVTTEILPVSMTKTSVDCTMYICGDSIECSNLLLQYGSFCTQLNRALTGIAVEQDKNTQEVFAQVKQIYKTPPIKDFGGFNFSQILPDPSKPSKRSFIEDLLFNKVTLADAGFIKQYGDCLGDIAARDLICAQKFNGLTVLPPLLTDEMIAQYTSALLAGTITSGWTFGAGAALQIPFAMQMAYRFNGIGVTQNVLYENQKLIANQFNSAIGKIQDSLSSTASALGKLQDVVNQNAQALNTLVKQLSSNFGAISSVLNDILSRLDKVEAEVQIDRLITGRLQSLQTYVTQQLIRAAEIRASANLAATKMSECVLGQSKRVDFCGKGYHLMSFPQSAPHGVVFLHVTYVCAQEKNFTTAPAICHEGKAHFPREGVFVSNGTHWFITQRNFYEPQIITTDNTFVSGSCDVVIGIVNNTVYDPLQPELDSFKEELDKYFKNHTSPDVDLGDISGINASVVNIQKEIDRLNEVAKNLNESLIDLQELGKYEQYIKGGGGSDIIKLLNEQVNKEMQSSNLYMSMSSWCYTHSLDGAGLFLFDHAAEEYEHAKKLIIFLNENNVPVQLTSISAPEHKFEGLTQIFQKAYEHEQHISESINNIVDHAIKSKDHATFNFLQWYVAEQHEEEVLFKDILDKIELIGNENHGLYLADQYVKGIAKSRKS

SEQ ID NO: 5165 - protein, 1379 aa, Artificial Sequence
  SARS-CoV-2/Wuhan/WIV05/2019__EPI_ISL_402128 spike protein (1-1211)(G889C_L1034C) Ferritin construct
MFVFLVLLPLVSSQCVNLTTRTQLPPAYTNSFTRGVYYPDKVFRSSVLHSTQDLFLPFFSNVTWFHAIHVSGTNGTKRFDNPVLPFNDGVYFASTEKSNIIRGWIFGTTLDSKTQSLLIVNNATNVVIKVCEFQFCNDPFLGVYYHKNNKSWMESEFRVYSSANNCTFEYVSQPFLMDLEGKQGNFKNLREFVFKNIDGYFKIYSKHTPINLVRDLPQGFSALEPLVDLPIGINITRFQTLLALHRSYLTPGDSSSGWTAGAAAYYVGYLQPRTFLLKYNENGTITDAVDCALDPLSETKCTLKSFTVEKGIYQTSNFRVQPTESIVRFPNITNLCPFGEVFNATRFASVYAWNRKRISNCVADYSVLYNSASFSTFKCYGVSPTKLNDLCFTNVYADSFVIRGDEVRQIAPGQTGKIADYNYKLPDDFTGCVIAWNSNNLDSKVGGNYNYLYRLFRKSNLKPFERDISTEIYQAGSTPCNGVEGFNCYFPLQSYGFQPTNGVGYQPYRVVVLSFELLHAPATVCGPKKSTNLVKNKCVNFNFNGLTGTGVLTESNKKFLPFQQFGRDIADTTDAVRDPQTLEILDITPCSFGGVSVITPGTNTSNQVAVLYQDVNCTEVPVAIHADQLTPTWRVYSTGSNVFQTRAGCLIGAEHVNNSYECDIPIGAGICASYQTQTNSPRRARSVASQSIIAYTMSLGAENSVAYSNNSIAIPTNFTISVTTEILPVSMTKTSVDCTMYICGDSTECSNLLLQYGSFCTQLNRALTGIAVEQDKNTQEVFAQVKQIYKTPPIKDFGGFNFSQILPDPSKPSKRSFIEDLLFNKVTLADAGFIKQYGDCLGDIAARDLICAQKFNGLTVLPPLLTDEMIAQYTSALLAGTITSGWTFCAGAALQIPFAMQMAYRFNGIGVTQNVLYENQKLIANQFNSAIGKIQDSLSSTASALGKLQDVVNQNAQALNTLVKQLSSNFGAISSVLNDILSRLDKVEAEVQIDRLITGRLQSLQTYVTQQLIRAAEIRASANLAATKMSECVCGQSKRVDFCGKGYHLMSFPQSAPHGVVFLHVTYVPAQEKNFTTAPAICHDGKAHFPREGVFVSNGTHWFVTQRNFYEPQIITTDNTFVSGNCDVVIGIVNNTVYDPLQPELDSFKEELDKYFKNHTSPDVDLGDISGINASVVNIQKEIDRLNEVAKNLNESLIDLQELGKYEQYIKGGGGSDIIKLLNEQVNKEMQSSNLYMSMSSWCYTHSLDGAGLFLFDHAAEEYEHAKKLIIFLNENNVPVQLTSISAPEHKFEGLTQIFQKAYEHEQHISESINNIVDHAIKSKDHATFNFLQWYVAEQHEEEVLFKDILDKIELIGNENHGLYLADQYVKGIAKSRKS

SEQ ID NO: 5166 - protein, 1375 aa, Artificial Sequence
  SARS-CoV-2/bat/Yunnan/RaTG13/2013__EPI_ISL_402131 spike protein (1-1207)(G885C_L1030C) Ferritin construct
MFVFLVLLPLVSSQCVNLTTRTQLPPAYTNSSTRGVYYPDKVFRSSVLHLTQDLFLPFFSNVTWFHAIHVSGTNGIKRFDNPVLPFNDGVYFASTEKSNIIRGWIFGTTLDSKTQSLLIVNNATNVVIKVCEFQFCNDPFLGVYYHKNNKSWMESEFRVYSSANNCTFEYVSQPFLMDLEGKQGNFKNLREFVFKNIDGYFKIYSKHTPINLVRDLPPGFSALEPLVDLPIGINITRFQTLLALHRSYLTPGDSSSGWTAGAAAYYVGYLQPRTFLLKYNENGTITDAVDCALDPLSETKCTLKSFTVEKGIYQTSNFRVQPTDSIVRFPNITNLCPFGEVFNATTFASVYAWNRKRISNCVADYSVLYNSTSFSTFKCYGVSPTKLNDLCFTNVYADSFVITGDEVRQIAPGQTGKIADYNYKLPDDFTGCVIAWNSKHIDAKEGGNFNYLYRLFRKANLKPFERDISTEIYQAGSKPCNGQTGLNCYYPLYRYGFYPTDGVGHQPYRVVVLSFELLNAPATVCGPKKSTNLVKNKCVNFNFNGLTGTGVLTESNKKFLPFQQFGRDIADTTDAVRDPQTLEILDITPCSFGGVSVITPGTNASNQVAVLYQDVNCTEVPVAIHADQLTPTWRVYSTGSNVFQTRAGCLIGAEHVNNSYECDIPIGAGICASYQTQTNSRSVASQSIIAYTMSLGAENSVAYSNNSIAIPTNFTISVTTEILPVSMTKTSVDCTMYICGDSTECSNLLLQYGSFCTQLNRALTGIAVEQDKNTQEVFAQVKQIYKTPPIKDFGGFNFSQILPDPSKPSKRSFIEDLLFNKVTLADAGFIKQYGDCLGDIAARDLICAQKFNGLTVLPPLLTDEMIAQYTSALLAGTITSGWTFCAGAALQIPFAMQMAYRFNGIGVTQNVLYENQKLIANQFNSAIGKIQDSLSSTASALGKLQDVVNQNAQALNTLVKQLSSNFGAISSVLNDILSRLDKVEAEVQIDRLITGRLQSLQTYVTQQLIRAAEIRASANLAATKMSECVCGQSKRVDFCGKGYHLMSFPQSAPHGVVFLHVTYVPAQEKNFTTAPAICHDGKAHFPREGVFVSNGTHWFVTQRNFYEPQIITTDNTFVSGSCDVVIGIVNNTVYDPLQPELDSFKEELDKYFKNHTSPDVDLGDISGINASVVNIQKEIDRLNEVAKNLNESLIDLQELGKYEQYIKGGGGSDIIKLLNEQVNKEMQSSNLYMSMSSWCYTHSLDGAGLFLFDHAAEEYEHAKKLIIFLNENNVPVQLTSISAPEHKFEGLTQIFQKAYEHEQHISESINNIVDHAIKSKDHATFNFLQWYVAEQHEEEVLFKDILDKIELIGNENHGLYLADQYVKGIAKSRKS

SEQ ID NO: 5167 - protein, 1379 aa, Artificial Sequence
  SARS-CoV-2/Wuhan/HBCDC-HB-01/2019__EPI_ISL_402132 spike protein (1-1211)(G889C_L1034C) Ferritin construct
MFVFLVLLPLVSSQCVNLTTRTQLPPAYTNSITRGVYYPDKVFRSSVLHSTQDLFLPFFSNVTWFHAIHVSGTNGTKRFDNPVLPFNDGVYFASTEKSNIIRGWIFGTTLDSKTQSLLIVNNATNVVIKVCEFQFCNDPFLGVYYHKNNKSWMESEFRVYSSANNCTFEYVSQPFLMDLEGKQGNFKNLREFVFKNIDGYFKIYSKHTPINLVRDLPQGFSALEPLVDLPIGINITRFQTLLALHRSYLTPGDSSSGWTAGAAAYYVGYLQPRTFLLKYNENGTITDAVDCALDPLSETKCTLKSFTVEKGIYQTSNFRVQPTESIVRFPNITNLCPFGEVFNATRFASVYAWNRKRISNCVADYSVLYNSASFSTFKCYGVSPTKLNDLCFTNVYADSFVIRGDEVRQIAPGQTGKIADYNYKLPDDFTGCVIAWNSNNLDSKVGGNYNYLYRLFRKSNLKPFERDISTEIYQAGSTPCNGVEGFNCYFPLQSYGFQPTNGVGYQPYRVVVLSFELLHAPATVCGPKKSTNLVKNKCVNFNFNGLTGTGVLTESNKKFLPFQQFGRDIADTTDAVRDPQTLEILDITPCSFGGVSVITPGTNTSNQVAVLYQDVNCTEVPVAIHADQLTPTWRVYSTGSNVFQTRAGCLIGAEHVNNSYECDIPIGAGICASYQTQTNSPRRARSVASQSIIAYTMSLGAENSVAYSNNSIAIPTNFTISVTTEILPVSMTKTSVDCTMYICGDSTECSNLLLQYGSFCTQLNRALTGIAVEQDKNTQEVFAQVKQIYKTPPIKDFGGFNFSQILPDPSKPSKRSFIEDLLFNKVTLADAGFIKQYGDCLGDIAARDLICAQKFNGLTVLPPLLTDEMIAQYTSALLAGTITSGWTFCAGAALQIPFAMQMAYRFNGIGVTQNVLYENQKLIANQFNSAIGKIQDSLSSTASALGKLQDVVNQNAQALNTLVKQLSSNFGAISSVLNDILSRLDKVEAEVQIDRLITGRLQSLQTYVTQQLIRAAEIRASANLAATKMSECVCGQSKRVDFCGKGYHLMSFPQSAPHGVVFLHVTYVPAQEKNFTTAPAICHDGKAHFPREGVFVSNGTHWFVTQRNFYEPQIITTDNTFVSGNCDVVIGIVNNTVYDPLQPELDSFKEELDKYFKNHTSPDVDLGDISGINASVVNIQKEIDRLNEVAKNLNESLIDLQELGKYEQYIKGGGGSDIIKLLNEQVNKEMQSSNLYMSMSSWCYTHSLDGAGLFLFDHAAEEYEHAKKLIIFLNENNVPVQLTSISAPEHKFEGLTQIFQKAYEHEQHISESINNIVDHAIKSKDHATFNFLQWYVAEQHEEEVLFKDILDKIELIGNENHGLYLADQYVKGIAKSRKS

SEQ ID NO: 5168 - protein, 1379 aa, Artificial Sequence
  SARS-CoV-2/Guangdong/20SF028/2020__EPI_ISL_403936 spike protein (1-1211)(G889C_L1034C) Ferritin construct
MFVFLVLLPLVSSQCVNLTTRTQLPPAYTNSFTRGVYYPDKVFRSSVLYSTQDLFLPFFSNVTWFHAIHVSGTNGTKRFDNPVLPFNDGVYFASTEKSNIIRGWIFGTTLDSKTQSLLIVNNATNVVIKVCEFQFCNDPFLGVYYHKNNKSWMESEFRVYSSANNCTFEYVSQPFLMDLEGKQGNFKNLREFVFKNIDGYFKIYSKHTPINLVRDLPQGFSALEPLVDLPIGINITRFQTLLALHRSYLTPGDSSSGWTAGAAAYYVGYLQPRTFLLKYNENGTITDAVDCALDPLSETKCTLKSFTVEKGIYQTSNFRVQPTESIVRFPNITNLCPFGEVFNATRFASVYAWNRKRISNCVADYSVLYNSASFSTFKCYGVSPTKLNDLCFTNVYADSFVIRGDEVRQIAPGQTGKIADYNYKLPDDFTGCVIAWNSNNLDSKVGGNYNYLYRLFRKSNLKPFERDISTEIYQAGSTPCNGVEGFNCYFPLQSYGFQPTNGVGYQPYRVVVLSFELLHAPATVCGPKKSTNLVKNKCVNFNFNGLTGTGVLTESNKKFLPFQQFGRDIADTTDAVRDPQTLEILDITPCSFGGVSVITPGTNTSNQVAVLYQDVNCTEVPVAIHADQLTPTWRVYSTGSNVFQTRAGCLIGAEHVNNSYECDIPIGAGICASYQTQTNSPRRARSVASQSIIAYTMSLGAENSVAYSNNSIAIPTNFTISVTTEILPVSMTKTSVDCTMYICGDSTECSNLLLQYGSFCTQLNRALTGIAVEQDKNTQEVFAQVKQIYKTPPIKDFGGFNFSQILPDPSKPSKRSFIEDLLFNKVTLADAGFIKQYGDCLGDIAARDLICAQKFNGLTVLPPLLTDEMIAQYTSALLAGTITSGWTFCAGAALQIPFAMQMAYRFNGIGVTQNVLYENQKLIANQFNSAIGKIQDSLSSTASALGKLQDVVNQNAQALNTLVKQLSSNFGAISSVLNDILSRLDKVEAEVQIDRLITGRLQSLQTYVTQQLIRAAEIRASANLAATKMSECVCGQSKRVDFCGKGYHLMSFPQSAPHGVVFLHVTYVPAQEKNFTTAPAICHDGKAHFPREGVFVSNGTHWFVTQRNFYEPQIITTDNTFVSGNCDVVIGIVNNTVYDPLQPELDSFKEELDKYFKNHTSPDVDLGDISGINASVVNIQKEIDRLNEVAKNLNESLIDLQELGKYEQYIKGGGGSDIIKLLNEQVNKEMQSSNLYMSMSSWCYTHSLDGAGLFLFDHAAEEYEHAKKLIIFLNENNVPVQLTSISAPEHKFEGLTQIFQKAYEHEQHISESINNIVDHAIKSKDHATFNFLQWYVAEQHEEEVLFKDILDKIELIGNENHGLYLADQYVKGIAKSRKS

SEQ ID NO: 5169 - protein, 1379 aa, Artificial Sequence
  SARS-CoV-2/Shenzhen/SZTH-001/2020__EPI_ISL_406592 spike protein (1-1211)(G889C_L1034C) Ferritin construct
MFVFLVLLPLVSSQCVNLTTRTQLPPAYTNSFTRGVYYPDKVFRSSVLHSTQDLFLPFFSNVTWFHAIHVSGTNGTKRFDNPVLPFNDGVYFASTEKSNIIRGWIFGTTLDSKTQSLLIVNNATNVVIKVCEFQFCNDPFLGVYYHKNNKSWMESEFRVYSSANNCTFEYVSQPFLMDLEGKQGNFKNLREFVFKNIDGYFKIYSKHTPINLVRDLPQGFSALEPLVDLPIGINITRFQTLLALHRSYLTPGDSSSGWTAGAAAYYVGYLQPRTFLLKYNENGTITDAVDCALDPLSETKCTLKSFTVEKGIYQTSNFRVQPTESIVRFPNITNLCPFGEVFNATRFASVYAWNRKRISNCVADYSVLYNSASFSTFKCYGVSPTKLNDLCFTNVYADSFVIRGDEVRQIAPGQTGKIADYNYKLPDDFTGCVIAWNSNNLDSKVGGNYNYLYRLFRKSNLKPFERDISTEIYQAGSTPCNGVEGFNCYFPLQSYGFQPTNGVGYQPYRVVVLSFELLHAPATVCGPKKSTNLVKNKCVNFNFNGLTGTGVLTESNKKFLPFQQFGRDIADTTDAVRDPQTLEILDITPCSFGGVSVITPGTNTSNQVAVLYQDVNCTEVPVAIHADQLTPTWRVYSTGSNVFQTRAGCLIGAEHVNNSYECDIPIGAGICASYQTQTNSPRRARSVASQSIIAYTMSLGAENSVAYSNNSIAIPTNFTISVTTEILPVSMTKTSVDCTMYICGDSTECSNLLLQYGSFCTQLNRALTGIAVEQDKNTQEVFAQVKQIYKTPPIKDFGGFNFSQILPDPSKPSKRSFIEDLLFNKVTLADAGFIKQYGDCLGDIAARDLICAQKFNGLTVLPPLLTDEMIAQYTSALLAGTITSGWTFCAGAALQIPFAMQMAYRFNGIGVTQNVLYENQKLIANQFNSAIGKIQDSLSSTASALGKLQDVVNQNAQALNTLVKQLSSNFGAISSVLNDILSRLDKVEAEVQIDRLITGRLQSLQTYVTQQLIRAAEIRASANLAATKMSECVCGQSKRVDFCGKGYHLMSFPQSAPHGVVFLHVTYVPAQEKNFTTAPAICHDGKAHFPREGVFVSNGTHWFVTQRNFYEPQIITTDNTFVSGNCDVLIGIVNNTVYDPLQPELDSFKEELDKYFKNHTSPDVDLGDISGINASVVNIQKEIDRLNEVAKNLNESLIDLQELGKYEQYIKGGGGSDIIKLLNEQVNKEMQSSNLYMSMSSWCYTHSLDGAGLFLFDHAAEEYEHAKKLIIFLNENNVPVQLTSISAPEHKFEGLTQIFQKAYEHEQHISESINNIVDHAIKSKDHATFNFLQWYVAEQHEEEVLFKDILDKIELIGNENHGLYLADQYVKGIAKSRKS

SEQ ID NO: 5170 - protein, 1379 aa, Artificial Sequence
  SARS-CoV-2/Shenzhen/SZTH-004/2020__EPI_ISL_406595 spike protein (1-1211)(G889C_L1034C) Ferritin construct
MFVFLVLLPLVSSQCVNLTTRTQLPPAYTNSFTRGVYYPDKVFRSSVLHSTQDLFLPFFSNVTWFHAIHVSGTNGTKRFDNPVLPFNDGVYFASTEKSNIIRGWIFGTTLDSKTQSLLIVNNATNVVIKVCEFQFCNDPFLGVYYHKNNKSWMESEFRVYSSANNCTFEYVSQPFLMDLEGKQGNFKNLREFVFKNIDGYFKIYSKHTPINLVRDLPQGFSALEPLVDLPIGINITRFQTLLALHRSYLTPGDSSSGWTAGAAAYYVGYLQPRTFLLKYNENGTITDAVDCALDPLSETKCTLKSFTVEKGIYQTSNFRVQPTESIVRFPNITNLCPFGEVFNATRFASVYAWDRKRISNCVAYYSVLYNSASFSTFKCYGVSPTKLNDLCFTNVYADSFVIRGDEVRQIAPGQTGKIADYNYKLPDDFTGCVIAWNSNNLDSKVGGNYNYLYRLFRKSNLKPFERDISTEIYQAGSTPCNGVEGFNCYFPLQSYGFQPTNGVGYQPYRVVVLSFELLHAPATVCGPKKSTNLVKNKCVNFNFNGLTGTGVLTESNKKFLPFQQFGRDIADTTDAVRDPQTLEILDITPCSFGGVSVITPGTNTSNQVAVLYQDVNCTEVPVAIHADQLTPTWRVYSTGSNVFQTRAGCLIGAEHVNNSYECDIPIGAGICASYQTQTNSPRRARSVASQSIIAYTMSLGAENSVAYSNNSIAIPTNFTISVTTEILPVSMTKTSVDCTMYICGDSTECSNLLLQYGSFCTQLNRALTGIAVEQDKNTQEVFAQVKQIYKTPPIKDFGGFNFSQILPDPSKPSKRSFIEDLLFNKVTLADAGFIKQYGDCLGDIAARDLICAQKFNGLTVLPPLLTDEMIAQYTSALLAGTITSGWTFCAGAALQIPFAMQMAYRFNGIGVTQNVLYENQKLIANQFNSAIGKIQDSLSSTASALGKLQDVVNQNAQALNTLVKQLSSNFGAISSVLNDILSRLDKVEAEVQIDRLITGRLQSLQTYVTQQLIRAAEIRASANLAATKMSECVCGQSKRVDFCGKGYHLMSFPQSAPHGVVFLHVTYVPAQEKNFTTAPAICHDGKAHFPREGVFVSNGTHWFVTQRNFYEPQIITTDNTFVSGNCDVVIGIVNNTVYDPLQPELDSFKEELDKYFKNHTSPDVDLGDISGINASVVNIQKEIDRLNEVAKNLNESLIDLQELGKYEQYIKGGGGSDIIKLLNEQVNKEMQSSNLYMSMSSWCYTHSLDGAGLFLFDHAAEEYEHAKKLIIFLNENNVPVQLTSISAPEHKFEGLTQIFQKAYEHEQHISESINNIVDHAIKSKDHATFNFLQWYVAEQHEEEVLFKDILDKIELIGNENHGLYLADQYVKGIAKSRKS

SEQ ID NO: 5171 - protein, 1379 aa, Artificial Sequence
  SARS-CoV-2/France/IDF0372/2020__EPI_ISL_406596 spike protein (1-1211)(G889C_L1034C) Ferritin construct
MFVFLVLLPLVSSQCVNLTTRTQLPPAYTNSFTRGVYYPDKVFRSSVLHSTQDLFLPFFSNVTWFHAIHVSGTNGTKRFDNPVLPFNDGVYFASTEKSNIIRGWIFGTTLDSKTQSLLIVNNATNVVIKVCEFQFCNDPFLGVYYHKNNKSWMESEFRVYSSANNCTFEYVSQPFLMDLEGKQGNFKNLREFVFKNIDGYFKIYSKHTPINLVRDLPQGFSALEPLVDLPIGINITRFQTLLALHRSYLTPGDSSSGWTAGAAAYYVGYLQPRTFLLKYNENGTITDAVDCALDPLSETKCTLKSFTVEKGIYQTSNFRVQPTESIVRFPNITNLCPFGEVFNATRFASVYAWNRKRISNCVADYSFLYNSASFSTFKCYGVSPTKLNDLCFTNVYADSFVIRGDEVRQIAPGQTGKIADYNYKLPDDFTGCVIAWNSNNLDSKVGGNYNYLYRLFRKSNLKPFERDISTEIYQAGSTPCNGVEGFNCYFPLQSYGFQPTNGVGYQPYRVVVLSFELLHAPATVCGPKKSTNLVKNKCVNFNFNGLTGTGVLTESNKKFLPFQQFGRDIADTTDAVRDPQTLEILDITPCSFGGVSVITPGTNTSNQVAVLYQDVNCTEVPVAIHADQLTPTWRVYSTGSNVFQTRAGCLIGAEHVNNSYECDIPIGAGICASYQTQTNSPRRARSVASQSIIAYTMSLGAENSVAYSNNSIAIPTNFTISVTTEILPVSMTKTSVDCTMYICGDSTECSNLLLQYGSFCTQLNRALTGIAVEQDKNTQEVFAQVKQIYKTPPIKDFGGFNFSQILPDPSKPSKRSFIEDLLFNKVTLADAGFIKQYGDCLGDIAARDLICAQKFNGLTVLPPLLTDEMIAQYTSALLAGTITSGWTFCAGAALQIPFAMQMAYRFNGIGVTQNVLYENQKLIANQFNSAIGKIQDSLSSTASALGKLQDVVNQNAQALNTLVKQLSSNFGAISSVLNDILSRLDKVEAEVQIDRLITGRLQSLQTYVTQQLIRAAEIRASANLAATKMSECVCGQSKRVDFCGKGYHLMSFPQSAPHGVVFLHVTYVPAQEKNFTTAPAICHDGKAHFPREGVFVSNGTHWFVTQRNFYEPQIITTDNTFVSGNCDVVIGIVNNTVYDPLQPELDSFKEELDKYFKNHTSPDVDLGDISGINASVVNIQKEIDRLNEVAKNLNESLIDLQELGKYEQYIKGGGGSDIIKLLNEQVNKEMQSSNLYMSMSSWCYTHSLDGAGLFLFDHAAEEYEHAKKLIIFLNENNVPVQLTSISAPEHKFEGLTQIFQKAYEHEQHISESINNIVDHAIKSKDHATFNFLQWYVAEQHEEEVLFKDILDKIELIGNENHGLYLADQYVKGIAKSRKS

SEQ ID NO: 5172 - protein, 1379 aa, Artificial Sequence
  SARS-CoV-2/Australia/VIC01/2020__EPI_ISL_406844 spike protein (1-1211)(G889C_L1034C) Ferritin construct
MFVFLVLLPLVSSQCVNLTTRTQLPPAYTNSFTRGVYYPDKVFRSSVLHSTQDLFLPFFSNVTWFHAIHVSGTNGTKRFDNPVLPFNDGVYFASTEKSNIIRGWIFGTTLDSKTQSLLIVNNATNVVIKVCEFQFCNDPFLGVYYHKNNKSWMESEFRVYSSANNCTFEYVSQPFLMDLEGKQGNFKNLREFVFKNIDGYFKIYSKHTPINLVRDLPQGFSALEPLVDLPIGINITRFQTLLALHRRYLTPGDSSSGWTAGAAAYYVGYLQPRTFLLKYNENGTITDAVDCALDPLSETKCTLKSFTVEKGIYQTSNFRVQPTESIVRFPNITNLCPFGEVFNATRFASVYAWNRKRISNCVADYSVLYNSASFSTFKCYGVSPTKLNDLCFTNVYADSFVIRGDEVRQIAPGQTGKIADYNYKLPDDFTGCVIAWNSNNLDSKVGGNYNYLYRLFRKSNLKPFERDISTEIYQAGSTPCNGVEGFNCYFPLQSYGFQPTNGVGYQPYRVVVLSFELLHAPATVCGPKKSTNLVKNKCVNFNFNGLTGTGVLTESNKKFLPFQQFGRDIADTTDAVRDPQTLEILDITPCSFGGVSVITPGTNTSNQVAVLYQDVNCTEVPVAIHADQLTPTWRVYSTGSNVFQTRAGCLIGAEHVNNSYECDIPIGAGICASYQTQTNSPRRARSVASQSIIAYTMSLGAENSVAYSNNSIAIPTNFTISVTTEILPVSMTKTSVDCTMYICGDSTECSNLLLQYGSFCTQLNRALTGIAVEQDKNTQEVFAQVKQIYKTPPIKDFGGFNFSQILPDPSKPSKRSFIEDLLFNKVTLADAGFIKQYGDCLGDIAARDLICAQKFNGLTVLPPLLTDEMIAQYTSALLAGTITSGWTFCAGAALQIPFAMQMAYRFNGIGVTQNVLYENQKLIANQFNSAIGKIQDSLSSTASALGKLQDVVNQNAQALNTLVKQLSSNFGAISSVLNDILSRLDKVEAEVQIDRLITGRLQSLQTYVTQQLIRAAEIRASANLAATKMSECVCGQSKRVDFCGKGYHLMSFPQSAPHGVVFLHVTYVPAQEKNFTTAPAICHDGKAHFPREGVFVSNGTHWFVTQRNFYEPQIITTDNTFVSGNCDVVIGIVNNTVYDPLQPELDSFKEELDKYFKNHTSPDVDLGDISGINASVVNIQKEIDRLNEVAKNLNESLIDLQELGKYEQYIKGGGGSDIIKLLNEQVNKEMQSSNLYMSMSSWCYTHSLDGAGLFLFDHAAEEYEHAKKLIIFLNENNVPVQLTSISAPEHKFEGLTQIFQKAYEHEQHISESINNIVDHAIKSKDHATFNFLQWYVAEQHEEEVLFKDILDKIELIGNENHGLYLADQYVKGIAKSRKS

SEQ ID NO: 5173 - protein, 1379 aa, Artificial Sequence
  SARS-CoV-2/Germany/BavPat1/2020__EPI_ISL_406862 spike protein (1-1211)(G889C_L1034C) Ferritin construct
MFVFLVLLPLVSSQCVNLTTRTQLPPAYTNSFTRGVYYPDKVFRSSVLHSTQDLFLPFFSNVTWFHAIHVSGTNGTKRFDNPVLPFNDGVYFASTEKSNIIRGWIFGTTLDSKTQSLLIVNNATNVVIKVCEFQFCNDPFLGVYYHKNNKSWMESEFRVYSSANNCTFEYVSQPFLMDLEGKQGNFKNLREFVFKNIDGYFKIYSKHTPINLVRDLPQGFSALEPLVDLPIGINITRFQTLLALHRSYLTPGDSSSGWTAGAAAYYVGYLQPRTFLLKYNENGTITDAVDCALDPLSETKCTLKSFTVEKGIYQTSNFRVQPTESIVRFPNITNLCPFGEVFNATRFASVYAWNRKRISNCVADYSVLYNSASFSTFKCYGVSPTKLNDLCFTNVYADSFVIRGDEVRQIAPGQTGKIADYNYKLPDDFTGCVIAWNSNNLDSKVGGNYNYLYRLFRKSNLKPFERDISTEIYQAGSTPCNGVEGFNCYFPLQSYGFQPTNGVGYQPYRVVVLSFELLHAPATVCGPKKSTNLVKNKCVNFNFNGLTGTGVLTESNKKFLPFQQFGRDIADTTDAVRDPQTLEILDITPCSFGGVSVITPGTNTSNQVAVLYQGVNCTEVPVAIHADQLTPTWRVYSTGSNVFQTRAGCLIGAEHVNNSYECDIPIGAGICASYQTQTNSPRRARSVASQSIIAYTMSLGAENSVAYSNNSIAIPTNFTISVTTEILPVSMTKTSVDCTMYICGDSTECSNLLLQYGSFCTQLNRALTGIAVEQDKNTQEVFAQVKQIYKTPPIKDFGGFNFSQILPDPSKPSKRSFIEDLLFNKVTLADAGFIKQYGDCLGDIAARDLICAQKFNGLTVLPPLLTDEMIAQYTSALLAGTITSGWTFCAGAALQIPFAMQMAYRFNGIGVTQNVLYENQKLIANQFNSAIGKIQDSLSSTASALGKLQDVVNQNAQALNTLVKQLSSNFGAISSVLNDILSRLDKVEAEVQIDRLITGRLQSLQTYVTQQLIRAAEIRASANLAATKMSECVCGQSKRVDFCGKGYHLMSFPQSAPHGVVFLHVTYVPAQEKNFTTAPAICHDGKAHFPREGVFVSNGTHWFVTQRNFYEPQIITTDNTFVSGNCDVVIGIVNNTVYDPLQPELDSFKEELDKYFKNHTSPDVDLGDISGINASVVNIQKEIDRLNEVAKNLNESLIDLQELGKYEQYIKGGGGSDIIKLLNEQVNKEMQSSNLYMSMSSWCYTHSLDGAGLFLFDHAAEEYEHAKKLIIFLNENNVPVQLTSISAPEHKFEGLTQIFQKAYEHEQHISESINNIVDHAIKSKDHATFNFLQWYVAEQHEEEVLFKDILDKIELIGNENHGLYLADQYVKGIAKSRKS

SEQ ID NO: 5174 - protein, 1379 aa, Artificial Sequence
  SARS-CoV-2/Wuhan/HBCDC-HB-02/2020__EPI_ISL_412978 spike protein (1-1211)(G889C_L1034C) Ferritin construct
MFVFLVLLPLVSSQCVNLTTRTQLPPAYTNSFTRGVYYPDKVFRSSVLHSTQDLFLPFFSNVTWFHAIHVSGTNGTKRFDNPVLPFNDGVYFASTEKSNIIRGWIFGTTLDSKTQSLLIVNNATNVVIKVCEFQFCNDPFLGVYYHKNNKSWMESEFRVYSSANNCTFEYVSQPFLMDLEGKQGNFKNLREFVFKNIDGYFKIYSKHTPINLVRDLPQGFSALEPLVDLPIGINITRFQTLLALHRSYLTPGDSSSGWTAGAAAYYVGYLQPRTFLLKYNENGTITDAVDCALDPLSETKCTLKSFTVEKGIYQTSNFRVQPTESIVRFPNITNLCPFGEVFNATRFASVYAWNRKRISNCVADYSVLYNSASFSTFKCYGVSPTKLNDLCFTNVYADSFVIRGDEVRQIAPGQTGKIADYNYKLPDDFTGCVIAWNSNNLDSKVGGNYNYLYRLFRKSNLKPFERDISTEIYQAGSTPCNGVEGFNCYFPLQSYGFQPTNGVGYQPYRVVVLSFELLHAPATVCGPKKSTNLVKNKCVNFNFNGLTGTGVLTESNKKFLPFQQFGRDIADTTDAVRDPQTLEILDITPCSFGGVSVITPGTNTSNQVAVLYQDVNCTEVPVAIHADQLTPTWRVYSTGSNVFQTRAGCLIGAEHVNNSYECDIPIGAGICASYQTQTNSPRRARSVASQSIIAYTMSLGAENSVAYSNNSIAIPTNFTISVTTEILPVSMTKTSVDCTMYICGDSTECSNFLLQYGSFCTQLNRALTGIAVEQDKNTQEVFAQVKQIYKTPPIKDFGGFNFSQILPDPSKPSKRSFIEDLLFNKVTLADAGFIKQYGDCLGDIAARDLICAQKFNGLTVLPPLLTDEMIAQYTSALLAGTITSGWTFCAGAALQIPFAMQMAYRFNGIGVTQNVLYENQKLIANQFNSAIGKIQDSLSSTASALGKLQDVVNQNAQALNTLVKQLSSNFGAISSVLNDILSRLDKVEAEVQIDRLITGRLQSLQTYVTQQLIRAAEIRASANLAATKMSECVCGQSKRVDFCGKGYHLMSFPQSAPHGVVFLHVTYVPAQEKNFTTAPAICHDGKAHFPREGVFVSNGTHWFVTQRNFYEPQIITTDNTFVSGNCDVVIGIVNNTVYDPLQPELDSFKEELDKYFKNHTSPDVDLGDISGINASVVNIQKEIDRLNEVAKNLNESLIDLQELGKYEQYIKGGGGSDIIKLLNEQVNKEMQSSNLYMSMSSWCYTHSLDGAGLFLFDHAAEEYEHAKKLIIFLNENNVPVQLTSISAPEHKFEGLTQIFQKAYEHEQHISESINNIVDHAIKSKDHATFNFLQWYVAEQHEEEVLFKDILDKIELIGNENHGLYLADQYVKGIAKSRKS

SEQ ID NO: 5175 - protein, 1379 aa, Artificial Sequence
  SARS-CoV-2/Australia/QLD02/2020__EPI_ISL_407896 spike protein (1-1211)(G889C_L1034C) Ferritin construct
MFVFLVLLPLVSSQCVNLTTRTQLPPAYTNSFTRGVYYPDKVFRSSVLHSTQDLFLPFFSNVTWFHAIHVSGTNGTKRFDNPVLPFNDGVYFASTEKSNIIRGWIFGTTLDSKTQSLLIVNNATNVVIKVCEFQFCNDPFLGVYYHKNNKSWMESEFRVYSSANNCTFEYVSQPFLMDLEGKQGNFKNLREFVFKNIDGYFKIYSKHTPINLVRDLPQGFSALEPLVDLPIGINITRFQTLLALHRSYLTPGDSSSGWTAGAAAYYVGYLQPRTFLLKYNENGTITDAVDCALDPLSETKCTLKSFTVEKGIYQTSNFRVQPTESIVRFPNITNLCPFGEVFNATRFASVYAWNRKRISNCVADYSVLYNSASFSTFKCYGVSPTKLNDLCFTNVYADSFVIRGDEVRQIAPGQTGKIADYNYKLPDDFTGCVIAWNSNNLDSKVGGNYNYLYRLFRKSNLKPFERDISTEIYQAGSTPCNGVEGFNCYFPLQSYGFQPTNGVGYQPYRVVVLSFELLHAPATVCGPKKSTNLVKNKCVNFNFNGLTGTGVLTESNKKFLPFQQFGRDIADTTDAVRDPQTLEILDITPCSFGGVSVITPGTNTSNQVAVLYQDVNCTEVPVAIHADQLTPTWRVYSTGSNVFQTRAGCLIGAEHVNNSYECDIPIGAGICASYQTQTNSPRRARSVASQSIIAYTMSLGAENSVAYSNNSIAIPTNFTISVTTEILPVSMTKTSVDCTMYICGDSTECSNLLLQYGSFCTQLNRALTGIAVEQDKNTQEVFAQVKQIYKTPPIKDFGGFNFSQILPDPSKPSKRSFIEDLLFNKVTLADAGFIKQYGDCLGDIAARDLICAQKFNGLTVLPPLLTDEMIAQYTSALLAGTITSGWTFCAGAALQIPFAMQMAYRFNGIGVTQNVLYENQKLIANQFNSAIGKIQDSLSSTASALGKLQDVVNQNAQALNTLVKQLSSNFGAISSVLNDILSRLDKVEAEVQIDRLITGRLQSLQTYVTQQLIRAAEIRASANLAATKMSECVCGQSKRVDFCGKGYHLMSFPQSAPHGVVFLHVTYVPAQEKNFTTAPAICHDGKAHFPREGVFVSNGTHWFVTQRNFYEPQIITTDNTFVSGNCDVVIGIVNNTVYDPLQLELDSFKEELDKYFKNHTSPDVDLGDISGINASVVNIQKEIDRLNEVAKNLNESLIDLQELGKYEQYIKGGGGSDIIKLLNEQVNKEMQSSNLYMSMSSWCYTHSLDGAGLFLFDHAAEEYEHAKKLIIFLNENNVPVQLTSISAPEHKFEGLTQIFQKAYEHEQHISESINNIVDHAIKSKDHATFNFLQWYVAEQHEEEVLFKDILDKIELIGNENHGLYLADQYVKGIAKSRKS

SEQ ID NO: 5176 - protein, 1379 aa, Artificial Sequence
  SARS-CoV-2/India/1-31/2020__EPI_ISL_413523 spike protein (1-1211)(G889C_L1034C) Ferritin construct
MFVFLVLLPLVSSQCVNLTTRTQLPPAYTNSFTRGVYYPDKVFRSSVLHSTQDLFLPFFSNVTWFHAIHVSGTNGTKRFDNPVLPFNDGVYFASTEKSNIIRGWIFGTTLDSKTQSLLIVNNATNVVIKVCEFQFCNDPFLGVYYHKNNKSWMESEFRVYSSANNCTFEYVSQPFLMDLEGKQGNFKNLREFVFKNIDGYFKIYSKHTPINLVRDLPQGFSALEPLVDLPIGINITRFQTLLALHRSYLTPGDSSSGWTAGAAAYYVGYLQPRTFLLKYNENGTITDAVDCALDPLSETKCTLKSFTVEKGIYQTSNFRVQPTESIVRFPNITNLCPFGEVFNATRFASVYAWNRKRISNCVADYSVLYNSASFSTFKCYGVSPTKLNDLCFTNVYADSFVIRGDEVRQIAPGQTGKIADYNYKLPDDFTGCVIAWNSNNLDSKVGGNYNYLYRLFRKSNLKPFERDISTEIYQAGSTPCNGVEGFNCYFPLQSYGFQPTNGVGYQPYRVVVLSFELLHAPATVCGPKKSTNLVKNKCVNFNFNGLTGTGVLTESNKKFLPFQQFGRDIADTTDAVRDPQTLEILDITPCSFGGVSVITPGTNTSNQVAVLYQDVNCTEVPVAIHADQLTPTWRVYSTGSNVFQTRAGCLIGAEHVNNSYECDIPIGAGICASYQTQTNSPRRARSVASQSIIAYTMSLGAENSVAYSNNSIAIPTNFTISVTTEILPVSMTKTSVDCTMYICGDSTECSNLLLQYGSFCTQLNRALTGIAVEQDKNTQEVFAQVKQIYKTPPIKDFGGFNFSQILPDPSKPSKRSFIEDLLFNKVTLADAGFIKQYGDCLGDIAARDLICAQKFNGLTVLPPLLTDEMIAQYTSALLAGTITSGWTFCAGAALQIPFAMQMAYRFNGIGVTQNVLYENQKLIANQFNSVIGKIQDSLSSTASALGKLQDVVNQNAQALNTLVKQLSSNFGAISSVLNDILSRLDKVEAEVQIDRLITGRLQSLQTYVTQQLIRAAEIRASANLAATKMSECVCGQSKRVDFCGKGYHLMSFPQSAPHGVVFLHVTYVPAQEKNFTTAPAICHDGKAHFPREGVFVSNGTHWFVTQRNFYEPQIITTDNTFVSGNCDVVIGIVNNTVYDPLQPELDSFKEELDKYFKNHTSPDVDLGDISGINASVVNIQKEIDRLNEVAKNLNESLIDLQELGKYEQYIKGGGGSDIIKLLNEQVNKEMQSSNLYMSMSSWCYTHSLDGAGLFLFDHAAEEYEHAKKLIIFLNENNVPVQLTSISAPEHKFEGLTQIFQKAYEHEQHISESINNIVDHAIKSKDHATFNFLQWYVAEQHEEEVLFKDILDKIELIGNENHGLYLADQYVKGIAKSRKS

SEQ ID NO: 5177 - protein, 1379 aa, Artificial Sequence
  SARS-CoV-2/Guangdong/GD2020087-P0008/2020__EPI_ISL_413863 spike protein (1-1211)(G889C_L1034C) Ferritin construct
MFVFLVLLPLVSSQCVNLTTRTQLPPAYTNSFTRGVYYPDKVFRSSVLHSTQDLFLPFFSNVTWFHAIHVSGTNGTKRFDNPVLPFNDGVYFASTEKSNIIRGWIFGTTLDSKTQSLLIVNNATNVVIKVCEFQFCNDPFLGVYYHKNNKSWMESEFRVYSSANNCTFEYVSQPFLMDLEGKQGNFKNLREFVFKNIDGYFKIYSKHTPINLVRDLPQGFSALEPLVDLPIGINITRFQTLLALHRSYLTPGDSSSGWTAGAAAYYVGYLQPRTFLLKYNENGTITDAVDCALDPLSETKCTLKSFTVEKGIYQTSNFRVQPTESIVRFPNITNLCPFGEVFNATRFASVYAWNRKRISNCVADYSVLYNSASFSTFKCYGVSPTKLNDLCFTNVYADSFVIRGDEVREIAPGQTGKIADYNYKLPDDFTGCVIAWNSNNLDSKVGGNYNYLYRLFRKSNLKPFERDISTEIYQAGSTPCNGVEGFNCYFPLQSYGFQPTNGVGYQPYRVVVLSFELLHAPATVCGPKKSTNLVKNKCVNFNFNGLTGTGVLTESNKKFLPFQQFGRDIADTTDAVRDPQTLEILDITPCSFGGVSVITPGTNTSNQVAVLYQDVNCTEVPVAIHADQLTPTWRVYSTGSNVFQTRAGCLIGAEHVNNSYECDIPIGAGICASYQTQTNSPRRARSVASQSIIAYTMSLGAENSVAYSNNSIAIPTNFTISVTTEILPVSMTKTSVDCTMYICGDSTECSNLLLQYGSFCTQLNRALTGIAVEQDKNTQEVFAQVKQIYKTPPIKDFGGFNFSQILPDPSKPSKRSFIEDLLFNKVTLADAGFIKQYGDCLGDIAARDLICAQKFNGLTVLPPLLTDEMIAQYTSALLAGTITSGWTFCAGAALQIPFAMQMAYRFNGIGVTQNVLYENQKLIANQFNSAIGKIQDSLSSTASALGKLQDVVNQNAQALNTLVKQLSSNFGAISSVLNDILSRLDKVEAEVQIDRLITGRLQSLQTYVTQQLIRAAEIRASANLAATKMSECVCGQSKRVDFCGKGYHLMSFPQSAPHGVVFLHVTYVPAQEKNFTTAPAICHDGKAHFPREGVFVSNGTHWFVTQRNFYEPQIITTDNTFVSGNCDVVIGIVNNTVYDPLQPELDSFKEELDKYFKNHTSPDVDLGDISGINASVVNIQKEIDRLNEVAKNLNESLIDLQELGKYEQYIKGGGGSDIIKLLNEQVNKEMQSSNLYMSMSSWCYTHSLDGAGLFLFDHAAEEYEHAKKLIIFLNENNVPVQLTSISAPEHKFEGLTQIFQKAYEHEQHISESINNIVDHAIKSKDHATFNFLQWYVAEQHEEEVLFKDILDKIELIGNENHGLYLADQYVKGIAKSRKS

SEQ ID NO: 5178 - protein, 1379 aa, Artificial Sequence
  SARS-CoV-2/Sweden/01/2020__EPI_ISL_411951 spike protein (1-1211)(G889C_L1034C) Ferritin construct
MFVFLVLLPLVSSQCVNLTTRTQLPPAYTNSFTRGVYYPDKVFRSSVLHSTQDLFLPFFSNVTWFHAIHVSGTNGTKRFDNPVLPFNDGVYFASTEKSNIIRGWIFGTTLDSKTQSLLIVNNATNVVIKVCEFQFCNDPFLGVYYHKNNKSWMESEFRVYSSANNCTFEYVSQPFLMDLEGKQGNFKNLREFVFKNIDGYFKIYSKHTPINLVRDLPQGFSALEPLVDLPIGINITRFQTLLALHRSYLTPGDSSSGWTAGAAAYYVGYLQPRTFLLKYNENGTITDAVDCALDPLSETKCTLKSFTVEKGIYQTSNFRVQPTESIVRFPNITNLCPFGEVFNATRFASVYAWNRKRISNCVADYSVLYNSASFSTFKCYGVSPTKLNDLCFTNVYADSFVIRGDEVRQIAPGQTGKIADYNYKLPDDFTGCVIAWNSNNLDSKVGGNYNYLYRLFRKSNLKPFERDISTEIYQAGSTPCNGVEGFNCYFPLQSYGFQPTNGVGYQPYRVVVLSFELLHAPATVCGPKKSTNLVKNKCVNFNFNGLTGTGVLTESNKKFLPFQQFGRDIADTTDAVRDPQTLEILDITPCSFGGVSVITPGTNTSNQVAVLYQDVNCTEVPVAIHADQLTPTWRVYSTGSNVFQTRAGCLIGAEHVNNSYECDIPIGAGICASYQTQTNSPRRARSVASQSIIAYTMSLGAENSVAYSNNSIAIPTNFTISVTTEILPVSMTKTSVDCTMYICGDSTECSNLLLQYGSFCTQLNRALTGIAVEQDKNTQEVFAQVKQIYKTPPIKDCGGFNFSQILPDPSKPSKRSFIEDLLFNKVTLADAGFIKQYGDCLGDIAARDLICAQKFNGLTVLPPLLTDEMIAQYTSALLAGTITSGWTFCAGAALQIPFAMQMAYRFNGIGVTQNVLYENQKLIANQFNSAIGKIQDSLSSTASALGKLQDVVNQNAQALNTLVKQLSSNFGAISSVLNDILSRLDKVEAEVQIDRLITGRLQSLQTYVTQQLIRAAEIRASANLAATKMSECVCGQSKRVDFCGKGYHLMSFPQSAPHGVVFLHVTYVPAQEKNFTTAPAICHDGKAHFPREGVFVSNGTHWFVTQRNFYEPQIITTDNTFVSGNCDVVIGIVNNTVYDPLQPELDSFKEELDKYFKNHTSPDVDLGDISGINASVVNIQKEIDRLNEVAKNLNESLIDLQELGKYEQYIKGGGGSDIIKLLNEQVNKEMQSSNLYMSMSSWCYTHSLDGAGLFLFDHAAEEYEHAKKLIIFLNENNVPVQLTSISAPEHKFEGLTQIFQKAYEHEQHISESINNIVDHAIKSKDHATFNFLQWYVAEQHEEEVLFKDILDKIELIGNENHGLYLADQYVKGIAKSRKS

SEQ ID NO: 5179 - protein, 1379 aa, Artificial Sequence
  SARS-CoV-2/Tianmen/HBCDC-HB-07/2020__EPI_ISL_412983 spike protein (1-1211)(G889C_L1034C) Ferritin construct
MFVFLVLLPLVSSQCVNLTTRTQLPPAYTNSFTRGVYYPDKVFRSSVLHSTQDLFLPFFSNVTWFHAIHVSGTNGTKRFDNPVLPFNDGVYFASTEKSNIIRGWIFGTTLDSKTQSLLIVNNATNVVIKVCEFQFCNDPFLGVYYHKNNKSWMESEFRVYSSANNCTFEYVSQPFLMDLEGKQGNFKNLREFVFKNIDGYFKIYSKHTPINLVRDLPQGFSALEPLVDLPIGINITRFQTLLALHRSYLTPGDSSSGWTAGAAAYYVGYLQPRTFLLKYNENGTITDAVDCALDPLSETKCTLKSFTVEKGIYQTSNFRVQPTESIVRFPNITNLCPFGEVFNATRFASVYAWNRKRISNCVADYSVLYNSASFSTFKCYGVSPTKLNDLCFTNVYADSFVIRGDEVRQIAPGQTGKIADYNYKLPDDFTGCVIAWNSNNLDSKVGGNYNYLYRLFRKSNLKPFERDISTEIYQAGSTPCNGVEGFNCYFPLQSYGFQPTNGVGYQPYRVVVLSFELLHAPATVCGPKKSTNLVKNKCVNFNFNGLTGTGVLTESNKKFLPFQQFGRDIADTTDAVRDPQTLEILDITPCSFGGVSVITPGTNTSNQVAVLYQDLNCTEVPVAIHADQLTPTWRVYSTGSNVFQTRAGCLIGAEHVNNSYECDIPIGAGICASYQTQTNSPRRARSVASQSIIAYTMSLGAENSVAYSNNSIAIPTNFTISVTTEILPVSMTKTSVDCTMYICGDSTECSNLLLQYGSFCTQLNRALTGIAVEQDKNTQEVFAQVKQIYKTPPIKDFGGFNFSQILPDPSKPSKRSFIEDLLFNKVTLADAGFIKQYGDCLGDIAARDLICAQKFNGLTVLPPLLTDEMIAQYTSALLAGTITSGWTFCAGAALQIPFAMQMAYRFNGIGVTQNVLYENQKLIANQFNSAIGKIQDSLSSTASALGKLQDVVNQNAQALNTLVKQLSSNFGAISSVLNDILSRLDKVEAEVQIDRLITGRLQSLQTYVTQQLIRAAEIRASANLAATKMSECVCGQSKRVDFCGKGYHLMSFPQSAPHGVVFLHVTYVPAQEKNFTTAPAICHDGKAHFPREGVFVSNGTHWFVTQRNFYEPQIITTDNTFVSGNCDVVIGIVNNTVYDPLQPELDSFKEELDKYFKNHTSPDVDLGDISGINASVVNIQKEIDRLNEVAKNLNESLIDLQELGKYEQYIKGGGGSDIIKLLNEQVNKEMQSSNLYMSMSSWCYTHSLDGAGLFLFDHAAEEYEHAKKLIIFLNENNVPVQLTSISAPEHKFEGLTQIFQKAYEHEQHISESINNIVDHAIKSKDHATFNFLQWYVAEQHEEEVLFKDILDKIELIGNENHGLYLADQYVKGIAKSRKS

SEQ ID NO: 5180 - protein, 1379 aa, Artificial Sequence
  SARS-CoV-2/Hong Kong/case42_VM20002493/2020__EPI_ISL_414527 spike protein (1-1211)(G889C_L1034C) Ferritin construct
MFVFLVLLPLVSSQCVNLTTRTQLPPAYTNSFTRGVYYPDKVFRSSVLHSTQDLFLPFFSNVTWFHAIHVSGTNGTKRFDNPVLPFNDGVYFASTEKSNIIRGWIFGTTLDSKTQSLLIVNNATNVVIKVCEFQFCNDPFLGVYYHKNNKSWMESEFRVYSSANNCTFEYVSQPFLMDLEGKQGNFKNLREFVFKNIDGYFKIYSKHTPINLVRDLPQGFSALEPLVDLPIGINITRFQTLLALHRSYLTPGDSSSGWTAGAAAYYVGYLQPRTFLLKYNENGTITDAVDCALDPLSETKCTLKSFTVEKGIYQTSNFRVQPTESIVRFPNITNLCPFGEVFNATRFASVYAWNRKRISNCVADYSVLYNSASFSTFKCYGVSPTKLNDLCFTNVYADSFVIRGDEVRQIAPGQTGKIADYNYKLPDDFTGCVIAWNSNNLDSKVGGNYNYLYRLFRKSNLKPFERDISTEIYQAGSTPCNGVEGFNCYFPLQSYGFQPTNGVGYQPYRVVVLSFELLHAPATVCGPKKSTNLVKNKCVNFNFNGLTGTGVLTESNKKFLPFQQFGRDIADTTDAVRDPQTLEILDITPCSFGGVSVITPGTNTSNQVAVLYQDVNCTEVPVAIHADQLTPTWRVYSTGSNVFQTRAGCLIGAEHVNNSYECDIPIGAGICASYQTQTNSPRRARSVASQSIIAYTMSLGAENSVAYSNNSIAIPTNFAISVTTEILPVSMTKTSVDCTMYICGDSTECSNLLLQYGSFCTQLNRALTGIAVEQDKNTQEVFAQVKQIYKTPPIKDFGGFNFSQILPDPSKPSKRSFIEDLLFNKVTLADAGFIKQYGDCLGDIAARDLICAQKFNGLTVLPPLLTDEMIAQYTSALLAGTITSGWTFCAGAALQIPFAMQMAYRFNGIGVTQNVLYENQKLIANQFNSAIGKIQDSLSSTASALGKLQDVVNQNAQALNTLVKQLSSNFGAISSVLNDILSRLDKVEAEVQIDRLITGRLQSLQTYVTQQLIRAAEIRASANLAATKMSECVCGQSKRVDFCGKGYHLMSFPQSAPHGVVFLHVTYVPAQEKNFTTAPAICHDGKAHFPREGVFVSNGTHWFVTQRNFYEPQIITTDNTFVSGNCDVVIGIVNNTVYDPLQPELDSFKEELDKYFKNHTSPDVDLGDISGINASVVNIQKEIDRLNEVAKNLNESLIDLQELGKYEQYIKGGGGSDIIKLLNEQVNKEMQSSNLYMSMSSWCYTHSLDGAGLFLFDHAAEEYEHAKKLIIFLNENNVPVQLTSISAPEHKFEGLTQIFQKAYEHEQHISESINNIVDHAIKSKDHATFNFLQWYVAEQHEEEVLFKDILDKIELIGNENHGLYLADQYVKGIAKSRKS

SEQ ID NO: 5181 - protein, 1379 aa, Artificial Sequence
  SARS-CoV-2/USA/CruiseA-23/2020__EPI_ISL_414482 spike protein (1-1211)(G889C_L1034C) Ferritin construct
MFVFLVLLPLVSSQCVNLTTRTQLPPAYTNSFTRGVYYPDKVFRSSVLHSTQDLFLPFFSNVTWFHAIHVSGTNGTKRFDNPVLPFNDGVYFASTEKSNIIRGWIFGTTLDSKTQSLLIVNNATNVVIKVCEFQFCNDPFLGVYYHKNNKSWMESEFRVYSSANNCTFEYVSQPFLMDLEVKQGNFKNLREFVFKNIDGYFKIYSKHTPINLVRDLPQGFSALEPLVDLPIGINITRFQTLLALHRSYLTPGDSSSGWTAGAAAYYVGYLQPRTFLLKYNENGTITDAVDCALDPLSETKCTLKSFTVEKGIYQTSNFRVQPTESIVRFPNITNLCPFGEVFNATRFASVYAWNRKRISNCVADYSVLYNSASFSTFKCYGVSPTKLNDLCFTNVYADSFVIRGDEVRQIAPGQTGKIADYNYKLPDDFTGCVIAWNSNNLDSKVGGNYNYLYRLFRKSNLKPFERDISTEIYQAGSTPCNGVEGFNCYFPLQSYGFQPTNGVGYQPYRVVVLSFELLHAPATVCGPKKSTNLVKNKCVNFNFNGLTGTGVLTESNKKFLPFQQFGRDIADTTDAVRDPQTLEILDITPCSFGGVSVITPGTNTSNQVAVLYQDVNCTEVPVAIHADQLTPTWRVYSTGSNVFQTRAGCLIGAEHVNNSYECDIPIGAGICASYQTQTNSPRRARSVASQSIIAYTMSLGAENSVAYSNNSIAIPTNFTISVTTEILPVSMTKTSVDCTMYICGDSTECSNLLLQYGSFCTQLNRALTGIAVEQDKNTQEVFAQVKQIYKTPPIKDFGGFNFSQILPDPSKPSKRSFIEDLLFNKVTLADAGFIKQYGDCLGDIAARDLICAQKFNGLTVLPPLLTDEMIAQYTSALLAGTITSGWTFCAGAALQIPFAMQMAYRFNGIGVTQNVLYENQKLIANQFNSAIGKIQDSLSSTASALGKLQDVVNQNAQALNTLVKQLSSNFGAISSVLNDILSRLDKVEAEVQIDRLITGRLQSLQTYVTQQLIRAAEIRASANLAATKMSECVCGQSKRVDFCGKGYHLMSFPQSAPHGVVFLHVTYVPAQEKNFTTAPAICHDGKAHFPREGVFVSNGTHWFVTQRNFYEPQIITTDNTFVSGNCDVVIGIVNNTVYDPLQPELDSFKEELDKYFKNHTSPDVDLGDISGINASVVNIQKEIDRLNEVAKNLNESLIDLQELGKYEQYIKGGGGSDIIKLLNEQVNKEMQSSNLYMSMSSWCYTHSLDGAGLFLFDHAAEEYEHAKKLIIFLNENNVPVQLTSISAPEHKFEGLTQIFQKAYEHEQHISESINNIVDHAIKSKDHATFNFLQWYVAEQHEEEVLFKDILDKIELIGNENHGLYLADQYVKGIAKSRKS

SEQ ID NO: 5182 - protein, 1379 aa, Artificial Sequence
  SARS-CoV-2/Hong Kong/case85_VM20002868/2020__EPI_ISL_414519 spike protein (1-1211)(G889C_L1034C) Ferritin construct
MFVFLVLVPLVSSQCVNLTTRTQLPPAYTNSFTRGVYYPDKVFRSSVLHSTQDLFLPFFSNVTWFHAIHVSGTNGTKRFDNPVLPFNDGVYFASTEKSNIIRGWIFGTTLDSKTQSLLIVNNATNVVIKVCEFQFCNDPFLGVYYHKNNKSWMESEFRVYSSANNCTFEYVSQPFLMDLEGKQGNFKNLREFVFKNIDGYFKIYSKHTPINLVRDLPQGFSALEPLVDLPIGINITRFQTLLALHRSYLTPGDSSSGWTAGAAAYYVGYLQPRTFLLKYNENGTITDAVDCALDPLSETKCTLKSFTVEKGIYQTSNFRVQPTESIVRFPNITNLCPFGEVFNATRFASVYAWNRKRISNCVADYSVLYNSASFSTFKCYGVSPTKLNDLCFTNVYADSFVIRGDEVRQIAPGQTGKIADYNYKLPDDFTGCVIAWNSNNLDSKVGGNYNYLYRLFRKSNLKPFERDISTEIYQAGSTPCNGVEGFNCYFPLQSYGFQPTNGVGYQPYRVVVLSFELLHAPATVCGPKKSTNLVKNKCVNFNFNGLTGTGVLTESNKKFLPFQQFGRDIADTTDAVRDPQTLEILDITPCSFGGVSVITPGTNTSNQVAVLYQDVNCTEVPVAIHADQLTPTWRVYSTGSNVFQTRAGCLIGAEHVNNSYECDIPIGAGICASYQTQTNSPRRARSVASQSIIAYTMSLGAENSVAYSNNSIAIPTNFTISVTTEILPVSMTKTSVDCTMYICGDSTECSNLLLQYGSFCTQLNRALTGIAVEQDKNTQEVFAQVKQIYKTPPIKDFGGFNFSQILPDPSKPSKRSFIEDLLFNKVTLADAGFIKQYGDCLGDIAARDLICAQKFNGLTVLPPLLTDEMIAQYTSALLAGTITSGWTFCAGAALQIPFAMQMAYRFNGIGVTQNVLYENQKLIANQFNSAIGKIQDSLSSTASALGKLQDVVNQNAQALNTLVKQLSSNFGAISSVLNDILSRLDKVEAEVQIDRLITGRLQSLQTYVTQQLIRAAEIRASANLAATKMSECVCGQSKRVDFCGKGYHLMSFPQSAPHGVVFLHVTYVPAQEKNFTTAPAICHDGKAHFPREGVFVSNGTHWFVTQRNFYEPQIITTDNTFVSGNCDVVIGIVNNTVYDPLQPELDSFKEELDKYFKNHTSPDVDLGDISGINASVVNIQKEIDRLNEVAKNLNESLIDLQELGKYEQYIKGGGGSDIIKLLNEQVNKEMQSSNLYMSMSSWCYTHSLDGAGLFLFDHAAEEYEHAKKLIIFLNENNVPVQLTSISAPEHKFEGLTQIFQKAYEHEQHISESINNIVDHAIKSKDHATFNFLQWYVAEQHEEEVLFKDILDKIELIGNENHGLYLADQYVKGIAKSRKS

SEQ ID NO: 5183 - protein, 1379 aa, Artificial Sequence; identical to SEQ ID NO: 5173
  SARS-CoV-2/England/200990660/2020__EPI_ISL_414523 spike protein (1-1211)(G889C_L1034C) Ferritin construct

SEQ ID NO: 5184 - protein, 1379 aa, Artificial Sequence
  SARS-CoV-2/Australia/NSW09/2020__EPI_ISL_413595 spike protein (1-1211)(G889C_L1034C) Ferritin construct
MFVFLVLLPLVSSQCVNLTTRTQLPPAYTNSFTRGVYYPDKVFRSSVLHSTQDLFLPFFSNVTWFHAIHVSGTNGTKRFDNPVLPFNDGVYFASTEKSNIIRGWIFGTTLDSKTQSLLIVNNATNVVIKVCEFQFCNDPFLGVYYHKNNKSWMESEFRVYSSANNCTFEYVSQPFLMDLEGKQGNFKNLREFVFKNIDGYFKIYSKHTPINLVRDLPQGFSALEPLVDLPIGINITRFQTLLALHRSYLTPGDSSSGWTAGAAAYYVGYLQPRTFLLKYNENGTITDAVDCALDPLSETKCTLKSFTVEKGIYQTSNFRVQPTESIVRFPNITNLCPFGEVFNATRFASVYAWNRKRISNCVADYSVLYNSASFSTFKCYGVSPTKLNDLCFTNVYADSFVIRGDEVRQIAPGQTGKIADYNYKLPDDFTGCVIAWNSNNLDSKVGGNYNYLYRLFRKSNLKPFERDISTEIYQAGSTPCNGVEGFNCYFPLQSYGFQPTNGVGYQPYRVVVLSFELLHAPATVCGPKKSTNLVKNKCVNFNFNGLTGTGVLTESNKKFLPFQQFGRDIADTTDAVRDPQTLEILDITPCSFGGVSVITPGTNTSNQVAVLYQDVNCTEVPVAIHADQLTPTWRVYSTGSNVFQTRAGCLIGAEHVNNSYECDIPIGAGICASYQTQTNSPRRARSVASQSIIAYTMSLGAENSVAYSNNSIAIPTNFTISVTTEILPVSMTKTSVDCTMYICGDSTECSNLLLQYGSFCTQLNRALTGIAVEQDKNTQEVFAQVKQIYKTPPIKDFGGFNFSQILPDPSKPSKRSFIEDLLFNKVTLADAGFIKQYGDCLGDIAARDLICAQKFNGLTVLPPLLTDEMIAQYTSALLAGTITSGWTFCAGAALQIPFAMQMAYRFNGIGVTQNVLYENQKLIANQFNSAIGKIQDSLSFTASALGKLQDVVNQNAQALNTLVKQLSSNFGAISSVLNDILSRLDKVEAEVQIDRLITGRLQSLQTYVTQQLIRAAEIRASANLAATKMSECVCGQSKRVDFCGKGYHLMSFPQSAPHGVVFLHVTYVPAQEKNFTTAPAICHDGKAHFPREGVFVSNGTHWFVTQRNFYEPQIITTDNTFVSGNCDVVIGIVNNTVYDPLQPELDSFKEELDKYFKNHTSPDVDLGDISGINASVVNIQKEIDRLNEVAKNLNESLIDLQELGKYEQYIKGGGGSDIIKLLNEQVNKEMQSSNLYMSMSSWCYTHSLDGAGLFLFDHAAEEYEHAKKLIIFLNENNVPVQLTSISAPEHKFEGLTQIFQKAYEHEQHISESINNIVDHAIKSKDHATFNFLQWYVAEQHEEEVLFKDILDKIELIGNENHGLYLADQYVKGIAKSRKS

SEQ ID NO: 5185 - protein, 1379 aa, Artificial Sequence; identical to SEQ ID NO: 5165
  SARS-CoV-2/Australia/NSW10/2020__EPI_ISL_413596 spike protein (1-1211)(G889C_L1034C) Ferritin construct

SEQ ID NO: 5186 - protein, 1379 aa, Artificial Sequence
  SARS-CoV-2/Switzerland/1000477797/2020__EPI_ISL_413023 spike protein (1-1211)(G889C_L1034C) Ferritin construct
MFVFLVLLPLVSSQCVNLTTRTQLPPAYTNSFTRGVYYPDKVFRSSVLHSTQDLFLPFFSNVTWFHAIHVSGTNGTKRFDNPVLPFNDGVYFASTEKSNIIRGWIFGTTLDSKTQSLLIVNNATNVVIKVCEFQFCNDPFLGVYYHKNNKSWMESEFRVYSSANNCTFEYVSQPFLMDLEGKQGNFKNLREFVFKNIDGYFNIYSKHTPINLVRDLPQGFSALEPLVDLPIGINITRFQTLLALHRSYLTPGDSSSGWTAGAAAYYVGYLQPRTFLLKYNENGTITDAVDCALDPLSETKCTLKSFTVEKGIYQTSNFRVQPTESIVRFPNITNLCPFGEVFNATRFASVYAWNRKRISNCVADYSVLYNSASFSTFKCYGVSPTKLNDLCFTNVYADSFVIRGDEVRQIAPGQTGKIADYNYKLPDDFTGCVIAWNSNNLDSKVGGNYNYLYRLFRKSNLKPFERDISTEIYQAGSTPCNGVEGFNCYFPLQSYGFQPTNGVGYQPYRVVVLSFELLHAPATVCGPKKSTNLVKNKCVNFNFNGLTGTGVLTESNKKFLPFQQFGRDIADTTDAVRDPQTLEILDITPCSFGGVSVITPGTNTSNQVAVLYQGVNCTEVPVAIHADQLTPTWRVYSTGSNVFQTRAGCLIGAEHVNNSYECDIPIGAGICASYQTQTNSPRRARSVASQSIIAYTMSLGAENSVAYSNNSIAIPTNFTISVTTEILPVSMTKTSVDCTMYICGDSTECSNLLLQYGSFCTQLNRALTGIAVEQDKNTQEVFAQVKQIYKTPPIKDFGGFNFSQILPDPSKPSKRSFIEDLLFNKVTLADAGFIKQYGDCLGDIAARDLICAQKFNGLTVLPPLLTDEMIAQYTSALLAGTITSGWTFCAGAALQIPFAMQMAYRFNGIGVTQNVLYENQKLIANQFNSAIGKIQDSLSSTASALGKLQDVVNQNAQALNTLVKQLSSNFGAISSVLNDILSRLDKVEAEVQIDRLITGRLQSLQTYVTQQLIRAAEIRASANLAATKMSECVCGQSKRVDFCGKGYHLMSFPQSAPHGVVFLHVTYVPAQEKNFTTAPAICHDGKAHFPREGVFVSNGTHWFVTQRNFYEPQIITTDNTFVSGNCDVVIGIVNNTVYDPLQPELDSFKEELDKYFKNHTSPDVDLGDISGINASVVNIQKEIDRLNEVAKNLNESLIDLQELGKYEQYIKGGGGSDIIKLLNEQVNKEMQSSNLYMSMSSWCYTHSLDGAGLFLFDHAAEEYEHAKKLIIFLNENNVPVQLTSISAPEHKFEGLTQIFQKAYEHEQHISESINNIVDHAIKSKDHATFNFLQWYVAEQHEEEVLFKDILDKIELIGNENHGLYLADQYVKGIAKSRKS

SEQ ID NO: 5187 - protein, 1379 aa, Artificial Sequence
  SARS-CoV-2/Belgium/BA-02291/2020__EPI_ISL_415159 spike protein (1-1211)(G889C_L1034C) Ferritin construct
MFVFLVLLPLVSSQCVNLTTRTQLPPAYTNSFTRGVYYPDKVFRSSVLHSTQDLFLPFFSNVTWFHAIHVSGTNGTKRFDNPVLPFNDGVYFASTEKSNIIRGWIFGTTLDSKTQSLLIVNNATNVVIKVCEFQFCNDPFLGVYYHKNNKSWMESEFRVYSSANNCTFEYVSQPFLMDLEGKQGNFKNLREFVFKNIDGYFKIYSKHTPINLVRDLPQGFSALEPLVDLPIGINITRFQTLLALHRSYLTPGDSSSGWTAGAAAYYVGYLQPRTFLLKYNENGTITDAVDCALDPLSETKCTLKSFTVEKGIYQTSNFRVQPTESIVRFPNITNLCPFGEVFNATRFASVYAWNRKRISNCVADYSVLYNSASFSTFKCYGVSPTKLNDLCFTNVYADSFVIRGDEVRQIAPGQTGKIADYNYKLPDDFTGCVIAWNSNNLDSKVGGNYNYLYRLFRRSNLKPFERDISTEIYQAGSTPCNGVEGFNCYFPLQSYGFQPTNGVGYQPYRVVVLSFELLPAPATVCGPKKSTNLVKNKCVNFNFNGLTGTGVLTESNKKFLPFQQFGRDIADTTDAVRDPQTLEILDITPCSFGGVSVITPGTNTSNQVAVLYQGVNCTEVPVAIHADQLTPTWRVYSTGSNVFQTRAGCLIGAEHVNNSYECDIPIGAGICASYQTQTNSPRRARSVASQSIIAYTMSLGAENSVAYSNNSIAIPTNFTISVTTEILPVSMTKTSVDCTMYICGDSTECSNLLLQYGSFCTQLNRALTGIAVEQDKNTQEVFAQVKQIYKTPPIKDFGGFNFSQILPDPSKPSKRSFIEDLLFNKVTLADAGFIKQYGDCLGDIAARDLICAQKFNGLTVLPPLLTDEMIAQYTSALLAGTITSGWTFCAGAALQIPFAMQMAYRFNGIGVTQNVLYENQKLIANQFNSAIGKIQDSLSSAAPALGKLQDVVNQNAQALNTLVKQLSSNFGAISSVLNDILSRLDKVEAEVQIDRLITGRLQSLQTYVTQQLIRAAEIRASANLAATKMSECVCGQSKRVDFCGKGYHLMSFPQSAPHGVVFLHVTYVPAQEKNFTTAPAICHDGKAHFPREGVFVSNGTHWFVTQRNFYEPQIITTDNTFVSGNCDVVIGIVNNTVYDPLQPELDSFKEELDKYFKNHTSPDVDLGDISGINASVVNIQKEIDRLNEVAKNLNESLIDLQELGKYEQYIKGGGGSDIIKLLNEQVNKEMQSSNLYMSMSSWCYTHSLDGAGLFLFDHAAEEYEHAKKLIIFLNENNVPVQLTSISAPEHKFEGLTQIFQKAYEHEQHISESINNIVDHAIKSKDHATFNFLQWYVAEQHEEEVLFKDILDKIELIGNENHGLYLADQYVKGIAKSRKS

SEQ ID NO: 5188 - protein, 1379 aa, Artificial Sequence
  SARS-CoV-2/USA/WA8-UW5/2020__EPI_ISL_413486 spike protein (1-1211)(G889C_L1034C) Ferritin construct
MFVFLVLLPLVSSQCVNLTTRTQLPPAYTNSFTRGVYYPDKVFRSSVLHSTQDLFLPFFSNVTWFHAIHVSGTNGTKRFDNPVLPFNDGVYFASTEKSNIIRGWIFGTTLDSKTQSLLIVNNATNVVIKVCEFQFCNDPFLGVYYHKNNKSWMESEFRVYSSANNCTFEYVSQPFLMDLEGKQGNFKNLREFVFKNIDGYFKIYSKHTPINLVRDLPQGFSALEPLVDLPIGINITRFQTLLALHRSYLTPGDSSSGWTAGAAAYYVGYLQPRTFLLKYNENGTITDAVDCALDPLSETKCTLKSFTVEKGIYQTSNFRVQPTESIVRFPNITNLCPFGEVFNATRFASVYAWNRKRISNCVADYSVLYNSASFSTFKCYGVSPTKLNDLCFTNVYADSFVIRGDEVRQIAPGQTGKIADYNYKLPDDFTGCVIAWNSNNLDSKVGGNYNYLYRLFRKSNLKPFERDISTEIYQAGSTPCNGVEGFNCYFPLQSYGFQPTNGVGYQPYRVVVLSFELLHAPATVCGPKKSTNLVKNKCVNFNFNGLTGTGVLTESNKKFLPFQQFGRDIADTTDAVRDPQTLEILDITPCSFGGVSVITPGTNTSNQVAVLYQDVNCTEVPVAIHADQLTPTWRVYSTGSNVFQTRAGCLIGAEYVNNSYECDIPIGAGICASYQTQTNSPRRARSVASQSIIAYTMSLGAENSVAYSNNSIAIPTNFTISVTTEILPVSMTKTSVDCTMYICGDSTECSNLLLQYGSFCTQLNRALTGIAVEQDKNTQEVFAQVKQIYKTPPIKDFGGFNFSQILPDPSKPSKRSFIEDLLFNKVTLADAGFIKQYGDCLGDIAARDLICAQKFNGLTVLPPLLTDEMIAQYTSALLAGTITSGWTFCAGAALQIPFAMQMAYRFNGIGVTQNVLYENQKLIANQFNSAIGKIQDSLSSTASALGKLQDVVNQNAQALNTLVKQLSSNFGAISSVLNDILSRLDKVEAEVQIDRLITGRLQSLQTYVTQQLIRAAEIRASANLAATKMSECVCGQSKRVDFCGKGYHLMSFPQSAPHGVVFLHVTYVPAQEKNFTTAPAICHDGKAHFPREGVFVSNGTHWFVTQRNFYEPQIITTDNTFVSGNCDVVIGIVNNTVYDPLQPELDSFKEELDKYFKNHTSPDVDLGDISGINASVVNIQKEIDRLNEVAKNLNESLIDLQELGKYEQYIKGGGGSDIIKLLNEQVNKEMQSSNLYMSMSSWCYTHSLDGAGLFLFDHAAEEYEHAKKLIIFLNENNVPVQLTSISAPEHKFEGLTQIFQKAYEHEQHISESINNIVDHAIKSKDHATFNFLQWYVAEQHEEEVLFKDILDKIELIGNENHGLYLADQYVKGIAKSRKS

SEQ ID NO: 5189 - protein, 1379 aa, Artificial Sequence
  SARS-CoV-2/England/20102000506/2020__EPI_ISL_415147 spike protein (1-1211)(G889C_L1034C) Ferritin construct
MFVFLVLLPLVSSQCVNLTTRTQLPPAYTNSFTRGVYYPDKVFRSSVLHSTQDLFLPFFSNVTWFHAIHVSGTNGTKRFDNPVLPFNDGVYFASTEKSNIIRGWIFGTTLDSKTQSLLIVNNATNVVIKVCEFQFCNDPFLGVYYHKNNKSWMESEFRVYSSANNCTFEYVSQPFLMDLEGKQGNFKNLREFVFKNIDGYFKIYSKHTPINLVRDLPQGFSALEPLVDLPIGINITRFQTLLALHRSYLTPGDSSSGWTAGAAAYYVGYLQPRTFLLKYNENGTITDAVDCALDPLSETKCTLKSFTVEKGIYQTSNFRVQPTESIVRFPNITNLCPFGEVFNATRFASVYAWNRKRISNCVADYSVLYNSASFSTFKCYGVSPTKLNDLCFTNVYADSFVIRGDEVRQIAPGQTGKIADYNYKLPDDFTGCVIAWNSNNLDSKVGGNYNYLYRLFRKSNLKPFERDISTEIYQAGSTPCNGVEGFNCYFPLQSYGFQPTNGVGYQPYRVVVLSFELLHAPATVCGPKKSTNLVKNKCVNFNFNGLTGTGVLTESNKKFLPFQQFGRDIADTTDAVRDPQTLEILDITPCSFGGVSVITPGTNTSNQVAVLYQGVNCTEVPVAIHADQLTPTWRVYSTGSNVFQTRAGCLIGAEHVNNSYECDIPIGAGICASYQTQTNSPRRARSVASQSIIAYTMSLGAENSVAYSNNSIAIPTNFTISVTTEILPVSMTKTSVDCTMYICGDSTECSNLLLQYGSFCTQLNRALTGIAVEQDKNTQEVFAQVKQIYKTPPIKDFGGFNFSQILPDPSKPSKRSFIEDLLFNKVTLADAGFIKQYGYCLGDIAARDLICAQKFNGLTVLPPLLTDEMIAQYTSALLAGTITSGWTFCAGAALQIPFAMQMAYRFNGIGVTQNVLYENQKLIANQFNSAIGKIQDSLSSTASALGKLQDVVNQNAQALNTLVKQLSSNFGAISSVLNDILSRLDKVEAEVQIDRLITGRLQSLQTYVTQQLIRAAEIRASANLAATKMSECVCGQSKRVDFCGKGYHLMSFPQSAPHGVVFLHVTYVPAQEKNFTTAPAICHDGKAHFPREGVFVSNGTHWFVTQRNFYEPQIITTDNTFVSGNCDVVIGIVNNTVYDPLQPELDSFKEELDKYFKNHTSPDVDLGDISGINASVVNIQKEIDRLNEVAKNLNESLIDLQELGKYEQYIKGGGGSDIIKLLNEQVNKEMQSSNLYMSMSSWCYTHSLDGAGLFLFDHAAEEYEHAKKLIIFLNENNVPVQLTSISAPEHKFEGLTQIFQKAYEHEQHISESINNIVDHAIKSKDHATFNFLQWYVAEQHEEEVLFKDILDKIELIGNENHGLYLADQYVKGIAKSRKS

SEQ ID NO: 5190 - protein, 1379 aa, Artificial Sequence
  SARS-CoV-2/Belgium/VAG-03013/2020__EPI_ISL_415155 spike protein (1-1211)(G889C_L1034C) Ferritin construct
MFVFLVLLPLVSSQCVNLTTRTQLPPAYTNSFTRGVYYPDKVFRSSVLHSTQDLFLPFFSNVTWFHAIHVSGTNGTKRFDNPVLPFNDGVYFASTEKSNIIRGWIFGTTLDSKTQSLLIVNNATNVVIKVCEFQFCNDPFLGVYYHKNNKSWMESEFRVYSSANNCTFEYVSQPFLMDLEGKQGNFKNLREFVFKNIDGYFKIYSKHTPINLVRDLPQGFSALEPLVDLPIGINITRFQTLLALHRSYLTPGDSSSGWTAGAAAYYVGYLQPRTFLLKYNENGTITDAVDCALDPLSETKCTLKSFTVEKGIYQTSNFRVQPTESIVRFPNITNLCPFGEVFNATRFASVYAWNRKRISNCVADYSVLYNSASFSTFKCYGVSPTKLNDLCFTNVYADSFVIRGDEVRQIAPGQTGKIADYNYKLPDDFTGCVIAWNSNNLDSKVGGNYNYLYRLFRKSNLKPFERDISTEIYQAGSTPCNGVEGFNCYFPLQSYGFQPTNGVGYQPYRVVVLSFELLHAPATVCGPKKSTNLVKNKCVNFNFNGLTGTGVLTESNKKFLPFQQFGRDIADTTDAVRDPQTLEILDITPCSFGGVSVITPGTNTSNQVAVLYQGVNCTEVPVAIHADQLTPTWRVYSTGSNVFQTRAGCLIGAEHVNNSYECDIPIGAGICASYQTQTNSPRRARSVASQSIIAYTMSLGAENSVAYSNNSIAIPTNFTISVTTEILPVSMTKTSVDCTMYICGDSTECSNLLLQYGSFCTQLNRALTGIAVEQDKNTQEVFAQVKQIYKTPPIKDFGGFNFSQILPDPSKPSKRSFIEDLLFNKVTLADAGFIKQYGDCLGDIAARDLICAQKFNGLTVLPPLLTDEMIAQYTSALLAGTITSGWTFCAGAALQIPFAMQMAYRFNGIGVTQNVLYENQKLIANQFNSAIGKIQDSLSSTATALGKLQDVVNQNAQALNTLVKQLSSNFGAISSVLNDILSRLDKVEAEVQIDRLITGRLQSLQTYVTQQLIRAAEIRASANLAATKMSECVCGQSKRVDFCGKGYHLMSFPQSAPHGVVFLHVTYVPAQEKNFTTAPAICHDGKAHFPREGVFVSNGTHWFVTQRNFYEPQIITTDNTFVSGNCDVVIGIVNNTVYDPLQPELDSFKEELDKYFKNHTSPDVDLGDISGINASVVNIQKEIDRLNEVAKNLNESLIDLQELGKYEQYIKGGGGSDIIKLLNEQVNKEMQSSNLYMSMSSWCYTHSLDGAGLFLFDHAAEEYEHAKKLIIFLNENNVPVQLTSISAPEHKFEGLTQIFQKAYEHEQHISESINNIVDHAIKSKDHATFNFLQWYVAEQHEEEVLFKDILDKIELIGNENHGLYLADQYVKGIAKSRKS

SEQ ID NO: 5191 - protein, 1379 aa, Artificial Sequence
  SARS-CoV-2/Belgium/BC-03016/2020__EPI_ISL_415157 spike protein (1-1211)(G889C_L1034C) Ferritin construct
MFVFLVLLPLVSSQCVNLTTRTQLPPAYTNSFTRGVYYPDKVFRSSVLHSTQDLFLPFFSNVTWFHAIHVSGTNGTKRFDNPVLPFNDGVYFASTEKSNIIRGWIFGTTLDSKTQSLLIVNNATNVVIKVCEFQFCNDPFLGVYYHKNNKSWMESEFRVYSSANNCTFEYVSQPFLMDLEGKQGNFKNLREFVFKNIDGYFKIYSKHTPINLVRDLPQGFSALEPLVDLPIGINITRFQTLLALHRSYLTPGDSSSGWTAGAAAYYVGYLQPRTFLLKYNENGTITDAVDCALDPLSETKCTLKSFTVEKGIYQTSNFRVQPTESIVRFPNITNLCPFGEVFNATRFASVYAWNRKRISNCVADYSVLYNSASFSTFKCYGVSPTKLNDLCFTNVYADSFVIRGDEVRQIAPGQTGKIADYNYKLPDDFTGCVIAWNSNNLDSKVGGNYNYLYRLFRKSNLKPFERDISTEIYQAGSTPCNGVEGFNCYFPLQSYGFQPTNGVGYQPYRVVVLSFELLHAPATVCGPKKSTNLVKNKCVNFNFNGLTGTGVLTESNKKFLPFQQFGRDIADTTDAVRDPQTLEILDITPCSFGGVSVITPGTNTSNQVAVLYQGVNCTEVPVAIHADQLTPTWRVYSTGSNVFQTRAGCLIGAEHVNNSYECDIPIGAGICASYQTQTNSPRRARSVASQSIIAYTMSLGAENSVAYSNNSIAIPTNFTISVTTEILPVSMTKTSVDCTMYICGDSTECSNLLLQYGSFCTQLNRALTGIAVEQDKNTQEVFAQVKQIYKTPPIKDFGGFNFSQILPDPSKPSKRSFIEDLLFNKVTLADAGFIKQYGDCLGDIAARDLICAQKFNGLTVLPPLLTDEMIAQYTSALLAGTITSGWTFCAGAALQIPFAMQMAYRFNGIGVTQNVLYENQKLIANQFNSAIGKIQDSLSSTAPALGKLQDVVNQNAQALNTLVKQLSSNFGAISSVLNDILSRLDKVEAEVQIDRLITGRLQSLQTYVTQQLIRAAEIRASANLAATKMSECVCGQSKRVDFCGKGYHLMSFPQSAPHGVVFLHVTYVPAQEKNFTTAPAICHDGKAHFPREGVFVSNGTHWFVTQRNFYEPQIITTDNTFVSGNCDVVIGIVNNTVYDPLQPELDSFKEELDKYFKNHTSPDVDLGDISGINASVVNIQKEIDRLNEVAKNLNESLIDLQELGKYEQYIKGGGGSDIIKLLNEQVNKEMQSSNLYMSMSSWCYTHSLDGAGLFLFDHAAEEYEHAKKLIIFLNENNVPVQLTSISAPEHKFEGLTQIFQKAYEHEQHISESINNIVDHAIKSKDHATFNFLQWYVAEQHEEEVLFKDILDKIELIGNENHGLYLADQYVKGIAKSRKS

SEQ ID NO: 5192 - protein, 1379 aa, Artificial Sequence
  SARS-CoV-2/Germany/BavPat3/2020__EPI_ISL_414521 spike protein (1-1211)(G889C_L1034C) Ferritin construct
MFVFLVLLPLVSSQCVNLTTRTQLPPAYTNSFTRGVYYPDKVFRSSVLHSTQDLFLPFFSNVTWFHAIHVSGTNGTKRFDNPVLPFNDGVYFASTEKSNIIRGWIFGTTLDSKTQSLLIVNNATNVVIKVCEFQFCNDPFLGVYYHKNNKSWMESEFRVYSSANNCTFEYVSQPFLMDLEGKQGNFKNLREFVFKNIDGYFKIYSKHTPINLVRDLPQGFSALEPLVDLPIGINITRFQTLLALHRSYLTPGDSSSGWTAGAAAYYVGYLQPRTFLLKYNENGTITDAVDCALDPLSETKCTLKSFTVEKGIYQTSNFRVQPTESIVRFPNITNLCPFGEVFNATRFASVYAWNRKRISNCVADYSVLYNSASFSTFKCYGVSPTKLNDLCFTNVYADSFVIRGDEVRQIAPGQTGKIADYNYKLPDDFTGCVIAWNSNNLDSKVGGNYNYLYRLFRKSNLKPFERDISTEIYQAGSTPCNGVEGFNCYFPLQSYGFQPTNGVGYQPYRVVVLSFELLHAPATVCGPKKSTNLVKNKCVNFNFNGLTGTGVLTESNKKFLPFQQFGRDIADTTDAVRDPQTLEILDITPCSFGGVSVITPGTNTSNQVAVLYQDVNCTEVPVAIHADQLTPTWRVYSTGSNVFQTRAGCLIGAEHVNNSYECDIPIGAGICASYQTQTNSPRRARSVASQSIIAYTMSLGAENSVAYSNNSIAIPTNFTISVTTEILPVSMTKTSVDCTMYICGDSTECSNLLLQYGSFCTQLNRALTGIAVEQDKNTQQVFAQVKQIYKTPPIKDFGGFNFSQILPDPSKPSKRSFIEDLLFNKVTLADAGFIKQYGDCLGDIAARDLICAQKFNGLTVLPPLLTDEMIAQYTSALLAGTITSGWTFCAGAALQIPFAMQMAYRFNGIGVTQNVLYENQKLIANQFNSAIGKIQDSLSSTASALGKLQDVVNQNAQALNTLVKQLSSNFGAISSVLNDILSRLDKVEAEVQIDRLITGRLQSLQTYVTQQLIRAAEIRASANLAATKMSECVCGQSKRVDFCGKGYHLMSFPQSAPHGVVFLHVTYVPAQEKNFTTAPAICHDGKAHFPREGVFVSNGTHWFVTQRNFYEPQIITTDNTFVSGNCDVVIGIVNNTVYDPLQPELDSFKEELDKYFKNHTSPDVDLGDISGINASVVNIQKEIDRLNEVAKNLNESLIDLQELGKYEQYIKGGGGSDIIKLLNEQVNKEMQSSNLYMSMSSWCYTHSLDGAGLFLFDHAAEEYEHAKKLIIFLNENNVPVQLTSISAPEHKFEGLTQIFQKAYEHEQHISESINNIVDHAIKSKDHATFNFLQWYVAEQHEEEVLFKDILDKIELIGNENHGLYLADQYVKGIAKSRKS

SEQ ID NO: 5193 - protein, 1379 aa, Artificial Sequence
  SARS-CoV-2/France/HF1805/2020__EPI_ISL_414628 spike protein (1-1211)(G889C_L1034C) Ferritin construct
MFVFLVLLPLVSSQCVNLTTRTQLPPAYTNSFTRGVYYPDKVFRSSVLHSTQDLFLPFFSNVTWFHAIHVSGTNGTKRFDNPVLPFNDGVYFASTEKSNIIRGWIFGTTLDSKTQSLLIVNNATNVVIKVCEFQFCNDPFLGVYYHKNNKSWMESEFRVYSSANNCTFEYVSQPFLMDLEGKQGNFKNLREFVFKNIDGYFKIYSKHTPINLVRDLPQGFSALEPLVDLPIGINITRFQTLLALHRSYLTPGDSSSGWTAGAAAYYVGYLQPRTFLLKYNENGTITDAVDCALDPLSETKCTLKSFTVEKGIYQTSNFRVQPTESIVRFPNITNLCPFGEVFNATRFASVYAWNRKRISNCVADYSVLYNSASFSTFKCYGVSPTKLNDLCFTNVYADSFVIRGDEVRQIAPGQTGKIADYNYKLPDDFTGCVIAWNSNNLDSKVGGNYNYLYRLFRKSNLKPFERDISTEIYQAGSTPCNGVEGFNCYFPLQSYGFQPTNGVGYQPYRVVVLSFELLHAPATVCGPKKSTNLVKNKCVNFNFNGLTGTGVLTESNKKFLPFQQFGRDIADTTDAVRDPQTLEILDITPCSFGGVSVITPGTNTSNQVAVLYQGVNCTEVPVAIHADQLTPTWRVYSTGSNVFQTRAGCLIGAEHVNNSYECDIPIGAGICASYQTQTNSPRRARSVASQSIIAYTMSLGAENSVAYSNNSIAIPTNFTISVTTEILPVSMTKTSVDCTMYICGDSTECSNLLLQYGSFCTQLNRALTGIAVEQDKNTQEVFAQVKQIYKTPPIKDFGGFNFSQILPDPSKPSKRSFIEDLLFNKVTLADAGFIKQYGDCLGDIAARDLICAQKFNGLTVLPPLLTDEMIAQYTSALLAGTITSGWTFCAGAALQIPFAMQMAYRFNGIGVTQNVLYENQKLIANQFNSAIGKIQDSLSSTASALGKLQDVVNQNAQALNTLVKQLSSNFGAISSVLNDILSRLDKVEAEVQIDRLITGRLQSLQTYVTQQLIRAAEIRASANLAATKMSECVCGQSKRVDFCGKGYHLMSFPQSAPHGVVFLHVTYVPAQEKNFTTAPAICHDGKAHFPREGVFVSNGTHWFVTQRNFYEPQIITTDNTFVSGNCDVVIGVVNNTVYDPLQPELDSFKEELDKYFKNHTSPDVDLGDISGINASVVNIQKEIDRLNEVAKNLNESLIDLQELGKYEQYIKGGGGSDIIKLLNEQVNKEMQSSNLYMSMSSWCYTHSLDGAGLFLFDHAAEEYEHAKKLIIFLNENNVPVQLTSISAPEHKFEGLTQIFQKAYEHEQHISESINNIVDHAIKSKDHATFNFLQWYVAEQHEEEVLFKDILDKIELIGNENHGLYLADQYVKGIAKSRKS

SEQ ID NO: 5194 - protein, 1379 aa, Artificial Sequence
  SARS-CoV-2/Netherlands/ZuidHolland_9/2020__EPI_ISL_414445 spike protein (1-1211)(G889C_L1034C) Ferritin construct
MFVFLVLLPLVSSQCVNLTTRTQLPPAYTNSFTRGVYYPDKVFRSSVLHSTQDLFLPFFSNVTWFHAIHVSGTNGTKRFDNPVLPFNDGVYFASTEKSNIIRGWIFGTTLDSKTQSLLIVNNATNVVIKVCEFQFCNDPFLGVYYHKNNKSWMESEFRVYSSANNCTFEYVSQPFLMDLEGKQGNFKNLREFVFKNIDGYFKIYSKHTPINLVRDLPQGFSALEPLVDLPIGINITRFQTLLALHRSYLTPGDSSSGWTAGAAAYYVGYLQPRTFLLKYNENGTITDAVDCALDPLSETKCTLKSFTVEKGIYQTSNFRVQPTESIVRFPNITNLCPFGEVFNATRFASVYAWNRKRISNCVADYSVLYNSASFSTFKCYGVSPTKLNDLCFTNVYADSFVIRGDEVRQIAPGQTGKIADYNYKLPDDFTGCVIAWNSNNLDSKVGGNYNYLYRLFRKSNLKPFERDISTEIYQAGSTPCNGVEGFNCYFPLQSYGFQPTNGVGYQPYRVVVLSFELLHAPATVCGPKKSTNLVKNKCVNFNFNGLTGTGVLTESNKKFLPFQQFGRDIADTTDAVRDPQTLEILDITPCSFGGVSVITPGTNTSNQVAVLYQGVNCTEVPVAIHADQLTPTWRVYSTGSNVFQTRAGCLIGAEHVNNSYECDIPIGAGICASYQTQTNSPRRARSVASQSIIAYTMSLGAENSVAYSNNSIAIPTNFTISVTTEILPVSMTKTSVDCTMYICGDSTECSNLLLQYGSFCTQLNRALTGIAVEQDKNTQEVFAQVKQIYKTPPIKDFGGFNFSQILPDPSKPSKRSFIEDLLFNKVTLADAGFIKQYGDCLGDIAARDLICVQKFNGLTVLPPLLTDEMIAQYTSALLAGTITSGWTFCAGAALQIPFAMQMAYRFNGIGVTQNVLYENQKLIANQFNSAIGKIQDSLSSTASALGKLQDVVNQNAQALNTLVKQLSSNFGAISSVLNDILSRLDKVEAEVQIDRLITGRLQSLQTYVTQQLIRAAEIRASANLAATKMSECVCGQSKRVDFCGKGYHLMSFPQSAPHGVVFLHVTYVPAQEKNFTTAPAICHDGKAHFPREGVFVSNGTHWFVTQRNFYEPQIITTDNTFVSGNCDVVIGIVNNTVYDPLQPELDSFKEELDKYFKNHTSPDVDLGDISGINASVVNIQKEIDRLNEVAKNLNESLIDLQELGKYEQYIKGGGGSDIIKLLNEQVNKEMQSSNLYMSMSSWCYTHSLDGAGLFLFDHAAEEYEHAKKLIIFLNENNVPVQLTSISAPEHKFEGLTQIFQKAYEHEQHISESINNIVDHAIKSKDHATFNFLQWYVAEQHEEEVLFKDILDKIELIGNENHGLYLADQYVKGIAKSRKS

SEQ ID NO: 5195 - protein, 1379 aa, Artificial Sequence
  SARS-CoV-2/Finland/FIN03032020A/2020__EPI_ISL_413602 spike protein (1-1211)(G889C_L1034C) Ferritin construct
MFVFLVLLPLVSSQCVNLTTRTQLPPAYTNSFTRGVYYPDKVFRSSVLHSTQDLFLPFFSNVTWFHAIHVSGTNGTKRFDNPVLPFNDGVYFASTEKSNIIRGWIFGTTLDSKTQSLLIVNNATNVVIKVCEFQFCNDPFLGVYYHKNNKSWMESEFRVYSSANNCTFEYVSQPFLMDLEGKQGNFKNLREFVFKNIDGYFKIYSKHTPINLVRDLPQGFSALEPLVDLPIGINITRFQTLLALHRSYLTPGDSSSGWTAGAAAYYVGYLQPRTFLLKYNENGTITDAVDCALDPLSETKCTLKSFTVEKGIYQTSNFRVQPTESIVRFPNITNLCPFGEVFNATRFASVYAWNRKRISNCVADYSVLYNSASFSTFKCYGVSPTKLNDLCFTNVYADSFVIRGDEVRQIAPGQTGKIADYNYKLPDDFTGCVISWNSNNLDSKVGGNYNYLYRLFRKSNLKPFERDISTEIYQAGSTPCNGVEGFNCYFPLQSYGFQPTNGVGYQPYRVVVLSFELLHAPATVCGPKKSTNLVKNKCVNFNFNGLTGTGVLTESNKKFLPFQQFGRDIADTTDAVRDPQTLEILDITPCSFGGVSVITPGTNTSNQVAVLYQGVNCTEVPVAIHADQLTPTWRVYSTGSNVFQTRAGCLIGAEHVNNSYECDIPIGAGICASYQTQTNSPRRARSVASQSIIAYTMSLGAENSVAYSNNSIAIPTNFTISVTTEILPVSMTKTSVDCTMYICGDSTECSNLLLQYGSFCTQLNRALTGIAVEQDKNTQEVFAQVKQIYKTPPIKDFGGFNFSQILPDPSKPSKRSFIEDLLFNKVTLADAGFIKQYGDCLGDIAARDLICAQKFNGLTVLPPLLTDEMIAQYTSALLAGTITSGWTFCAGAALQIPFAMQMAYRFNGIGVTQNVLYENQKLIANQFNSAIGKIQDSLSSTASALGKLQDVVNQNAQALNTLVKQLSSNFGAISSVLNDILSRLDKVEAEVQIDRLITGRLQSLQTYVTQQLIRAAEIRASANLAATKMSECVCGQSKRVDFCGKGYHLMSFPQSAPHGVVFLHVTYVPAQEKNFTTAPAICHDGKAHFPREGVFVSNGTHWFVTQRNFYEPQIITTDNTFVSGNCDVVIGIVNNTVYDPLQPELDSFKEELDKYFKNHTSPDVDLGDISGINASVVNIQKEIDRLNEVAKNLNESLIDLQELGKYEQYIKGGGGSDIIKLLNEQVNKEMQSSNLYMSMSSWCYTHSLDGAGLFLFDHAAEEYEHAKKLIIFLNENNVPVQLTSISAPEHKFEGLTQIFQKAYEHEQHISESINNIVDHAIKSKDHATFNFLQWYVAEQHEEEVLFKDILDKIELIGNENHGLYLADQYVKGIAKSRKS

SEQ ID NO: 5196 - protein, 1379 aa, Artificial Sequence
  SARS-CoV-2/France/GE1977/2020__EPI_ISL_414632 spike protein (1-1211)(G889C_L1034C) Ferritin construct
MFVFLVLLPLVSSQCVNLTTRTQLPPAYTNSFTRGVYYPDKVFRSSVLHSTQDLFLPFFSNVTWFHAIHVSGTNGTKRFDNPVLPFNDGVYFASTEKSNIIRGWIFGTTLDSKTQSLLIVNNATNVVIKVCEFQFCNDPFLGVYYHKNNKSWMESEFRVYSSANNCTFEYVSQPFLMDLEGKQGNFKNLREFVFKNIDGYFKIYSKHTPINLVRDLPQGFSALEPLVDLPIGINITRFQTLLALHRSYLTPGDSSSGWTAGAAAYYVGYLQPRTFLLKYNENGTITDAVDCALDPLSETKCTLKSFTVEKGIYQTSNFRVQPTESIVRFPNITNLCPFGEVFNATRFASVYAWNRKRISNCVADYSVLYNSASFSTFKCYGVSPTKLNDLCFTNVYADSFVIRGDEVRQIAPGQTGKIADYNYKLPDDFTGCVIAWNSNNLDSKVGGNYNYLYRLFRKSNLKPFERDISTEIYQAGSTPCNGVEGFNCYFPLQSYGFQPTNGVGYQPYRVVVLSFELLHAPATVCGPKKSTNLVKNKCVNFNFNGLTGTGVLTESNKKFLPFQQFGRDIADTTDAVRDPQTLEILDITPCSFGGVSVITPGTNTSNQVAVLYQGVNCTEVPVAIHADQLTPTWRVYSTGSNVFQTRAGCLIGAEHVNNSYECDIPIGAGICASYQTQTNSPRRARSVASQSIIAYTMSLGAENSVAYSNNSIAIPTNFTISVTTEILPVSMTKTSVDCTMYICGDSTECSNLLLQYGSFCTQLNRALTGIAVEQDKNTQEVFAQVKQIYKTPPIKDFGGFNFSQILPDPSKPSKRSFIEDLLFNKVTLADAGFIKQYGDCLGDIAARDLICAQKFNGLTVLPPLLTDEMIAQYTSALLAGTITSGWTFCAGAALQIPFAMQMAYRFNGIGVTQNVLYENQKLIANQFNSAIGKIQDSLFSTASALGKLQDVVNQNAQALNTLVKQLSSNFGAISSVLNDILSRLDKVEAEVQIDRLITGRLQSLQTYVTQQLIRAAEIRASANLAATKMSECVCGQSKRVDFCGKGYHLMSFPQSAPHGVVFLHVTYVPAQEKNFTTAPAICHDGKAHFPREGVFVSNGTHWFVTQRNFYEPQIITTDNTFVSGNCDVVIGIVNNTVYDPLQPELDSFKEELDKYFKNHTSPDVDLGDISGINASVVNIQKEIDRLNEVAKNLNESLIDLQELGKYEQYIKGGGGSDIIKLLNEQVNKEMQSSNLYMSMSSWCYTHSLDGAGLFLFDHAAEEYEHAKKLIIFLNENNVPVQLTSISAPEHKFEGLTQIFQKAYEHEQHISESINNIVDHAIKSKDHATFNFLQWYVAEQHEEEVLFKDILDKIELIGNENHGLYLADQYVKGIAKSRKS

SEQ ID NO: 5197 - protein, 1379 aa, Artificial Sequence
  SARS-CoV-2/Finland/FIN-313/2020__EPI_ISL_414641 spike protein (1-1211)(G889C_L1034C) Ferritin construct
MFVFLVLLPLVSSQCVNLTTRTQLPPAYTNSFTRGVYYPDKVFRSSVLHSTQDLFLPFFSNVTWFHAIHVSGTNGTKRFDNPVLPFNDGVYFASTEKSNIIRGWIFGTTLDSKTQSLLIVNNATNVVIKVCEFQFCNDPFLGVYYHKNNKSWMESEFRVYSSANNCTFEYVSQPFLMDLEGKQGNFKNLREFVFKNIDGYFKIYSKHTPINLVRDLPQGFSALEPLVDLPIGINITRFKTLLALHRSYLTPGDSSSGWTAGAAAYYVGYLQPRTFLLKYNENGTITDAVDCALDPLSETKCTLKSFTVEKGIYQTSNFRVQPTESIVRFPNITNLCPFGEVFNATRFASVYAWNRKRISNCVADYSVLYNSASFSTFKCYGVSPTKLNDLCFTNVYADSFVIRGDEVRQIAPGQTGKIADYNYKLPDDFTGCVIAWNSNNLDSKVGGNYNYLYRLFRKSNLKPFERDISTEIYQAGSTPCNGVEGFNCYFPLQSYGFQPTNGVGYQPYRVVVLSFELLHAPATVCGPKKSTNLVKNKCVNFNFNGLTGTGVLTESNKKFLPFQQFGRDIADTTDAVRDPQTLEILDITPCSFGGVSVITPGTNTSNQVAVLYQGVNCTEVPVAIHADQLTPTWRVYSTGSNVFQTRAGCLIGAEHVNNSYECDIPIGAGICASYQTQTNSPRRARSVASQSIIAYTMSLGAENSVAYSNNSIAIPTNFTISVTTEILPVSMTKTSVDCTMYICGDSTECSNLLLQYGSFCTQLNRALTGIAVEQDKNTQEVFAQVKQIYKTPPIKDFGGFNFSQILPDPSKPSKRSFIEDLLFNKVTLADAGFIKQYGDCLGDIAARDLICAQKFNGLTVLPPLLTDEMIAQYTSALLAGTITSGWTFCAGAALQIPFAMQMAYRFNGIGVTQNVLYENQKLIANQFNSAIGKIQDSLSSTASALGKLQDVVNQNAQALNTLVKQLSSNFGAISSVLNDILSRLDKVEAEVQIDRLITGRLQSLQTYVTQQLIRAAEIRASANLAATKMSECVCGQSKRVDFCGKGYHLMSFPQSAPHGVVFLHVTYVPAQEKNFTTAPAICHDGKAHFPREGVFVSNGTHWFVTQRNFYEPQIITTDNTFVSGNCDVVIGIVNNTVYDPLQPELDSFKEELDKYFKNHTSPDVDLGDISGINASVVNIQKEIDRLNEVAKNLNESLIDLQELGKYEQYIKGGGGSDIIKLLNEQVNKEMQSSNLYMSMSSWCYTHSLDGAGLFLFDHAAEEYEHAKKLIIFLNENNVPVQLTSISAPEHKFEGLTQIFQKAYEHEQHISESINNIVDHAIKSKDHATFNFLQWYVAEQHEEEVLFKDILDKIELIGNENHGLYLADQYVKGIAKSRKS

SEQ ID NO: 5198 - protein, 1379 aa, Artificial Sequence
  SARS-CoV-2/Netherlands/ZuidHolland_2/2020__EPI_ISL_414556 spike protein (1-1211)(G889C_L1034C) Ferritin construct
MFVFLVLLPLVSSQCVNLTTRTQLPPAYTNSFTRGVYYPDKVFRSSVLHSTQDLFLPFFSNVTWFHAIHVSGTNGTKRFDNPVLPFNDGVYFASTEKSNIIRGWIFGTTLDSKTQSLLIVNNATNVVIKVCEFQFCNDPFLGVYYHKNNKSWMESEFRVYSSANNCTFEYVSQPFLMDLEGKQGNFKNLREFVFKNIDGYFKIYSKHTPINLVRDLPQGFSALEPLVDLPIGINITRFQTLLALHRSYLTPGDSSSGWTAGAAAYYVGYLQPRTFLLKYNENGTITDAVDCALDPLSETKCTLKSFTVEKGIYQTSNFRVQPTESIVRFPNITNLCPFGEVFNATRFASVYAWNRKRISNCVADYSVLYNSASFSTFKCYGVSPTKLNDLCFTNVYADSFVIRGDEVRQIAPGQTGKIADYNYKLPDDFTGCVIAWNSNNLDSKVGGNYNYLYRLFRKSNLKPFERDISTEIYQAGSTPCNGVEGFNCYFPLQSYGFQPTNGVGYQPYRVVVLSFELLHAPATVCGPKKSTNLVKNKCVNFNFNGLTGTGVLTESNKKFLPFQQFGRDIADTTDAVRDPQTLEILDITPCSFGGVSVITPGTNTSNQVAVLYQGVNCTEVPVAIHADQLTPTWRVYSTGSNVFQTRAGCLIGAEHVNNSYECDIPIGAGICASYQTQTNSPRRARSVASQSIIAYTMSLGAENSVAYSNNSIAIPTNFTISVTTEILPVSMTKTSVDCTMYICGDSTECSNLLLQYGSFCTQLNRALTGIALEQDKNTQEVFAQVKQIYKTPPIKDFGGFNFSQILPDPSKPSKRSFIEDLLFNKVTLADAGFIKQYGDCLGDIAARDLICAQKFNGLTVLPPLLTDEMIAQYTSALLAGTITSGWTFCAGAALQIPFAMQMAYRFNGIGVTQNVLYENQKLIANQFNSAIGKIQDSLSSTASALGKLQDVVNQNAQALNTLVKQLSSNFGAISSVLNDILSRLDKVEAEVQIDRLITGRLQSLQTYVTQQLIRAAEIRASANLAATKMSECVCGQSKRVDFCGKGYHLMSFPQSAPHGVVFLHVTYVPAQEKNFTTAPAICHDGKAHFPREGVFVSNGTHWFVTQRNFYEPQIITTDNTFVSGNCDVVIGIVNNTVYDPLQPELDSFKEELDKYFKNHTSPDVDLGDISGINASVVNIQKEIDRLNEVAKNLNESLIDLQELGKYEQYIKGGGGSDIIKLLNEQVNKEMQSSNLYMSMSSWCYTHSLDGAGLFLFDHAAEEYEHAKKLIIFLNENNVPVQLTSISAPEHKFEGLTQIFQKAYEHEQHISESINNIVDHAIKSKDHATFNFLQWYVAEQHEEEVLFKDILDKIELIGNENHGLYLADQYVKGIAKSRKS

SEQ ID NO: 5199 - protein, 1379 aa, Artificial Sequence
  SARS-CoV-2/USA/WA-UW31/2020__EPI_ISL_414618 spike protein (1-1211)(G889C_L1034C) Ferritin construct
MFVFLVLLPLVSSQCVNLTTRTQLPPAYTNSFTRGVYYPDKVFRSSVLHSTQDLFLPFFSNVTWFHAIHVSGTNGTKRFDNPVLPFNDGVYFASTEKSNIIRGWIFGTTLDSKTQSLLIVNNATNVVIKVCEFQFCNDPFLGVYYHKNNKSWMESEFRVYSSANNCTFEYVSQPFLMDLEGKQGNFKNLREFVFKNIDGYFKIYSKHTPINLVRDLPQGFSALEPLVDLPIGINITRFQTLLALHRSYLTPGDSSSGWTAGAAAYYVGYLQPRTFLLKYNENGTITDAVDCALDPLSETKCTLKSFTVEKGIYQTSNFRVQPTESIVRFPNITNLCPFGEVFNATRFASVYAWNRKRISNCVADYSVLYNSASFSTFKCYGVSPTKLNDLCFTNVYADSFVIRGDEVRQIAPGQTGKIADYNYKLPDDFTGCVIAWNSNNLDSKVGGNYNYLYRLFRKSNLKPFERDISTEIYQAGSTPCNGAEGFNCYFPLQSYGFQPTNGVGYQPYRVVVLSFELLHAPATVCGPKKSTNLVKNKCVNFNFNGLTGTGVLTESNKKFLPFQQFGRDIADTTDAVRDPQTLEILDITPCSFGGVSVITPGTNTSNQVAVLYQDVNCTEVPVAIHADQLTPTWRVYSTGSNVFQTRAGCLIGAEHVNNSYECDIPIGAGICASYQTQTNSPRRARSVASQSIIAYTMSLGAENSVAYSNNSIAIPTNFTISVTTEILPVSMTKTSVDCTMYICGDSTECSNLLLQYGSFCTQLNRALTGIAVEQDKNTQEVFAQVKQIYKTPPIKDFGGFNFSQILPDPSKPSKRSFIEDLLFNKVTLADAGFIKQYGDCLGDIAARDLICAQKFNGLTVLPPLLTDEMIAQYTSALLAGTITSGWTFCAGAALQIPFAMQMAYRFNGIGVTQNVLYENQKLIANQFNSAIGKIQDSLSSTASALGKLQDVVNQNAQALNTLVKQLSSNFGAISSVLNDILSRLDKVEAEVQIDRLITGRLQSLQTYVTQQLIRAAEIRASANLAATKMSECVCGQSKRVDFCGKGYHLMSFPQSAPHGVVFLHVTYVPAQEKNFTTAPAICHDGKAHFPREGVFVSNGTHWFVTQRNFYEPQIITTDNTFVSGNCDVVIGIVNNTVYDPLQPELDSFKEELDKYFKNHTSPDVDLGDISGINASVVNIQKEIDRLNEVAKNLNESLIDLQELGKYEQYIKGGGGSDIIKLLNEQVNKEMQSSNLYMSMSSWCYTHSLDGAGLFLFDHAAEEYEHAKKLIIFLNENNVPVQLTSISAPEHKFEGLTQIFQKAYEHEQHISESINNIVDHAIKSKDHATFNFLQWYVAEQHEEEVLFKDILDKIELIGNENHGLYLADQYVKGIAKSRKS

SEQ ID NO: 5200 - protein, 1379 aa, Artificial Sequence
  SARS-CoV-2/South Korea/SNU01/2020__EPI_ISL_411929 spike protein (1-1211)(G889C_L1034C) Ferritin construct
MFVFLVLLPLVSSQCVNLTTRTQLPPAYTNSFTRGVYYPDKVFRSSVLHSTQDLFLPFFSNVTWFHAIHVSGTNGTKRFDNPVLPFNDGVYFASTEKSNIIRGWIFGTTLDSKTQSLLIVNNATNVVIKVCEFQFCNDPFLGVYYHKNNKSWMESEFRVYSSANNCTFEYVSQPFLMDLEGKQGNFKNLREFVFKNIDGYFKIYSKHTPINLVRDLPQGFWALEPLVDLPIGINITRFQTLLALHRSYLTPGDSSSGWTAGAAAYYVGYLQPRTFLLKYNENGTITDAVDCALDPLSETKCTLKSFTVEKGIYQTSNFRVQPTESIVRFPNITNLCPFGEVFNATRFASVYAWNRKRISNCVADYSVLYNSASFSTFKCYGVSPTKLNDLCFTNVYADSFVIRGDEVRQIAPGQTGKIADYNYKLPDDFTGCVIAWNSNNLDSKVGGNYNYLYRLFRKSNLKPFERDISTEIYQAGSTPCNGVEGFNCYFPLQSYGFQPTNGVGYQPYRVVVLSFELLHAPATVCGPKKSTNLVKNKCVNFNFNGLTGTGVLTESNKKFLPFQQFGRDIADTTDAVRDPQTLEILDITPCSFGGVSVITPGTNTSNQVAVLYQDVNCTEVPVAIHADQLTPTWRVYSTGSNVFQTRAGCLIGAEHVNNSYECDIPIGAGICASYQTQTNSPRRARSVASQSIIAYTMSLGAENSVAYSNNSIAIPTNFTISVTTEILPVSMTKTSVDCTMYICGDSTECSNLLLQYGSFCTQLNRALTGIAVEQDKNTQEVFAQVKQIYKTPPIKDFGGFNFSQILPDPSKPSKRSFIEDLLFNKVTLADAGFIKQYGDCLGDIAARDLICAQKFNGLTVLPPLLTDEMIAQYTSALLAGTITSGWTFCAGAALQIPFAMQMAYRFNGIGVTQNVLYENQKLIANQFNSAIGKIQDSLSSTASALGKLQDVVNQNAQALNTLVKQLSSNFGAISSVLNDILSRLDKVEAEVQIDRLITGRLQSLQTYVTQQLIRAAEIRASANLAATKMSECVCGQSKRVDFCGKGYHLMSFPQSAPHGVVFLHVTYVPAQEKNFTTAPAICHDGKAHFPREGVFVSNGTHWFVTQRNFYEPQIITTDNTFVSGNCDVVIGIVNNTVYDPLQPELDSFKEELDKYFKNHTSPDVDLGDISGINASVVNIQKEIDRLNEVAKNLNESLIDLQELGKYEQYIKGGGGSDIIKLLNEQVNKEMQSSNLYMSMSSWCYTHSLDGAGLFLFDHAAEEYEHAKKLIIFLNENNVPVQLTSISAPEHKFEGLTQIFQKAYEHEQHISESINNIVDHAIKSKDHATFNFLQWYVAEQHEEEVLFKDILDKIELIGNENHGLYLADQYVKGIAKSRKS

SEQ ID NO: 5201 - protein, 1379 aa, Artificial Sequence
  SARS-CoV-2/China/WF0004/2020__EPI_ISL_413694 spike protein (1-1211)(G889C_L1034C) Ferritin construct
MFVFLVLLPLVSSQCVNLTTRTQLPPAYTNSFTRGVYYPDKVFRSSVLHSTQDLFLPFFSNVTWFHAIHVSGTNGTKRFDNPVLPFNDGVYFASTEKSNIIRGWIFGTTLDSKTQSLLIVNNATNVVIKVCEFQFCNDPFLGVYYHKNNKSWTESEFRVYSSANNCTFEYVSQPFLMDLEGKQGNFKNLREFVFKNIDGYFKIYSKHTPINLVRDLPQGFSALEPLVDLPIGINITRFQTLLALHRSYLTPGDSSSGWTAGAAAYYVGYLQPRTFLLKYNENGTITDAVDCALDPLSETKCTLKSFTVEKGIYQTSNFRVQPTESIVRFPNITNLCPFGEVFNATRFASVYAWNRKRISNCVADYSVLYNSASFSTFKCYGVSPTKLNDLCFTNVYADSFVIRGDEVRQIAPGQTGKIADYNYKLPDDFTGCVIAWNSNNLDSKVGGNYNYLYRLFRKSNLKPFERDISTEIYQAGSTPCNGVEGFNCYFPLQSYGFQPTNGVGYQPYRVVVLSFELLHAPATVCGPKKSTNLVKNKCVNFNFNGLTGTGVLTESNKKFLPFQQFGRDIADTTDAVRDPQTLEILDITPCSFGGVSVITPGTNTSNQVAVLYQDVNCTEVPVAIHADQLTPTWRVYSTGSNVFQTRAGCLIGAEHVNNSYECDIPIGAGICASYQTQTNSPRRARSVASQSIIAYTMSLGAENSVAYSNNSIAIPTNFTISVTTEILPVSMTKTSVDCTMYICGDSTECSNLLLQYGSFCTQLNRALTGIAVEQDKNTQEVFAQVKQIYKTPPIKDFGGFNFSQILPDPSKPSKRSFIEDLLFNKVTLADAGFIKQYGDCLGDIAARDLICAQKFNGLTVLPPLLTDEMIAQYTSALLAGTITSGWTFCAGAALQIPFAMQMAYRFNGIGVTQNVLYENQKLIANQFNSAIGKIQDSLSSTASALGKLQDVVNQNAQALNTLVKQLSSNFGAISSVLNDILSRLDKVEAEVQIDRLITGRLQSLQTYVTQQLIRAAEIRASANLAATKMSECVCGQSKRFDFCGKGYHLMSFPQSAPHGVVFLHVTYVPAQEKNFTTAPAICHDGKAHFPREGVFVSNGTHWFVTQRNFYEPQIITTDNTFVSGNCDVVIGIVNNTVYDPLQPELDSFKEELDKYFKNHTSPDVDLGDISGINASVVNIQKEIDRLNEVAKNLNESLIDLQELGKYEQYIKGGGGSDIIKLLNEQVNKEMQSSNLYMSMSSWCYTHSLDGAGLFLFDHAAEEYEHAKKLIIFLNENNVPVQLTSISAPEHKFEGLTQIFQKAYEHEQHISESINNIVDHAIKSKDHATFNFLQWYVAEQHEEEVLFKDILDKIELIGNENHGLYLADQYVKGIAKSRKS

SEQ ID NO: 5202 - protein, 1379 aa, Artificial Sequence
  SARS-CoV-2/China/WF0028/2020__EPI_ISL_413791 spike protein (1-1211)(G889C_L1034C) Ferritin construct
MFVFLVLLPLVSSQCVNLTTRTQLPPAYTNSFTRGVYYPDKVFRSSVLHSTQDLFLPFFSNVTWFHAIHVSGTNGTKRFDNPVLPFNDGVYFASTEKSNIIRGWIFGTTLDSKTQSLLIVNNATNVVIKVCEFQFCNDPFLGVYYHKNNKSWMESEFRVYSSANNCTFEYVSQPFLMDLEGKQGNFKNLREFVFKNIDGYFKIYSKHTPINLVRDLPQGFSALEPLVDLPIGINITRFQTLLALHRSYLTPGDSSSGWTAGAAAYYVGYLQPRTFLLKYNENGTITDAVDCALDPLSETKCTLKSFTVEKGIYQTSNFRVQPTESIVRFPNITNLCPFGEVFNATRFASVYAWNRKRISNCVADYSVLYNSASFSTFKCYGVSPTKLNDLCFTNVYADSFVIRGDEVRQIAPGQTGKIADYNYKLPDDFTGCVIAWNSNNLDSKVGGNYNYLYRLFRKSNLKPFERDISTEIYQAGSTPCNGVEGFNCYFPLQSYGFQPTNGVGYQPYRVVVLSFELLHAPATVCGPKKSTNLVKNKCVNFNFNGLTGTGVLTESNKKFLPFQQFGRDIADTTDAVRDPQTLEILDITPCSFGGVSVITPGTNTSNQVAVLYQDVNCTEVPVAIHADQLTPTWRVYSTGSNVFQTRAGCLIGAEHVNNSYECDIPIGAGICASYQTQTNSPRRARSVASQSIIAYTMSLGAENSVAYSNNSIAIPTNFTISVTTEILPVSMTKTSVDCTMYICGDSTECSNLLLQYGSFCTQLNRALTGIAVEQDKNTQEVFAQVKQIYKTPPIKDFGGFNFSQILPDPSKPSKRSFIEDLLFNKVTLADAGFIKQYGDCLGDIAARDLICAQKFNGLTVLPPLLTDEMIAQYTSALLAGTITSGWTFCAGAALQIPFAMQMAYRFNGIGVTQNVLYENQKLIANQFNSAIGKIQDSLSSTASALGKLQDVVNQNAQALNTLVKQLSSNFGAISSVLNDILSRLDKVEAEVQIDRLITGRLQSLQTYVTQQLIRAAEIRASANLAATKMSECVCGQSKRVDFCGKGYHLMSFPQSAPHGVVFLHVTYVPAQEKNFTTAPAICHDGKAHFPREGVFVSNGTHWFVTQRNFYEPQIITTDNTFVSGNCDVVIGIVNNTVYDPLQPELESFKEELDKYFKNHTSPDVDLGDISGINASVVNIQKEIDRLNEVAKNLNESLIDLQELGKYEQYIKGGGGSDIIKLLNEQVNKEMQSSNLYMSMSSWCYTHSLDGAGLFLFDHAAEEYEHAKKLIIFLNENNVPVQLTSISAPEHKFEGLTQIFQKAYEHEQHISESINNIVDHAIKSKDHATFNFLQWYVAEQHEEEVLFKDILDKIELIGNENHGLYLADQYVKGIAKSRKS

SEQ ID NO: 5203 - protein, 1379 aa, Artificial Sequence
  SARS-CoV-2/2019-nCoV/USA-CruiseA-18/2020__MT159716.1 spike protein (1-1211)(G889C_L1034C) Ferritin construct
MFVFLVLLPLVSSQCVNLTTRTQLPPAYTNSFTRGVYYPDKVFRSSVLHSTQDLFLPFFSNVTWFHAIHVSGTNGTKRFDNPVLPFNDGVYFASTEKSNIIRGWIFGTTLDSKTQSLLIVNNATNVVIKVCEFQFCNDPFLGVYYHKNNKSWMESELRVYSSANNCTFEYVSQPFLMDLEGKQGNFKNLREFVFKNIDGYFKIYSKHTPINLVRDLPQGFSALEPLVDLPIGINITRFQTLLALHRSYLTPGDSSSGWTAGAAAYYVGYLQPRTFLLKYNENGTITDAVDCALDPLSETKCTLKSFTVEKGIYQTSNFRVQPTESIVRFPNITNLCPFGEVFNATRFASVYAWNRKRISNCVADYSVLYNSASFSTFKCYGVSPTKLNDLCFTNVYADSFVIRGDEVRQIAPGQTGKIADYNYKLPDDFTGCVIAWNSNNLDSKVGGNYNYLYRLFRKSNLKPFERDISTEIYQAGSTPCNGVEGFNCYFPLQSYGFQPTNGVGYQPYRVVVLSFELLHAPATVCGPKKSTNLVKNKCVNFNFNGLTGTGVLTESNKKFLPFQQFGRDIADTTDAVRDPQTLEILDITPCSFGGVSVITPGTNTSNQVAVLYQDVNCTEVPVAIHADQLTPTWRVYSTGSNVFQTRAGCLIGAEHVNNSYECDIPIGAGICASYQTQTNSPRRARSVASQSIIAYTMSLGAENSVAYSNNSIAIPTNFTISVTTEILPVSMTKTSVDCTMYICGDSTECSNLLLQYGSFCTQLNRALTGIAVEQDKNTQEVFAQVKQIYKTPPIKDFGGFNFSQILPDPSKPSKRSFIEDLLFNKVTLADAGFIKQYGDCLGDIAARDLICAQKFNGLTVLPPLLTDEMIAQYTSALLAGTITSGWTFCAGAALQIPFAMQMAYRFNGIGVTQNVLYENQKLIANQFNSAIGKIQDSLSSTASALGKLQDVVNQNAQALNTLVKQLSSNFGAISSVLNDILSRLDKVEAEVQIDRLITGRLQSLQTYVTQQLIRAAEIRASANLAATKMSECVCGQSKRVDFCGKGYHLMSFPQSAPHGVVFLHVTYVPAQEKNFTTAPAICHDGKAHFPREGVFVSNGTHWFVTQRNFYEPQIITTDNTFVSGNCDVVIGIVNNTVYDPLQPELDSFKEELDKYFKNHTSPDVDLGDISGINASVVNIQKEIDRLNEVAKNLNESLIDLQELGKYEQYIKGGGGSDIIKLLNEQVNKEMQSSNLYMSMSSWCYTHSLDGAGLFLFDHAAEEYEHAKKLIIFLNENNVPVQLTSISAPEHKFEGLTQIFQKAYEHEQHISESINNIVDHAIKSKDHATFNFLQWYVAEQHEEEVLFKDILDKIELIGNENHGLYLADQYVKGIAKSRKS

SEQ ID NO: 5204 - protein, 1379 aa, Artificial Sequence
  SARS-CoV-2/SARS-CoV-2/Yunnan-01/human/2020/CHN__MT049951.1 spike protein (1-1211)(G889C_L1034C) Ferritin construct
MFVFLVLLPLVSSQCVNLTTRTQLPPANTNSFTRGVYYPDKVFRSSVLHSTQDLFLPFFSNVTWFHAIHVSGTNGTKRFDNPVLPFNDGVYFASTEKSNIIRGWIFGTTLDSKTQSLLIVNNATNVVIKVCEFQFCNDPFLGVYYHKNNKSWMESEFRVYSSANNCTFEYVSQPFLMDLEGKQGNFKNLREFVFKNIDGYFKIYSKHTPINLVRDLPQGFSALEPLVDLPIGINITRFQTLLALHRSYLTPGDSSSGWTAGAAAYYVGYLQPRTFLLKYNENGTITDAVDCALDPLSETKCTLKSFTVEKGIYQTSNFRVQPTESIVRFPNITNLCPFGEVFNATRFASVYAWNRKRISNCVADYSVLYNSASFSTFKCYGVSPTKLNDLCFTNVYADSFVIRGDEVRQIAPGQTGKIADYNYKLPDDFTGCVIAWNSNNLDSKVGGNYNYLYRLFRKSNLKPFERDISTEIYQAGSTPCNGVEGFNCYFPLQSYGFQPTNGVGYQPYRVVVLSFELLHAPATVCGPKKSTNLVKNKCVNFNFNGLTGTGVLTESNKKFLPFQQFGRDIADTTDAVRDPQTLEILDITPCSFGGVSVITPGTNTSNQVAVLYQDVNCTEVPVAIHADQLTPTWRVYSTGSNVFQTRAGCLIGAEHVNNSYECDIPIGAGICASYQTQTNSPRRARSVASQSIIAYTMSLGAENSVAYSNNSIAIPTNFTISVTTEILPVSMTKTSVDCTMYICGDSTECSNLLLQYGSFCTQLNRALTGIAVEQDKNTQEVFAQVKQIYKTPPIKDFGGFNFSQILPDPSKPSKRSFIEDLLFNKVTLADAGFIKQYGDCLGDIAARDLICAQKFNGLTVLPPLLTDEMIAQYTSALLAGTITSGWTFCAGAALQIPFAMQMAYRFNGIGVTQNVLYENQKLIANQFNSAIGKIQDSLSSTASALGKLQDVVNQNAQALNTLVKQLSSNFGAISSVLNDILSRLDKVEAEVQIDRLITGRLQSLQTYVTQQLIRAAEIRASANLAATKMSECVCGQSKRVDFCGKGYHLMSFPQSAPHGVVFLHVTYVPAQEKNFTTAPAICHDGKAHFPREGVFVSNGTHWFVTQRNFYEPQIITTDNTFVSGNCDVVIGIVNNTVYDPLQPELDSFKEELDKYFKNHTSPDVDLGDISGINASVVNIQKEIDRLNEVAKNLNESLIDLQELGKYEQYIKGGGGSDIIKLLNEQVNKEMQSSNLYMSMSSWCYTHSLDGAGLFLFDHAAEEYEHAKKLIIFLNENNVPVQLTSISAPEHKFEGLTQIFQKAYEHEQHISESINNIVDHAIKSKDHATFNFLQWYVAEQHEEEVLFKDILDKIELIGNENHGLYLADQYVKGIAKSRKS

SEQ ID NO: 5205 - protein, 1379 aa, Artificial Sequence
  SARS-CoV-2/USA/WA-UW292/2020__EPI_ISL_418077 spike protein (1-1211)(G889C_L1034C) Ferritin construct
MFVFLVLLPLVSSQCVNLTTRTQLPPAYTNSFTRGVYYPDKVFRSSVLHSTQDLFLPFFSNVTWFHAIHVSGTNGTKRFDNPVLPFNDGVYFASTEKSNIIRGWIFGTTLDSKTQSLLIVNNATNVVIKVCEFQFCNDPFLGVYYHKNNKSWMESEFRVYSSANNCTFEYVSQPFLMDLEGKQGNFKNLREFVFKNIDGYFKIYSKHTPINLVRDLPQGFSALEPLVDLPIGINITRFQTLLALHRSYLTPGDSSSGWTAGAAAYYVGYLQPRTFLLKYNENGTITDAVDCALDPLSETKCTLKSFTVEKGIYQTSNFRVQPTESIVRFPNITNLCPFGEVFNATRFASVYAWNRKRISNCVADYSVLYNSASFSTFKCYGVSPTKLNDLCFTNVYADSFVIRGDEVRQIAPGQTGKIADYNYKLPDDFTGCVIAWNSNNLDSKVGGNYNYLYRLFRKSNLKPFERDISTEIYQASSTPCNGVEGFNCYFPLQSYGFQPTNGVGYQPYRVVVLSFELLHAPATVCGPKKSTNLVKNKCVNFNFNGLTGTGVLTESNKKFLPFQQFGRDIADTTDAVRDPQTLEILDITPCSFGGVSVITPGTNTSNQVAVLYQDVNCTEVPVAIHADQLTPTWRVYSTGSNVFQTRAGCLIGAEHVNNSYECDIPIGAGICASYQTQTNSPRRARSVASQSIIAYTMSLGAENSVAYSNNSIAIPTNFTISVTTEILPVSMTKTSVDCTMYICGDSTECSNLLLQYGSFCTQLNRALTGIAVEQDKNTQEVFAQVKQIYKTPPIKDFGGFNFSQILPDPSKPSKRSFIEDLLFNKVTLADAGFIKQYGDCLGDIAARDLICAQKFNGLTVLPPLLTDEMIAQYTSALLAGTITSGWTFCAGAALQIPFAMQMAYRFNGIGVTQNVLYENQKLIANQFNSAIGKIQDSLSSTASALGKLQDVVNQNAQALNTLVKQLSSNFGAISSVLNDILSRLDKVEAEVQIDRLITGRLQSLQTYVTQQLIRAAEIRASANLAATKMSECVCGQSKRVDFCGKGYHLMSFPQSAPHGVVFLHVTYVPAQEKNFTTAPAICHDGKAHFPREGVFVSNGTHWFVTQRNFYEPQIITTDNTFVSGNCDVVIGIVNNTVYDPLQPELDSFKEELDKYFKNHTSPDVDLGDISGINASVVNIQKEIDRLNEVAKNLNESLIDLQELGKYEQYIKGGGGSDIIKLLNEQVNKEMQSSNLYMSMSSWCYTHSLDGAGLFLFDHAAEEYEHAKKLIIFLNENNVPVQLTSISAPEHKFEGLTQIFQKAYEHEQHISESINNIVDHAIKSKDHATFNFLQWYVAEQHEEEVLFKDILDKIELIGNENHGLYLADQYVKGIAKSRKS

SEQ ID NO: 5206 - protein, 1379 aa, Artificial Sequence
  SARS-CoV-2/Iceland/192/2020__EPI_ISL_417819 spike protein (1-1211)(G889C_L1034C) Ferritin construct
MFVFFVLLPLVSSQCVNLTTRTQLPPAYTNSFTRGVYYPDKVFRSSVLHSTQDLFLPFFSNVTWFHAIHVSGTNGTKRFDNPVLPFNDGVYFASTEKSNIIRGWIFGTTLDSKTQSLLIVNNATNVVIKVCEFQFCNDPFLGVYYHKNNKSWMESEFRVYSSANNCTFEYVSQPFLMDLEGKQGNFKNLREFVFKNIDGYFKIYSKHTPINLVRDLPQGFSALEPLVDLPIGINITRFQTLLALHRSYLTPGDSSSGWTAGAAAYYVGYLQPRTFLLKYNENGTITDAVDCALDPLSETKCTLKSFTVEKGIYQTSNFRVQPTESIVRFPNITNLCPFGEVFNATRFASVYAWNRKRISNCVADYSVLYNSASFSTFKCYGVSPTKLNDLCFTNVYADSFVIRGDEVRQIAPGQTGKIADYNYKLPDDFTGCVIAWNSNNLDSKVGGNYNYLYRLFRKSNLKPFERDISTEIYQAGSTPCNGVEGFNCYFPLQSYGFQPTNGVGYQPYRVVVLSFELLHAPATVCGPKKSTNLVKNKCVNFNFNGLTGTGVLTESNKKFLPFQQFGRDIADTTDAVRDPQTLEILDITPCSFGGVSVITPGTNTSNQVAVLYQGVNCTEVPVAIHADQLTPTWRVYSTGSNVFQTRAGCLIGAEHVNNSYECDIPIGAGICASYQTQTNSPRRARSVASQSIIAYTMSLGAENSVAYSNNSIAIPTNFTISVTTEILPVSMTKTSVDCTMYICGDSTECSNLLLQYGSFCTQLNRALTGIAVEQDKNTQEVFAQVKQIYKTPPIKDFGGFNFSQILPDPSKPSKRSFIEDLLFNKVTLADAGFIKQYGDCLGDIAARDLICAQKFNGLTVLPPLLTDEMIAQYTSALLAGTITSGWTFCAGAALQIPFAMQMAYRFNGIGVTQNVLYENQKLIANQFNSAIGKIQDSLSSTASALGKLQDVVNQNAQALNTLVKQLSSNFGAISSVLNDILSRLDKVEAEVQIDRLITGRLQSLQTYVTQQLIRAAEIRASANLAATKMSECVCGQSKRVDFCGKGYHLMSFPQSAPHGVVFLHVTYVPAQEKNFTTAPAICHDGKAHFPREGVFVSNGTHWFVTQRNFYEPQIITTDNTFVSGNCDVVIGIVNNTVYDPLQPELDSFKEELDKYFKNHTSPDVDLGDISGINASVVNIQKEIDRLNEVAKNLNESLIDLQELGKYEQYIKGGGGSDIIKLLNEQVNKEMQSSNLYMSMSSWCYTHSLDGAGLFLFDHAAEEYEHAKKLIIFLNENNVPVQLTSISAPEHKFEGLTQIFQKAYEHEQHISESINNIVDHAIKSKDHATFNFLQWYVAEQHEEEVLFKDILDKIELIGNENHGLYLADQYVKGIAKSRKS

SEQ ID NO: 5207 - protein, 1379 aa, Artificial Sequence
  SARS-CoV-2/Belgium/ULG-6939/2020__EPI_ISL_417020 spike protein (1-1211)(G889C_L1034C) Ferritin construct
MFVFLVLLPLVSSQCVNLTTRTQLPPAYTNSFTRGVYYPDKVFRSSVLHSTQDLFLPFFSNVTWFHAIHVSGTNGTKRFDNPVLPFNDGVYFASTEKSNIIRGWIFGTTLDSKTQSLLIVNNATNVVIKVCEFQFCNDPFLGVYYHKNNKSWMESEFRVYSSANNCTFEYVSQPFLMDLEGKQGNFKNLREFVFKNIDGYFKIYSKHTPINLVRDLPQGFSALEPLVDLPIGINITRFQTLLALHRSYLTPGDSSSGWTAGAAAYYVGYLQPRTFLLKYNENGTITDAVDCALDPLSETKCTLKSFTVEKGIYQTSNFRVQPTESIVRFPNITNLCPFGEVFNATRFASVYAWNRKRISNCVADYSVLYNSASFSTFKCYGVSPTKLNDLCFTNVYADSFVIRGDEVRQIAPGQTGKIADYNYKLPDDFTGCVIAWNSNNLDSKVGGNYNYLYRLFRKSNLKPFERDISTEIYQAGSTPCNGVEGFNCYFPLQSYGFQPTNGVGYQPYRVVVLSFELLHAPATVCGPKKSTNLVKNKCVNFNFNGLTGTGVLTESNKKFLPFQQFGRDIADTTDAVRDPQTLEILDITPCSFGGVSVITPGTNTSNQVAVLYQGVNCTEVPVAIHADQLTPTWRVYSTGSNVFQTRAGCLIGAEHVNNSYECDIPIGAGICASYQTQTNSPRRARSVASQSIIAYTMSLGAENSVVYSNNSIAIPTNFTISVTTEILPVSMTKTSVDCTMYICGDSTECSNLLLQYGSFCTQLNRALTGIAVEQDKNTQEVFAQVKQIYKTPPIKDFGGFNFSQILPDPSKPSKRSFIEDLLFNKVTLADAGFIKQYGDCLGDIAARDLICAQKFNGLTVLPPLLTDEMIAQYTSALLAGTITSGWTFCAGAALQIPFAMQMAYRFNGIGVTQNVLYENQKLIANQFNSAIGKIQDSLSSTASALGKLQDVVNQNAQALNTLVKQLSSNFGAISSVLNDILSRLDKVEAEVQIDRLITGRLQSLQTYVTQQLIRAAEIRASANLAATKMSECVCGQSKRVDFCGKGYHLMSFPQSAPHGVVFLHVTYVPAQEKNFTTAPAICHDGKAHFPREGVFVSNGTHWFVTQRNFYEPQIITTDNTFVSGNCDVVIGIVNNTVYDPLQPELDSFKEELDKYFKNHTSPDVDLGDISGINASVVNIQKEIDRLNEVAKNLNESLIDLQELGKYEQYIKGGGGSDIIKLLNEQVNKEMQSSNLYMSMSSWCYTHSLDGAGLFLFDHAAEEYEHAKKLIIFLNENNVPVQLTSISAPEHKFEGLTQIFQKAYEHEQHISESINNIVDHAIKSKDHATFNFLQWYVAEQHEEEVLFKDILDKIELIGNENHGLYLADQYVKGIAKSRKS

SEQ ID NO: 5208 - protein, 1379 aa, Artificial Sequence
  SARS-CoV-2/France/HF2496/2020__EPI_ISL_418231 spike protein (1-1211)(G889C_L1034C) Ferritin construct
MFVFLVLLPLVSSQCVNLTTRTQLPPAYTNSFTRGVYYPDKVFRSSVLHSTQDLFLPFFSNVTWFHAIHVSGTNGTKRFDNPVLPFNDGVYFASTEKSNIIRGWIFGTTLDSKTQSLLIVNNATNVVIKVCEFQFCNDPFLGVYYHKNNKSWMESEFRVYSSANNCTFEYVSQPFLMDLEGKQGNFKNLREFVFKNIDGYFKIYSKHTPINLVRDLPQGFSALEPLVDLPIGINITRFQTLLALHRSYLTPGDSSSGWTAGAAAYYVGYLQPRTFLLKYNENGTITDAVDCALDPLSETKCTLKSFTVEKGIYQTSNFRVQPTESIVRFPNITNLCPFGEVFNATRFASVYAWNRKRISNCVADYSVLYNSASFSTFKCYGVSPTKLNDLCFTNVYADSFVIRGDEVRQIAPGQTGKIADYNYKLPDDFTGCVIAWNSNNLDSKVGGNYNYLYRLFRKSNLKPFERDISTEIYQAGSTPCNGVEGFNCYFPLQSYGFQPTNGVGYQPYRVVVLSFELLHAPATVCGPKKSTNLVKNKCVNFNFNGLTGTGVLTESNKKFLPFQQFGRDIADTTDAVRDPQTLEILDITPCSFGGVSVITPGTNTSNQVAVLYQGVNCTEVPVAIHADQLTPTWRVYSTGSNVFQTRAGCLIGAEHVNNSYECDIPIGAGICASYQTQTNSPRRARSVASQSIIAYTMSLGAENSVAYSNNSIAIPTNFTISVTTEILPVSMTKTSVDCTMYICGDSTECSNLLLQYGSFCTQLNRALTGIAVEQDKNTQEVFAQVKQIYKTPPIKDFGGFNFSQILPDPSKPSKRSFIEDLLFNKVTLADAGFIKQYGDCLGDIVARDLICAQKFNGLTVLPPLLTDEMIAQYTSALLAGTITSGWTFCAGAALQIPFAMQMAYRFNGIGVTQNVLYENQKLIANQFNSAIGKIQDSLSSTASALGKLQDVVNQNAQALNTLVKQLSSNFGAISSVLNDILSRLDKVEAEVQIDRLITGRLQSLQTYVTQQLIRAAEIRASANLAATKMSECVCGQSKRVDFCGKGYHLMSFPQSAPHGVVFLHVTYVPAQEKNFTTAPAICHDGKAHFPREGVFVSNGTHWFVTQRNFYEPQIITTDNTFVSGNCDVVIGIVNNTVYDPLQPELDSFKEELDKYFKNHTSPDVDLGDISGINASVVNIQKEIDRLNEVAKNLNESLIDLQELGKYEQYIKGGGGSDIIKLLNEQVNKEMQSSNLYMSMSSWCYTHSLDGAGLFLFDHAAEEYEHAKKLIIFLNENNVPVQLTSISAPEHKFEGLTQIFQKAYEHEQHISESINNIVDHAIKSKDHATFNFLQWYVAEQHEEEVLFKDILDKIELIGNENHGLYLADQYVKGIAKSRKS

SEQ ID NO: 5209 - protein, 1379 aa, Artificial Sequence
  SARS-CoV-2/USA/WA-UW291/2020__EPI_ISL_418076 spike protein (1-1211)(G889C_L1034C) Ferritin construct
MFVFLVLLPLVSSQCVNLTTRTQLPPAYTNSFTRGVYYPDKVFRSSVLHSTQDLFLPFFSNVTWFHAIHVSGTNGTKRFDNPVLPFNDGVYFASTEKSNIIRGWIFGTTLDSKTQSLLIVNNATNVVIKVCEFQFCNDPFLGVYYHKNNKSWMESEFRVYSSANNCTFEYVSQPFLMDLEGKQGNFKNLREFVFKNIDGYFKIYSKHTPINLVRDLPQGFSALEPLVDLPIGINITRFQTLLALHRSYLTPGDSSSGWTAGAAAYYVGYLQPRTFLLKYNENGTITDAVDCALDPLSETKCTLKSFTVEKGIYQTSNFRVQPTESIVRFPNITNLCPFGEVFNATRFASVYAWNRKRISNCVADYSVLYNSASFSTFKCYGVSPTKLNDLCFTNVYADSFVIRGDEVRQIAPGQTGKIADYNYKLPDDFTGCVIAWNSNNLDSKVGGNYNYLYRLFRKSNLKPFERDISTEIYQAGSTPCNGVEGFNCYFPLQSYGFQPTNGVGYQPYRVVVLSFELLHAPATVCGPKKSTNLVKNKCVNFNFNGLTGTGVLTESNKKFLPFQQFGRDIADTTDAVRDPQTLEILDITPCSFGGVSVITPGTNTSNQVAVLYQGVNCTEVPVAIHADQLTPTWRVYSTGSNVFQTRAGCLIGAEHVNNSYECDIPIGAGICASYQTQTNSPRRARSVASQSIIAYTMSLGAENSVAYSNNSIAIPTNFTISVTTEILPVSMTKTSVDCTMYICGDSTECSNLLLQYGSFCTQLNRALTGIAVEQDKNTQEVFAQVKQIYKTPPIKDFGGFNFSQILPDPSKPSKRSFIEDLLFNKVTLADAGFIKQYGDCLGDIAARDLICAQKFNGLTVLPPLLTDEMIAQYTSALLAGTITSGWTFCAGAALQIPFAMQMAYRFNGIGVTQNVLYENQKLIANQFNSAIGKIQYSLSSTASALGKLQDVVNQNAQALNTLVKQLSSNFGAISSVLNDILSRLDKVEAEVQIDRLITGRLQSLQTYVTQQLIRAAEIRASANLAATKMSECVCGQSKRVDFCGKGYHLMSFPQSAPHGVVFLHVTYVPAQEKNFTTAPAICHDGKAHFPREGVFVSNGTHWFVTQRNFYEPQIITTDNTFVSGNCDVVIGIVNNTVYDPLQPELDSFKEELDKYFKNHTSPDVDLGDISGINASVVNIQKEIDRLNEVAKNLNESLIDLQELGKYEQYIKGGGGSDIIKLLNEQVNKEMQSSNLYMSMSSWCYTHSLDGAGLFLFDHAAEEYEHAKKLIIFLNENNVPVQLTSISAPEHKFEGLTQIFQKAYEHEQHISESINNIVDHAIKSKDHATFNFLQWYVAEQHEEEVLFKDILDKIELIGNENHGLYLADQYVKGIAKSRKS

SEQ ID NO: 5210 - protein, 1379 aa, Artificial Sequence; identical to SEQ ID NO: 5173
  SARS-CoV-2/Portugal/PT0034/2020__EPI_ISL_418019 spike protein (1-1211)(G889C_L1034C) Ferritin construct

SEQ ID NO: 5211 - protein, 1379 aa, Artificial Sequence
  SARS-CoV-2/Iceland/202/2020__EPI_ISL_417750 spike protein (1-1211)(G889C_L1034C) Ferritin construct
MFVFLVLLPLVSSQCVNLTTRTQLPPAYTNSFTRGVYYPDKVFRSSVLHSTQDLFLPFFSNVTWFHAIHVSGTNGTKRFDNPVLPFNDGVYFASTEKSNIIRGWIFGTTLDSKTQSLLIVNNATNVVIKVCEFQFCNDPFLGVYYHKNNKSWMESEFRVYSSANNCTFEYVSQPFLMDLEGKQGNFKNLREFVFKNIDGYFKIYSKHTPINLVRDLPQGFSALEPLVDLPIGINITRFQTLLALHRSYLTPGDSSSGWTAGAAAYYVGYLQPRTFLLKYNENGTITDAVDCALDPLSETKCTLKSFTVEKGIYQTSNFRVQPTESIVRFPNITNLCPFGEVFNATRFASVYAWNRKRISNCVADYSVLYNSASFSTFKCYGVSPTKLNDLCFTNVYADSFVIRGDEVRQIAPGQTGKIADYNYKLPDDFTGCVIAWNSNNLDSKVGGNYNYLYRLFRKSNLKPFERDISTEIYQAGSTPCNGVEGFNCYFPLQSYGFQPTNGVGYQPYRVVVLSFELLHAPATVCGPKKSTNLVKNKCVNFNFNGLTGTGVLTESNKKFLPFQQFGRDIADTTDAVRDPQTLEILDITPCSFGGVSVITPGTNTSNQVAVLYQDVNCTEVPVAIHADQLTPTWRVYSTGSNVFQTRAGCLIGAEHVNNSYECDIPIGAGICASYQTQTNSPRRARSVASQSIIAYTMSLGAENSVAYSNNSIAIPTNFTISVTTEILPVSMTKTSVDCTMYICGDSTECSNLLLQYGSFCTQLNRALTGIAVEQDKNTQEVFAQVKQIYKTPPIKDFGGFNFSQILPDPSKPSKRSFIEDLLFNKVTLADAGFIKQYGDCLGDIAARDLICAQKFNGLTVLPPLLTDEMIAQYTSALLAGTITSGWTFCAGAALQIPFAMQMAYRFNGIGVTQNVLYENQKLIANQFNSAIGKIQDSLSSTASALGKLQDVVNQNAQALNTLVKQLSSNFGAISSVLNDILSRLDKVEAEVQIDRLITGRLQSLQTYVTQQLIRAAEIRASANLAATKMSECVCGQSKRVDFCGKGYHLMSFPQSAPHGVVFLHVTYVPAQEKNFTTAPAICHDGKAHFPREGVFVSNGTHWFVTQRNFYEPQIITTDNTFVSGNCDVVIGIVNNTVYDPLQPELDSFKEELDKYFKNHTSPDVDLGDIPGINASVVNIQKEIDRLNEVAKNLNESLIDLQELGKYEQYIKGGGGSDIIKLLNEQVNKEMQSSNLYMSMSSWCYTHSLDGAGLFLFDHAAEEYEHAKKLIIFLNENNVPVQLTSISAPEHKFEGLTQIFQKAYEHEQHISESINNIVDHAIKSKDHATFNFLQWYVAEQHEEEVLFKDILDKIELIGNENHGLYLADQYVKGIAKSRKS

SEQ ID NO: 5212 - protein, 1379 aa, Artificial Sequence
  SARS-CoV-2/USA/WA-UW261/2020__EPI_ISL_418046 spike protein (1-1211)(G889C_L1034C) Ferritin construct
MFVFLVLLPLVSSQCVNLTTRTQLPPAYTNSFTRGVYYPDKVFRSSVLHSTQDLFLPFFSNVTWFHAIHVSGTNGTKRFDNPVLPFNDGVYFASTEKSNIIRGWIFGTTLDSKTQSLLIVNNATNVVIKVCEFQFCNDPFLGVYYHKNNKSWMESEFRVYSSANNCTFEYVSQPFLMDLEGKQGNFKNLREFVFKNIDGYFKIYSKHTPINLVRDLPQGFSALEPLVDLPIGINITRFQTLLALHRSYLTPGDSSSGWTAGAAAYYVGYLQPRTFLLKYNENGTITDAVDCALDPLSETKCTLKSFTVEKGIYQTSNFRVQPTESIVRFPNITNLCPFGEVFNATRFTSVYAWNRKRISNCVADYSVLYNSASFSTFKCYGVSPTKLNDLCFTNVYADSFVIRGDEVRQIAPGQTGKIADYNYKLPDDFTGCVIAWNSNNLDSKVGGNYNYLYRLFRKSNLKPFERDISTEIYQAGSTPCNGVEGFNCYFPLQSYGFQPTNGVGYQPYRVVVLSFELLHAPATVCGPKKSTNLVKNKCVNFNFNGLTGTGVLTESNKKFLPFQQFGRDIADTTDAVRDPQTLEILDITPCSFGGVSVITPGTNTSNQVAVLYQDVNCTEVPVAIHADQLTPTWRVYSTGSNVFQTRAGCLIGAEHVNNSYECDIPIGAGICASYQTQTNSPRRARSVASQSIIAYTMSLGAENSVAYSNNSIAIPTNFTISVTTEILPVSMTKTSVDCTMYICGDSTECSNLLLQYGSFCTQLNRALTGIAVEQDKNTQEVFAQVKQIYKTPPIKDFGGFNFSQILPDPSKPSKRSFIEDLLFNKVTLADAGFIKQYGDCLGDIAARDLICAQKFNGLTVLPPLLTDEMIAQYTSALLAGTITSGWTFCAGAALQIPFAMQMAYRFNGIGVTQNVLYENQKLIANQFNSAIGKIQDSLSSTASALGKLQDVVNQNAQALNTLVKQLSSNFGAISSVLNDILSRLDKVEAEVQIDRLITGRLQSLQTYVTQQLIRAAEIRASANLAATKMSECVCGQSKRVDFCGKGYHLMSFPQSAPHGVVFLHVTYVPAQEKNFTTAPAICHDGKAHFPREGVFVSNGTHWFVTQRNFYEPQIITTDNTFVSGNCDVVIGIVNNTVYDPLQPELDSFKEELDKYFKNHTSPDVDLGDISGINASVVNIQKEIDRLNEVAKNLNESLIDLQELGKYEQYIKGGGGSDIIKLLNEQVNKEMQSSNLYMSMSSWCYTHSLDGAGLFLFDHAAEEYEHAKKLIIFLNENNVPVQLTSISAPEHKFEGLTQIFQKAYEHEQHISESINNIVDHAIKSKDHATFNFLQWYVAEQHEEEVLFKDILDKIELIGNENHGLYLADQYVKGIAKSRKS

SEQ ID NO: 5213 - protein, 1379 aa, Artificial Sequence
  SARS-CoV-2/Portugal/PT0035/2020__EPI_ISL_418020 spike protein (1-1211)(G889C_L1034C) Ferritin construct
MFVFLVLLPLVSSQCVNLTTRTQLPPAYTNSFTRGVYYPDKVFRSSVLHSTQDLFLPFFSNVTWFHAIHVSGTNGTKRFDNPVLPFNDGVYFASTEKSNIIRGWIFGTTLDSKTQSLLIVNNATNVVIKVCEFQFCNDPFLGVYYHKNNKSWMESEFRVYSSANNCTFEYVSQPFLMDLEGKQGNFKNLREFVFKNIDGYFKIYSKHTPINLVRDLPQGFSALEPLVDLPIGINITRFQTLLALHRSYLTPGDSSSGWTAGAAAYYVGYLQPRTFLLKYNENGTITDAVDCALDPLSETKCTLKSFTVEKGIYQTSNFRVQPTESIVRFPNITNLCPFGEVFNATRFASVYAWNRKRISNCVADYSVLYNSASFSTFKCYGVSPTKLNDLCFTNVYADSFVIRGDEVRQIAPGQTGKIADYNYKLPDDFTGCVIAWNSNNLDSKVGGNYNYLYRLFRKSNLKPFERDISTEIYQAGSTPCNGVEGFNCYFPLQSYGFQPTNGVGYQPYRVVVLSFELLHAPATVCGPKKSTNLVKNKCVNFNFNGLTGTGVLTESNKKFLPFQQFGRDIADTTDAVRDPQTLEILDITPCSFGGVSVITPGTNTSNQVAVLYQDVNCTEVPVAIHADQLTPTWRVYSTGSNVFQTRAGCLIGAEHVNNSYECDIPIGAGICASYQTQTNSPRRARSVASQSIIAYTMSLGAENSVAYSNNSIAIPTNFTISVTTEILPVSMTKTSVDCTMYICGDSTECSNLLLQYGSFCTQLNRALTGIAVEQDKNTQEVFAQVKQIYKTPPIKDFGGFNFSQILPDPSKPSKRSFIEDLLFNKVTLADAGFIKQYGDCLGDISARDLICAQKFNGLTVLPPLLTDEMIAQYTSALLAGTITSGWTFCAGAALQIPFAMQMAYRFNGIGVTQNVLYENQKLIANQFNSAIGKIQDSLSSTASALGKLQDVVNQNAQALNTLVKQLSSNFGAISSVLNDILSRLDKVEAEVQIDRLITGRLQSLQTYVTQQLIRAAEIRASANLAATKMSECVCGQSKRVDFCGKGYHLMSFPQSAPHGVVFLHVTYVPAQEKNFTTAPAICHDGKAHFPREGVFVSNGTHWFVTQRNFYEPQIITTDNTFVSGNCDVVIGIVNNTVYDPLQPELDSFKEELDKYFKNHTSPDVDLGDISGINASVVNIQKEIDRLNEVAKNLNESLIDLQELGKYEQYIKGGGGSDIIKLLNEQVNKEMQSSNLYMSMSSWCYTHSLDGAGLFLFDHAAEEYEHAKKLIIFLNENNVPVQLTSISAPEHKFEGLTQIFQKAYEHEQHISESINNIVDHAIKSKDHATFNFLQWYVAEQHEEEVLFKDILDKIELIGNENHGLYLADQYVKGIAKSRKS

SEQ ID NO: 5214 - protein, 1379 aa, Artificial Sequence
  SARS-CoV-2/USA/NY-NYUMC7/2020__EPI_ISL_418192 spike protein (1-1211)(G889C_L1034C) Ferritin construct
MFVFLVLLPLVSSQCVNLTTRTQLPPAYTNSFTRGVYYPDKVFRSSVLHSTQDLFLPFFSNVTWFHAIHVSGTNGTKRFDNPVLPFNDGVYFASTEKSNIIRGWIFGTTLDSKTQSLLIVNNATNVVIKVCEFQFCNDPFLGVYHHKNNKSWMESEFRVYSSANNCTFEYVSQPFLMDLEGKQGNFKNLREFVFKNIDGYFKIYSKHTPINLVRDLPQGFSALEPLVDLPIGINITRFQTLLALHRSYLTPGDSSSGWTAGAAAYYVGYLQPRTFLLKYNENGTITDAVDCALDPLSETKCTLKSFTVEKGIYQTSNFRVQPTESIVRFPNITNLCPFGEVFNATRFASVYAWNRKRISNCVADYSVLYNSASFSTFKCYGVSPTKLNDLCFTNVYADSFVIRGDEVRQIAPGQTGKIADYNYKLPDDFTGCVIAWNSNNLDSKVGGNYNYLYRLFRKSNLKPFERDISTEIYQAGSTPCNGVEGFNCYFPLQSYGFQPTNGVGYQPYRVVVLSFELLHAPATVCGPKKSTNLVKNKCVNFNFNGLTGTGVLTESNKKFLPFQQFGRDIADTTDAVRDPQTLEILDITPCSFGGVSVITPGTNTSNQVAVLYQGVNCTEVPVAIHADQLTPTWRVYSTGSNVFQTRAGCLIGAEHVNNSYECDIPIGAGICASYQTQTNSPRRARSVASQSIIAYTMSLGAENSVAYSNNSIAIPTNFTISVTTEILPVSMTKTSVDCTMYICGDSTECSNLLLQYGSFCTQLNRALTGIAVEQDKNTQEVFAQVKQIYKTPPIKDFGGFNFSQILPDPSKPSKRSFIEDLLFNKVTLADAGFIKQYGDCLGDIAARDLICAQKFNGLTVLPPLLTDEMIAQYTSALLAGTITSGWTFCAGAALQIPFAMQMAYRFNGIGVTQNVLYENQKLIANQFNSAIGKIQDSLSSTASALGKLQDVVNQNAQALNTLVKQLSSNFGAISSVLNDILSRLDKVEAEVQIDRLITGRLQSLQTYVTQQLIRAAEIRASANLAATKMSECVCGQSKRVDFCGKGYHLMSFPQSAPHGVVFLHVTYVPAQEKNFTTAPAICHDGKAHFPREGVFVSNGTHWFVTQRNFYEPQIITTDNTFVSGNCDVVIGIVNNTVYDPLQPELDSFKEELDKYFKNHTSPDVDLGDISGINASVVNIQKEIDRLNEVAKNLNESLIDLQELGKYEQYIKGGGGSDIIKLLNEQVNKEMQSSNLYMSMSSWCYTHSLDGAGLFLFDHAAEEYEHAKKLIIFLNENNVPVQLTSISAPEHKFEGLTQIFQKAYEHEQHISESINNIVDHAIKSKDHATFNFLQWYVAEQHEEEVLFKDILDKIELIGNENHGLYLADQYVKGIAKSRKS

SEQ ID NO: 5215 - protein, 1379 aa, Artificial Sequence
  SARS-CoV-2/Iceland/189/2020__EPI_ISL_417709 spike protein (1-1211)(G889C_L1034C) Ferritin construct
MFVFLVLLPLVSSQCVNLTTRTQLPPAYTNSFTRGVYYPDKVFRSSVLHSTQDLFLPFFSNVTWFHAIHVSGTNGTKRFDNPVLPFNDGVYFASTEKSNIIRGWIFGTTLDSKTQSLLIVNNATNVVIKVCEFQFCNDPFLGVYYHKNNKSWMESEFRVYSSANNCTFEYVSQPFLMDLEGKQGNFKNLREFVFKNIDGYFKIYSKHTPINLVRDLPQGFSALEPLVDLPIGINITRFQTLLALHRSYLTPGDSSSGWTAGAAAYYVGYLQPRTFLLKYNENGTITDAVDCALDPLSETKCTLKSFTVEKGIYQTSNFRVQPTESIVRFPNITNLCPFGEVFNATRFASVYAWNRKRISNCVADYSVLYNSASFSTFKCYGVSPTKLNDLCFTNVYADSFVIRGDEVRQIAPGQTGKIADYNYKLPDDFTGCVIAWNSNNLDSKVGGNYNYLYRLFRKSNLKPFERDISTEIYQAGSTPCNGVEGFNCYFPLQSYGFQPTNGVGYQPYRVVVLSFELLHAPATVCGPKKSTNLVKNKCVNFNFNGLTGTGVLTESNKKFLPFQQFGRDIADTTDAVRDPQTLEILDITPCSFGGVSVITPGTNTSNQVAVLYQGVNCTEVPVAIHADQLTPTWRVYSTGSNVFQTRAGCLIGAEHVNNSYECDIPIGAGICASYQTQTNSPRRARSVASQSIIAYTMSLGAENSVAYSNNSIAIPTNFTISVTTEILPVSMTKTSVDCTMYICGDSTECSNLLLQYGSFCTQLNRALTGIAVEQDKNTQEVFAQVKQIYKTPPIKDFGGFNFSQILPDPSKPSKRSFIEDLLFNKVTLADAGFTKQYGDCLGDIAARDLICAQKFNGLTVLPPLLTDEMIAQYTSALLAGTITSGWTFCAGAALQIPFAMQMAYRFNGIGVTQNVLYENQKLIANQFNSAIGKIQDSLSSTASALGKLQDVVNQNAQALNTLVKQLSSNFGAISSVLNDILSRLDKVEAEVQIDRLITGRLQSLQTYVTQQLIRAAEIRASANLAATKMSECVCGQSKRVDFCGKGYHLMSFPQSAPHGVVFLHVTYVPAQEKNFTTAPAICHDGKAHFPREGVFVSNGTHWFVTQRNFYEPQIITTDNTFVSGNCDVVIGIVNNTVYDPLQPELDSFKEELDKYFKNHTSPDVDLGDISGINASVVNIQKEIDRLNEVAKNLNESLIDLQELGKYEQYIKGGGGSDIIKLLNEQVNKEMQSSNLYMSMSSWCYTHSLDGAGLFLFDHAAEEYEHAKKLIIFLNENNVPVQLTSISAPEHKFEGLTQIFQKAYEHEQHISESINNIVDHAIKSKDHATFNFLQWYVAEQHEEEVLFKDILDKIELIGNENHGLYLADQYVKGIAKSRKS

SEQ ID NO: 5216 - protein, 1379 aa, Artificial Sequence
  SARS-CoV-2/Australia/NSW56/2020__EPI_ISL_417408 spike protein (1-1211)(G889C_L1034C) Ferritin construct
MFVFLVLLPLVSSQCVNLTTRTQLPPAYTNSFTRGVYYPDKVFRSSVLHSTQDLFLPFFSNVTWFHAIHVSGTNGTKRFDNPVLPFNDGVYFASTEKSNIIRGWIFGTTLDSKTQSLLIVNNATNVVIKVCEFQFCNDPFLGVYYHKNNKSWMESEFRVYSSANNCTFEYVSQPFLMDLEGKQGNFKNLREFVFKNIDGYFKIYSKHTPINLVRDLPQGFSALEPLVDLPIGINITRFQTLLALHRSYLTPGDSSSGWTAGAAAYYVGYLQPRTFLLKYNENGTITDAVDCALDPLSETKCTLKSFTVEKGIYQTSNFRVQPTESIVRFPNITNLCPFGEVFNATRFASVYAWNRKRISNCVADYSVLYNSASFSTFKCYGVSPTKLNDLCFTNVYADSFVIRGDEVRQIAPGQTGKIADYNYKLPDDFTGCVIAWNSNNLDSKVGGNYNYLYRLFRKSNLKPFERDISTEIYQAGSTPCNGVEGFNCYFPLQSYGFQPTNGVGYQPYRVVVLSFELLHAPATVCGPKKSTNLVKNKCVNFNFNGLTGTGVLTESNKKFLPFQQFGRDIADTTDAVRDPQTLEILDITPCSFGGVSVITPGTNTSNQVAVLYQDVNCTEVPVAIHADQLTPTWRVYSTGSNVFQTRAGCLIGAEHVNNSYECDIPIGAGICASYQTQTNSPRRARSVASQSIIAYTMSLGAENSVAYSNNSIAIPTNFTISVTTEILPVSMTKTSVDCTMYICGDSTECSNLLLQYGSFCTQLNRALTGIAVEQDKNTQEVFAQVKQIYKTPPIKDFGGFNFSQILPDSSKPSKRSFIEDLLFNKVTLADAGFIKQYGDCLGDIAARDLICAQKFNGLTVLPPLLTDEMIAQYTSALLAGTITSGWTFCAGAALQIPFAMQMAYRFNGIGVTQNVLYENQKLIANQFNSAIGKIQDSLSSTASALGKLQDVVNQNAQALNTLVKQLSSNFGAISSVLNDILSRLDKVEAEVQIDRLITGRLQSLQTYVTQQLIRAAEIRASANLAATKMSECVCGQSKRVDFCGKGYHLMSFPQSAPHGVVFLHVTYVPAQEKNFTTAPAICHDGKAHFPREGVFVSNGTHWFVTQRNFYEPQIITTDNTFVSGNCDVVIGIVNNTVYDPLQPELDSFKEELDKYFKNHTSPDVDLGDISGINASVVNIQKEIDRLNEVAKNLNESLIDLQELGKYEQYIKGGGGSDIIKLLNEQVNKEMQSSNLYMSMSSWCYTHSLDGAGLFLFDHAAEEYEHAKKLIIFLNENNVPVQLTSISAPEHKFEGLTQIFQKAYEHEQHISESINNIVDHAIKSKDHATFNFLQWYVAEQHEEEVLFKDILDKIELIGNENHGLYLADQYVKGIAKSRKS

SEQ ID NO: 5217 - protein, 1379 aa, Artificial Sequence
  SARS-CoV-2/Iceland/280/2020__EPI_ISL_417608 spike protein (1-1211)(G889C_L1034C) Ferritin construct
MFVFLVLLPLVSSQCVNLTTRTQLPPAYTNSFTRGVYYPDKVFRSSVLHSTQDLFLPFFSNVTWFHAIHVSGTNGTKRFDNPVLPFNDGVYFASTEKSNIIRGWIFGTTLDSKTQSLLIVNNATNVVIKVCEFQFCNDPFLGVYYHKNNKSWMESEFRVYSSANNCTFEYVSQPFLMDLEGKQGNFKNLREFVFKNIDGYFKIYSKHTPINLVRDLPQGFSALEPLVDLPIGINITRFQTLLALHRSYLTPGDSSSGWTAGAAAYYVGYLQPRTFLLKYNENGTITDAVDCALDPLSETKCTLKSFTVEKGIYQTSNFRVQPTESIVRFPNITNLCPFGEVFNATRFASVYAWNRKRISNCVADYSVLYNSASFSTFKCYGVSPTKLNDLCFTNVYADSFVIRGDEVRQIAPGQTGKIADYNYKLPDDFTGCVIAWNSNNLDSKVGGNYNYLYRLFRKSNLKPFERDISTEIYQAGSTPCNGVEGFNCYFPLQSYGFQPTNGVGYQPYRVVVLSFELLHAPATVCGPKKSTNLVKNKCVNFNFNGLTGTGVLTESNKKFLPFQQFGRDIADTTDAVRDPQTLEILDITPCSFGGVSVITPGTNTSNQVAVLYQGVNCTEVPVAIHADQLTPTWRVYSTGSNVFQTRAGCLIGAEHVNNSYECDIPIGAGICASYHTQTNSPRRARSVASQSIIAYTMSLGAENSVAYSNNSIAIPTNFTISVTTEILPVSMTKTSVDCTMYICGDSTECSNLLLQYGSFCTQLNRALTGIAVEQDKNTQEVFAQVKQIYKTPPIKDFGGFNFSQILPDPSKPSKRSFIEDLLFNKVTLADAGFIKQYGDCLGDIAARDLICAQKFNGLTVLPPLLTDEMIAQYTSALLAGTITSGWTFCAGAALQIPFAMQMAYRFNGIGVTQNVLYENQKLIANQFNSAIGKIQDSLSSTASALGKLQDVVNQNAQALNTLVKQLSSNFGAISSVLNDILSRLDKVEAEVQIDRLITGRLQSLQTYVTQQLIRAAEIRASANLAATKMSECVCGQSKRVDFCGKGYHLMSFPQSAPHGVVFLHVTYVPAQEKNFTTAPAICHDGKAHFPREGVFVSNGTHWFVTQRNFYEPQIITTDNTFVSGNCDVVIGIVNNTVYDPLQPELDSFKEELDKYFKNHTSPDVDLGDISGINASVVNIQKEIDRLNEVAKNLNESLIDLQELGKYEQYIKGGGGSDIIKLLNEQVNKEMQSSNLYMSMSSWCYTHSLDGAGLFLFDHAAEEYEHAKKLIIFLNENNVPVQLTSISAPEHKFEGLTQIFQKAYEHEQHISESINNIVDHAIKSKDHATFNFLQWYVAEQHEEEVLFKDILDKIELIGNENHGLYLADQYVKGIAKSRKS

SEQ ID NO: 5218 - protein, 1379 aa, Artificial Sequence; identical to SEQ ID NO: 5173
  SARS-CoV-2/Iceland/247/2020__EPI_ISL_417575 spike protein (1-1211)(G889C_L1034C) Ferritin construct

SEQ ID NO: 5219 - protein, 1379 aa, Artificial Sequence
  SARS-CoV-2/Iceland/238/2020__EPI_ISL_417566 spike protein (1-1211)(G889C_L1034C) Ferritin construct
MFVFLVLLPLVSSQCVNLTTRTQLPPAYTNSFTRGVYYPDKVFRSSVLHSTQDLFLPFFSNVTWFHAIHVSGTNGTKRFDNPVLPFNDGVYFASTEKSNIIRGWIFGTTLDSKTQSLLIVNNATNVVIKVCEFQFCNDPFLGVYYHKNNKSWMESEFRVYSSANNCTFEYVSQPFLMDLEGKQGNFKNLREFVFKNIDGYFKIYSKHTPINLVRDLPQGFSALEPLVDLPIGINITRFQTLLALHRSYLTPGDSSSGWTAGAAAYYVGYLQPRTFLLKYNENGTITDAVDCALDPLSETKCTLKSFTVEKGIYQTSNFRVQPTESIVRFPNITNLCPFGEVFNATRFASVYAWNRKRISNCVADYSVLYNSASFSTFKCYGVSPTKLNDLCFTNVYADSFVIRGDEVRQIAPGQTGKIADYNYKLPDDFTGCVIAWNSNNLDSKVGGNYNYLYRLFRKSNLKPFERDISTEIYQAGSTPCNGVEGFNCYFPLQSYGFQPTNGVGYQPYRVVVLSFELLHAPATVCGPKKSTNLVKNKCVNFNFNGLTGTGVLTESNKKFLPFQQFGRDIADTTDAVRDPQTLEILDITPCSFGGVSVITPGTNTSNQVAVLYQGVNCTEVPVAIHADQLTPTWRVYSTGSNVFQTRAGCLIGAEHVNNSYECDIPIGAGICASYQTQTNSPRRARSVASQSIIAYTMSLGAENSVAYSNNSIAIPTNFTISVTTEILPVSMTKTSVDCTMYICGDSTECSNLLLQYGSFCTQLNRALTGIAVEQDKNTQEVFAQVKQIYKTPPIKDFGGFNFSQILPDPSKPSKRSFIEDLLFNKVTLADVGFIKQYGDCLGDIAARDLICAQKFNGLTVLPPLLTDEMIAQYTSALLAGTITSGWTFCAGAALQIPFAMQMAYRFNGIGVTQNVLYENQKLIANQFNSAIGKIQDSLSSTASALGKLQDVVNQNAQALNTLVKQLSSNFGAISSVLNDILSRLDKVEAEVQIDRLITGRLQSLQTYVTQQLIRAAEIRASANLAATKMSECVCGQSKRVDFCGKGYHLMSFPQSAPHGVVFLHVTYVPAQEKNFTTAPAICHDGKAHFPREGVFVSNGTHWFVTQRNFYEPQIITTDNTFVSGNCDVVIGIVNNTVYDPLQPELDSFKEELDKYFKNHTSPDVDLGDISGINASVVNIQKEIDRLNEVAKNLNESLIDLQELGKYEQYIKGGGGSDIIKLLNEQVNKEMQSSNLYMSMSSWCYTHSLDGAGLFLFDHAAEEYEHAKKLIIFLNENNVPVQLTSISAPEHKFEGLTQIFQKAYEHEQHISESINNIVDHAIKSKDHATFNFLQWYVAEQHEEEVLFKDILDKIELIGNENHGLYLADQYVKGIAKSRKS

SEQ ID NO: 5220 - protein, 1379 aa, Artificial Sequence
  SARS-CoV-2/Greece/16/2020__EPI_ISL_418265 spike protein (1-1211)(G889C_L1034C) Ferritin construct
MFVFLVLLPLVSSQCVNLTTRTQLPPAYTNSFTRGVYYPDKVFRSSVLHSTQDLFLPFFSNVTWFHAIHVSGTNGTKRFDNPVLPFNDGVYFASTEKSNIIRGWIFGTTLDSKTQSLLIVNNATNVVIKVCEFQFCNDPFLGVYYHKNNKSWMESEFRVYSSANNCTFEYVSQPFLMDLEGKQGNFKNLREFVFKNVDGYFKIYSKHTPINLVRDLPQGFSALEPLVDLPIGINITRFQTLLALHRSYLTPGDSSSGWTAGAAAYYVGYLQPRTFLLKYNENGTITDAVDCALDPLSETKCTLKSFTVEKGIYQTSNFRVQPTESIVRFPNITNLCPFGEVFNATRFASVYAWNRKRISNCVADYSVLYNSASFSTFKCYGVSPTKLNDLCFTNVYADSFVIRGDEVRQIAPGQTGKIADYNYKLPDDFTGCVIAWNSNNLDSKVGGNYNYLYRLFRKSNLKPFERDISTEIYQAGSTPCNGVEGFNCYFPLQSYGFQPTNGVGYQPYRVVVLSFELLHAPATVCGPKKSTNLVKNKCVNFNFNGLTGTGVLTESNKKFLPFQQFGRDIADTTDAVRDPQTLEILDITPCSFGGVSVITPGTNTSNQVAVLYQDVNCTEVPVAIHADQLTPTWRVYSTGSNVFQTRAGCLIGAEHVNNSYECDIPIGAGICASYQTQTNSPRRARSVASQSIIAYTMSLGAENSVAYSNNSIAIPTNFTISVTTEILPVSMTKTSVDCTMYICGDSTECSNLLLQYGSFCTQLNRALTGIAVEQDKNTQEVFAQVKQIYKTPPIKDFGGFNFSQILPDPSKPSKRSFIEDLLFNKVTLADAGFIKQYGDCLGDIAARDLICAQKFNGLTVLPPLLTDEMIAQYTSALLAGTITSGWTFCAGAALQIPFAMQMAYRFNGIGVTQNVLYENQKLIANQFNSAIGKIQDSLSSTASALGKLQDVVNQNAQALNTLVKQLSSNFGAISSVLNDILSRLDKVEAEVQIDRLITGRLQSLQTYVTQQLIRAAEIRASANLAATKMSECVCGQSKRVDFCGKGYHLMSFPQSAPHGVVFLHVTYVPAQEKNFTTAPAICHDGKAHFPREGVFVSNGTHWFVTQRNFYEPQIITTDNTFVSGNCDVVIGIVNNTVYDPLQPELDSFKEELDKYFKNHTSPDVDLGDISGINASVVNIQKEIDRLNEVAKNLNESLIDLQELGKYEQYIKGGGGSDIIKLLNEQVNKEMQSSNLYMSMSSWCYTHSLDGAGLFLFDHAAEEYEHAKKLIIFLNENNVPVQLTSISAPEHKFEGLTQIFQKAYEHEQHISESINNIVDHAIKSKDHATFNFLQWYVAEQHEEEVLFKDILDKIELIGNENHGLYLADQYVKGIAKSRKS

SEQ ID NO: 5221 - protein, 1379 aa, Artificial Sequence
  SARS-CoV-2/Iceland/319/2020__EPI_ISL_417648 spike protein (1-1211)(G889C_L1034C) Ferritin construct
MFVFLVLLPLVSSQCVNLTTRTQLPPAYTNSFTRGVYYPDKVFRSSVLHSTQDLFLPFFSNVTWFHAIHVSGTNGTKRFDNPVLPFNDGVYFASTEKSNIIRGWIFGTTLDSKTQSLLIVNNATNVVIKVCEFQFCNDPFLGVYYHKNNKSWMESEFRVYSSANNCTFEYVSQPFLIDLEGKQGNFKNLREFVFKNIDGYFKIYSKHTPINLVRDLPQGFSALEPLVDLPIGINITRFQTLLALHRSYLTPGDSSSGWTAGAAAYYVGYLQPRTFLLKYNENGTITDAVDCALDPLSETKCTLKSFTVEKGIYQTSNFRVQPTESIVRFPNITNLCPFGEVFNATRFASVYAWNRKRISNCVADYSVLYNSASFSTFKCYGVSPTKLNDLCFTNVYADSFVIRGDEVRQIAPGQTGKIADYNYKLPDDFTGCVIAWNSNNLDSKVGGNYNYLYRLFRKSNLKPFERDISTEIYQAGSTPCNGVEGFNCYFPLQSYGFQPTNGVGYQPYRVVVLSFELLHAPATVCGPKKSTNLVKNKCVNFNFNGLTGTGVLTESNKKFLPFQQFGRDIADTTDAVRDPQTLEILDITPCSFGGVSVITPGTNTSNQVAVLYQGVNCTEVPVAIHADQLTPTWRVYSTGSNVFQTRAGCLIGAEHVNNSYECDIPIGAGICASYQTQTNSPRRARSVASQSIIAYTMSLGAENSVAYSNNSIAIPTNFTISVTTEILPVSMTKTSVDCTMYICGDSTECSNLLLQYGSFCTQLNRALTGIAVEQDKNTQEVFAQVKQIYKTPPIKDFGGFNFSQILPDPSKPSKRSFIEDLLFNKVTLADAGFIKQYGDCLGDIAARDLICAQKFNGLTVLPPLLTDEMIAQYTSALLAGTITSGWTFCAGAALQIPFAMQMAYRFNGIGVTQNVLYENQKLIANQFNSAIGKIQDSLSSTASALGKLQDVVNQNAQALNTLVKQLSSNFGAISSVLNDILSRLDKVEAEVQIDRLITGRLQSLQTYVTQQLIRAAEIRASANLAATKMSECVCGQSKRVDFCGKGYHLMSFPQSAPHGVVFLHVTYVPAQEKNFTTAPAICHDGKAHFPREGVFVSNGTHWFVTQRNFYEPQIITTDNTFVSGNCDVVIGIVNNTVYDPLQPELDSFKEELDKYFKNHTSPDVDLGDISGINASVVNIQKEIDRLNEVAKNLNESLIDLQELGKYEQYIKGGGGSDIIKLLNEQVNKEMQSSNLYMSMSSWCYTHSLDGAGLFLFDHAAEEYEHAKKLIIFLNENNVPVQLTSISAPEHKFEGLTQIFQKAYEHEQHISESINNIVDHAIKSKDHATFNFLQWYVAEQHEEEVLFKDILDKIELIGNENHGLYLADQYVKGIAKSRKS

SEQ ID NO: 5222 - protein, 1379 aa, Artificial Sequence
  SARS-CoV-2/Congo/94/2020__EPI_ISL_417947 spike protein (1-1211)(G889C_L1034C) Ferritin construct
MFVFLVLLPLVSSQCVNLTTRTQLPPAYTNSFTRGVYYPDKVFRSSVLHSTQDLFLPFFSNVTWFHAIHVSGTNGTKRFDNPVLPFNDGVYFASTEKSNIIRGWIFGTTLDSKTQSLLIVNNATNVVIKVCEFQFCNDPFLGVYYHKNNKSWMESEFRVYSSANNCTFEYVSQPFLMDLEGKQGNFKNLREFVFKNIDGYFKIYSKHTPINLVRDLPQGFSALEPLVDLPIGINITRFQTLLALHRSYLTPGDSSSGWTAGAAAYYVGYLQPRTFLLKYNENGTITDAVDCALDPLSETKCTLKSFTVEKGIYQTSNFRVQPTESIVRFPNITNLCPFGEVFNATRFASVYAWNRKRISNCVADYSVLYNSASFSTFKCYGVSPTKLNDLCFTNVYADSFVIRGDEVRQIAPGQTGKIADYNYKLPDDFTGCVIAWNSNNLDSKVGGNYNYLYRLFRKSNLKPFERDISTEIYQAGSTPCNGVEGFNCYFPLQSYGFQPTNGVGYQPYRVVVLSFELLHAPATVCGPKKSTNLVKNKCVNFNFNGLTGTGVLTESNKKFLPFQQFGRDIADTTDAVRDPQTLEILDITPCSFGGVSVITPGTNTSNQVAVLYQGVNCTEVPVAIHADQLTPTWRVYSTGSNVFQTRAGCLIGAEHVNNSYECDIPIGAGICASYQTQTNSPRRARSVASQSIIAYTMSLGAENSVAYSNNSIAIPTNFTISVTTEILPVSMTKTSVDCTMYICGDSTECSNLLLQYGSFCTQLNRALTGIAVEQDKNTQEVFAQVKQIYKTPPIKDFGGFNFSQILPDPSKPSKRSFIEDILFNKVTLADAGFIKQYGDCLGDIAARDLICAQKFNGLTVLPPLLTDEMIAQYTSALLAGTITSGWTFCAGAALQIPFAMQMAYRFNGIGVTQNVLYENQKLIANQFNSAIGKIQDSLSSTASALGKLQDVVNQNAQALNTLVKQLSSNFGAISSVLNDILSRLDKVEAEVQIDRLITGRLQSLQTYVTQQLIRAAEIRASANLAATKMSECVCGQSKRVDFCGKGYHLMSFPQSAPHGVVFLHVTYVPAQEKNFTTAPAICHDGKAHFPREGVFVSNGTHWFVTQRNFYEPQIITTDNTFVSGNCDVVIGIVNNTVYDPLQPELDSFKEELDKYFKNHTSPDVDLGDISGINASVVNIQKEIDRLNEVAKNLNESLIDLQELGKYEQYIKGGGGSDIIKLLNEQVNKEMQSSNLYMSMSSWCYTHSLDGAGLFLFDHAAEEYEHAKKLIIFLNENNVPVQLTSISAPEHKFEGLTQIFQKAYEHEQHISESINNIVDHAIKSKDHATFNFLQWYVAEQHEEEVLFKDILDKIELIGNENHGLYLADQYVKGIAKSRKS

SEQ ID NO: 5223 - protein, 1379 aa, Artificial Sequence
  SARS-CoV-2/Congo/158/2020__EPI_ISL_417950 spike protein (1-1211)(G889C_L1034C) Ferritin construct
MFVFLVLLPLVSSQCVNLTTRTQLPPAYTNSFTRGVYYPDKVFRSSVLHSTQDLFLPFFSNVTWFHAIHVSGTNGTKRFDNPVLPFNDGVYFASTEKSNIIRGWIFGTTLDSKTQSLLIVNNATNVVIKVCEFQFCNDPFLGVYYHKNNKSWMESEFRVYSSANNCTFEYVSQPFLMDLEGKQGNFKNLREFVFKNIDGYFKIYSKHTPINLVRDLPQGFSALEPLVDLPIGINITRFQTLLALHRSYLTPGDSSSGWTAGAAAYYVGYLQPRTFLLKYNENGTITDAVDCALDPLSETKCTLKSFTVEKGIYQTSNFRVQPTESIVRFPNITNLCPFGEVFNATRFASVYAWNRKRISNCVADYSVLYNSASFSTFKCYGVSPTKLNDLCFTNVYADSFVIRGDEVRQIAPGQTGKIADYNYKLPDDFTGCVIAWNSNNLDSKVGGNYNYLYRLFRKSNLKPFERDISTEIYQAGSTPCNGVEGFNCYFPLQSYGFQPTNGVGYQPYRVVVLSFELLHAPATVCGPKKSTNLVKNKCVNFNFNGLTGTGVLTESNKKFLPFQQFGRDIADTTDAVRDPQTLEILDITPCSFGGVSVITPGTNTSNQVAVLYQDVNCTEVPVAIHADQLTPTWRVYSTGSNVFQTRAGCLIGAEHVNNSYECDIPIGAGICASYQTQTNSPRRARSVASQSIIAYTMSLGAENSVAYSNNSIAIPTNFTISVTTEILPVSMTKTSVDCTMYICGDSTECSNLLLQYGSFCTQLNRALTGIAVEQDKNTQEVFAQVKQIYKTPPIKDFGGFNFSQILPDPSKPSKRSFIEDLLFNKVTLADAGFIKQYGDCLGDIAARDLICAQKFNGLTVLPPLLTDEMIAQYTSALLAGTITSGWTFCAGAALQIPFAMQMAYRFNGIGVTQNVLYENQKLIANQFNSAIGKIQDSLSSTASALGKLQDVVNQNAQALNTLVKQLSSNFGAISSVLNDILSRLDKVEAEVQIDRLITGRLQSLQTYVTQQLIRAAEIRASANLAATKMSECVCGQSKRVDFCGKGYHLMSFPQSAPHGVVFLHVTYVPAQEKNFTTAPAICHDGKAHFPREGVFVSNGTHWFVTQRNFYEPQIITTDNTFLSGNCDVVIGIVNNTVYDPLQPELDSFKEELDKYFKNHTSPDVDLGDISGINASVVNIQKEIDRLNEVAKNLNESLIDLQELGKYEQYIKGGGGSDIIKLLNEQVNKEMQSSNLYMSMSSWCYTHSLDGAGLFLFDHAAEEYEHAKKLIIFLNENNVPVQLTSISAPEHKFEGLTQIFQKAYEHEQHISESINNIVDHAIKSKDHATFNFLQWYVAEQHEEEVLFKDILDKIELIGNENHGLYLADQYVKGIAKSRKS

SEQ ID NO: 5224 - protein, 1379 aa, Artificial Sequence
  SARS-CoV-2/USA/UT-00034/2020__EPI_ISL_417977 spike protein (1-1211)(G889C_L1034C) Ferritin construct
MFVFLVLLPLVSSQCVNLTTRTQLPPAYTNSFTRGVYYPDKVFRSSVLHSTQDLFLPFFSNVTWFHAIHVSGTNGTKRFDNPVLPFNDGVYFASTEKSNIIRGWIFGTTLDSKTQSLLIVNNATNVVIKVCEFQFCNDPFLGVYYYKNNKSWMESEFRVYSSANNCTFEYVSQPFLMDLEGKQGNFKNLREFVFKNIDGYFKIYSKHTPINLVRDLPQGFSALEPLVDLPIGINITRFQTLLALHRSYLTPGDSSSGWTAGAAAYYVGYLQPRTFLLKYNENGTITDAVDCALDPLSETKCTLKSFTVEKGIYQTSNFRVQPTESIVRFPNITNLCPFGEVFNATRFASVYAWNRKRISNCVADYSVLYNSASFSTFKCYGVSPTKLNDLCFTNVYADSFVIRGDEVRQIAPGQTGKIADYNYKLPDDFTGCVIAWNSNNLDSKVGGNYNYLYRLFRKSNLKPFERDISTEIYQAGSTPCNGVEGFNCYFPLQSYGFQPTNGVGYQPYRVVVLSFELLHAPATVCGPKKSTNLVKNKCVNFNFNGLTGTGVLTESNKKFLPFQQFGRDIADTTDAVRDPQTLEILDITPCSFGGVSVITPGTNTSNQVAVLYQGVNCTEVPVAIHADQLTPTWRVYSTGSNVFQTRAGCLIGAEHVNNSYECDIPIGAGICASYQTQTNSPRRARSVASQSIIAYTMSLGAENSVAYSNNSIAIPTNFTISVTTEILPVSMTKTSVDCTMYICGDSTECSNLLLQYGSFCTQLNRALTGIAVEQDKNTQEVFAQVKQIYKTPPIKDFGGFNFSQILPDPSKPSKRSFIEDLLFNKVTLADAGFIKQYGDCLGDIAARDLICAQKFNGLTVLPPLLTDEMIAQYTSALLAGTITSGWTFCAGAALQIPFAMQMAYRFNGIGVTQNVLYENQKLIANQFNSAIGKIQDSLSSTASALGKLQDVVNQNAQALNTLVKQLSSNFGAISSVLNDILSRLDKVEAEVQIDRLITGRLQSLQTYVTQQLIRAAEIRASANLAATKMSECVCGQSKRVDFCGKGYHLMSFPQSAPHGVVFLHVTYVPAQEKNFTTAPAICHDGKAHFPREGVFVSNGTHWFVTQRNFYEPQIITTDNTFVSGNCDVVIGIVNNTVYDPLQPELDSFKEELDKYFKNHTSPDVDLGDISGINASVVNIQKEIDRLNEVAKNLNESLIDLQELGKYEQYIKGGGGSDIIKLLNEQVNKEMQSSNLYMSMSSWCYTHSLDGAGLFLFDHAAEEYEHAKKLIIFLNENNVPVQLTSISAPEHKFEGLTQIFQKAYEHEQHISESINNIVDHAIKSKDHATFNFLQWYVAEQHEEEVLFKDILDKIELIGNENHGLYLADQYVKGIAKSRKS

SEQ ID NO: 5225 - protein, 1379 aa, Artificial Sequence
  SARS-CoV-2/USA/UT-00033/2020__EPI_ISL_417976 spike protein (1-1211)(G889C_L1034C) Ferritin construct
MFVFLVLLPLVSSQCVNLTTRTQLPPAYTNSFTRGVYYPDKVFRSSVLHSTQDLFLPFFSNVTWFHAIHVSGTNGTKRFDNPVLPFNDGVYFASTEKSNIIRGWIFGTTLDSKTQSLLIVNNATNVVIKVCEFQFCNDPFLGVYYHKNNKSWMESEFRVYSSANNCTFEYVSQPFLMDLEGKQGNFKNLREFVFKNIDGYFKIYSKHTPINLVRDLPQGFSALEPLVDLPIGINITRFQTLLALHRSYLTPGDSSSGLTAGAAAYYVGYLQPRTFLLKYNENGTITDAVDCALDPLSETKCTLKSFTVEKGIYQTSNFRVQPTESIVRFPNITNLCPFGEVFNATRFASVYAWNRKRISNCVADYSVLYNSASFSTFKCYGVSPTKLNDLCFTNVYADSFVIRGDEVRQIAPGQTGKIADYNYKLPDDFTGCVIAWNSNNLDSKVGGNYNYLYRLFRKSNLKPFERDISTEIYQAGSTPCNGVEGFNCYFPLQSYGFQPTNGVGYQPYRVVVLSFELLHAPATVCGPKKSTNLVKNKCVNFNFNGLTGTGVLTESNKKFLPFQQFGRDIADTTDAVRDPQTLEILDITPCSFGGVSVITPGTNTSNQVAVLYQGVNCTEVPVAIHADQLTPTWRVYSTGSNVFQTRAGCLIGAEHVNNSYECDIPIGAGICASYQTQTNSPRRARSVASQSIIAYTMSLGAENSVAYSNNSIAIPTNFTISVTTEILPVSMTKTSVDCTMYICGDSTECSNLLLQYGSFCTQLNRALTGIAVEQDKNTQEVFAQVKQIYKTPPIKDFGGFNFSQILPDPSKPSKRSFIEDLLFNKVTLADAGFIKQYGDCLGDIAARDLICAQKFNGLTVLPPLLTDEMIAQYTSALLAGTITSGWTFCAGAALQIPFAMQMAYRFNGIGVTQNVLYENQKLIANQFNSAIGKIQDSLSSTASALGKLQDVVNQNAQALNTLVKQLSSNFGAISSVLNDILSRLDKVEAEVQIDRLITGRLQSLQTYVTQQLIRAAEIRASANLAATKMSECVCGQSKRVDFCGKGYHLMSFPQSAPHGVVFLHVTYVPAQEKNFTTAPAICHDGKAHFPREGVFVSNGTHWFVTQRNFYEPQIITTDNTFVSGNCDVVIGIVNNTVYDPLQPELDSFKEELDKYFKNHTSPDVDLGDISGINASVVNIQKEIDRLNEVAKNLNESLIDLQELGKYEQYIKGGGGSDIIKLLNEQVNKEMQSSNLYMSMSSWCYTHSLDGAGLFLFDHAAEEYEHAKKLIIFLNENNVPVQLTSISAPEHKFEGLTQIFQKAYEHEQHISESINNIVDHAIKSKDHATFNFLQWYVAEQHEEEVLFKDILDKIELIGNENHGLYLADQYVKGIAKSRKS

SEQ ID NO: 5226 - protein, 1379 aa, Artificial Sequence
  SARS-CoV-2/USA/WI-13/2020__EPI_ISL_417516 spike protein (1-1211)(G889C_L1034C) Ferritin construct
MFVFLVLLPLVSSQCVNLTTRTQLPPAYTNSFTRGVYYPDKVFRSSVLHSTQDLFLPFFSNVTWFHAIHVSGTNGTKRFDNPVLPFNDGVYFASTEKSNIIRGWIFGTTLDSKTQSLLIVNNATNVVIKVCEFQFCNDPFLGVYYHKNNKSWMESEFRVYSSANNCTFEYVSQPFLMDLEGKQGNFKNLREFVFKNIDGYFKIYSKHTPINLVRDLPQGFSALEPLVDLPIGINITRFQTLLALHRSYLTPGDSSSGWTAGAAAYYVGYLQPRTFLLKYNENGTITDAVDCALDPLSETKCTLKSFTVEKGIYQTSNFRVLPTESIVRFPNITNLCPFGEVFNATRFASVYAWNRKRISNCVADYSVLYNSASFSTFKCYGVSPTKLNDLCFTNVYADSFVIRGDEVRQIAPGQTGKIADYNYKLPDDFTGCVIAWNSNNLDSKVGGNYNYLYRLFRKSNLKPFERDISTEIYQAGSTPCNGVEGFNCYFPLQSYGFQPTNGVGYQPYRVVVLSFELLHAPATVCGPKKSTNLVKNKCVNFNFNGLTGTGVLTESNKKFLPFQQFGRDIADTTDAVRDPQTLEILDITPCSFGGVSVITPGTNTSNQVAVLYQGVNCTEVPVAIHADQLTPTWRVYSTGSNVFQTRAGCLIGAEHVNNSYECDIPIGAGICASYQTQTNSPRRARSVASQSIIAYTMSLGAENSVAYSNNSIAIPTNFTISVTTEILPVSMTKTSVDCTMYICGDSTECSNLLLQYGSFCTQLNRALTGIAVEQDKNTQEVFAQVKQIYKTPPIKDFGGFNFSQILPDPSKPSKRSFIEDLLFNKVTLADAGFIKQYGDCLGDIAARDLICAQKFNGLTVLPPLLTDEMIAQYTSALLAGTITSGWTFCAGAALQIPFAMQMAYRFNGIGVTQNVLYENQKLIANQFNSAIGKIQDSLSSTASALGKLQDVVNQNAQALNTLVKQLSSNFGAISSVLNDILSRLDKVEAEVQIDRLITGRLQSLQTYVTQQLIRAAEIRASANLAATKMSECVCGQSKRVDFCGKGYHLMSFPQSAPHGVVFLHVTYVPAQEKNFTTAPAICHDGKAHFPREGVFVSNGTHWFVTQRNFYEPQIITTDNTFVSGNCDVVIGIVNNTVYDPLQPELDSFKEELDKYFKNHTSPDVDLGDISGINASVVNIQKEIDRLNEVAKNLNESLIDLQELGKYEQYIKGGGGSDIIKLLNEQVNKEMQSSNLYMSMSSWCYTHSLDGAGLFLFDHAAEEYEHAKKLIIFLNENNVPVQLTSISAPEHKFEGLTQIFQKAYEHEQHISESINNIVDHAIKSKDHATFNFLQWYVAEQHEEEVLFKDILDKIELIGNENHGLYLADQYVKGIAKSRKS

SEQ ID NO: 5227 - protein, 1378 aa, Artificial Sequence
  SARS-CoV-2/India/1-27/2020__EPI_ISL_413522 spike protein (1-1210)(G888C_L1033C) Ferritin construct
MFVFLVLLPLVSSQCVNLTTRTQLPPAYTNSFTRGVYYPDKVFRSSVLHSTQDLFLPFFSNVTWFHAIHVSGTNGTKRFDNPVLPFNDGVYFASTEKSNIIRGWIFGTTLDSKTQSLLIVNNATNVVIKVCEFQFCNDPFLGVYHKNNKSWMESEFRVYSSANNCTFEYVSQPFLMDLEGKQGNFKNLREFVFKNIDGYFKIYSKHTPINLVRDLPQGFSALEPLVDLPIGINITRFQTLLALHRSYLTPGDSSSGWTAGAAAYYVGYLQPRTFLLKYNENGTITDAVDCALDPLSETKCTLKSFTVEKGIYQTSNFRVQPTESIVRFPNITNLCPFGEVFNATRFASVYAWNRKRISNCVADYSVLYNSASFSTFKCYGVSPTKLNDLCFTNVYADSFVIRGDEVIQIAPGQTGKIADYNYKLPDDFTGCVIAWNSNNLDSKVGGNYNYLYRLFRKSNLKPFERDISTEIYQAGSTPCNGVEGFNCYFPLQSYGFQPTNGVGYQPYRVVVLSFELLHAPATVCGPKKSTNLVKNKCVNFNFNGLTGTGVLTESNKKFLPFQQFGRDIADTTDAVRDPQTLEILDITPCSFGGVSVITPGTNTSNQVAVLYQDVNCTEVPVAIHADQLTPTWRVYSTGSNVFQTRAGCLIGAEHVNNSYECDIPIGAGICASYQTQTNSPRRARSVASQSIIAYTMSLGAENSVAYSNNSIAIPTNFTISVTTEILPVSMTKTSVDCTMYICGDSTECSNLLLQYGSFCTQLNRALTGIAVEQDKNTQEVFAQVKQIYKTPPIKDFGGFNFSQILPDPSKPSKRSFIEDLLFNKVTLADAGFIKQYGDCLGDIAARDLICAQKFNGLTVLPPLLTDEMIAQYTSALLAGTITSGWTFCAGAALQIPFAMQMAYRFNGIGVTQNVLYENQKLIANQFNSAIGKIQDSLSSTASALGKLQDVVNQNAQALNTLVKQLSSNFGAISSVLNDILSRLDKVEAEVQIDRLITGRLQSLQTYVTQQLIRAAEIRASANLAATKMSECVCGQSKRVDFCGKGYHLMSFPQSAPHGVVFLHVTYVPAQEKNFTTAPAICHDGKAHFPREGVFVSNGTHWFVTQRNFYEPQIITTDNTFVSGNCDVVIGIVNNTVYDPLQPELDSFKEELDKYFKNHTSPDVDLGDISGINASVVNIQKEIDRLNEVAKNLNESLIDLQELGKYEQYIKGGGGSDIIKLLNEQVNKEMQSSNLYMSMSSWCYTHSLDGAGLFLFDHAAEEYEHAKKLIIFLNENNVPVQLTSISAPEHKFEGLTQIFQKAYEHEQHISESINNIVDHAIKSKDHATFNFLQWYVAEQHEEEVLFKDILDKIELIGNENHGLYLADQYVKGIAKSRKS

SEQ ID NO: 5228 - protein, 1373 aa, Artificial Sequence
  SARS-CoV-2/pangolin/Guangxi/P4L/2017__EPI_ISL_410538 spike protein (1-1205)(G883C_L1028C) Ferritin construct
MFVFLFVLPLVSSQCVNLTTRTGIPPGYTNSSTRGVYYPDKVFRSSILHLTQDLFLPFFSNVTWFNTINYQGGFKKFDNPVLPFNDGVYFASTEKSNIIRGWIFGTTLDARTQSLLIVNNATNVVIKVCEFQFCTDPFLGVYYHNNNKTWVENEFRVYSSANNCTFEYISQPFLMDLEGKQGNFKNLREFVFKNVDGYFKIYSKHTPIDLVRDLPRGFAALEPLVDLPIGINITRFQTLLALHRSYLTPGNLESGWTTGAAAYYVGYLQQRTFLLSYNQNGTITDAVDCSLDPLSETKCTLKSLTVEKGIYQTSNFRVQPTISIVRFPNITNLCPFGEVFNASKFASVYAWNRKRISNCVADYSVLYNSTSFSTFKCYGVSPTKLNDLCFTNVYADSFVVKGDEVRQIAPGQTGVIADYNYKLPDDFTGCVIAWNSVKQDALTGGNYGYLYRLFRKSKLKPFERDISTEIYQAGSTPCNGQVGLNCYYPLERYGFHPTTGVNYQPFRVVVLSFELLNGPATVCGPKLSTTLVKDKCVNFNFNGLTGTGVLTTSKKQFLPFQQFGRDISDTTDAVRDPQTLEILDITPCSFGGVSVITPGTNTSNQVAVLYQDVNCTEVPMAIHAEQLTPAWRVYSAGANVFQTRAGCLVGAEHVNNSYECDIPVGAGICASYHSMSSLRSVNQRSIIAYTMSLGAENSVAYSNNSIAIPTNFTISVTTEILPVSMTKTSVDCTMYICGDSIECSNLLLQYGSFCTQLNRALTGIAVEQDKNTQEVFAQVKQIYKTPPIKDFGGFNFSQILPDPSKPSKRSFIEDLLFNKVTLADAGFIKQYGDCLGDIAARDLICAQKFNGLTVLPPLLTDEMIAQYTSALLAGTITSGWTFCAGAALQIPFAMQMAYRFNGIGVTQNVLYENQKLIANQFNSAIGKIQDSLSSTASALGKLQDVVNQNAQALNTLVKQLSSNFGAISSVLNDILSRLDKVEAEVQIDRLITGRLQSLQTYVTQQLIRAAEIRASANLAATKMSECVCGQSKRVDFCGKGYHLMSFPQSAPHGVVFLHVTYVPAQEKNFTTAPAICHEGKAHFPREGVFVSNGTHWFITQRNFYEPQIITTDNTFVSGSCDVVIGIVNNTVYDPLQPELDSFKEELDKYFKNHTSPDVDLGDISGINASVVNIQKEIDRLNEVAKNLNESPIDLQELGKYEQYIKGGGGSDIIKLLNEQVNKEMQSSNLYMSMSSWCYTHSLDGAGLFLFDHAAEEYEHAKKLIIFLNENNVPVQLTSISAPEHKFEGLTQIFQKAYEHEQHISESINNIVDHAIKSKDHATFNFLQWYVAEQHEEEVLFKDILDKIELIGNENHGLYLADQYVKGIAKSRKS

SEQ ID NO: 5229 - protein, 1373 aa, Artificial Sequence
  SARS-CoV-2/pangolin/Guangxi/P5L/2017__EPI_ISL_410540 spike protein (1-1205)(G883C_L1028C) Ferritin construct
MFVFLFVLPLVSSQCVNLTTRTGIPPGYTNSSTRGVYYPDKVFRSSILHLTQDLFLPFFSNVTWFNTINYQGGFKKFDNPVLPFNDGVYFASTEKSNIIRGWIFGTTLDARTQSLLIVNNATNVVIKVCEFQFCTDPFLGVYYHNNNKTWVENEFRVYSSANNCTFEYISQPFLMDLEGKQGNFKNLREFVFKNVDGYFKIYSKHTPIDLVRDLPRGFAALEPLVDLPIGINITRFQTLLALHRSYLTPGKLESGWTTGAAAYYVGYLQQRTFLLSYNQNGTITDAVDCSLDPLSETKCTLKSLTVEKGIYQTSNFRVQPTISIVRFPNITNLCPFGEVFNASKFASVYAWNRKRISNCVADYSVLYNSTSFSTFKCYGVSPTKLNDLCFTNVYADSFVVKGDEVRQIAPGQTGVIADYNYKLPDDFTGCVIAWNSVKQDALTGGNYGYLYRLFRKSKLKPFERDISTEIYQAGSTPCNGQVGLNCYYPLERYGFHPTTGVNYQPFRVVVLSFELLNGPATVCGPKLSTTLVKDKCVNFNFNGLTGTGVLTTSKKQFLPFQQFGRDISDTTDAVRDPQTLEILDITPCSFGGVSVITPGTNTSNQVAVLYQDVNCTEVPMAIHAEQLTPAWRVYSAGANVFQTRAGCLVGAEHVNNSYECDIPVGAGICASYHSMSSFRSVNQRSIIAYTMSLGAENSVAYSNNSIAIPTNFTISVTTEILPVSMTKTSVDCTMYICGDSIECSNLLLQYGSFCTQLNRALTGIAVEQDKNTQEVFAQVKQIYKTPPIKDFGGFNFSQILPDPSKPSKRSFIEDLLFNKVTLADAGFIKQYGDCLGDIAARDLICAQKFNGLTVLPPLLTDEMIAQYTSALLAGTITSGWTFCAGAALQIPFAMQMAYRFNGIGVTQNVLYENQKLIANQFNSAIGKIQDSLSSTASALGKLQDVVNQNAQALNTLVKQLSSNFGAISSVLNDILSRLDKVEAEVQIDRLITGRLQSLQTYVTQQLIRAAEIRASANLAATKMSECVCGQSKRVDFCGKGYHLMSFPQSAPHGVVFLHVTYVPAQEKNFTTAPAICHEGKAHFPREGVFVSNGTHWFITQRNFYEPQIITTDNTFVSGSCDVVIGIVNNTVYDPLQPELDSFKEELDKYFKNHTSPDVDLGDISGINASVVNIQKEIDRLNEVAKNLNESLIDLQELGKYEQYIKGGGGSDIIKLLNEQVNKEMQSSNLYMSMSSWCYTHSLDGAGLFLFDHAAEEYEHAKKLIIFLNENNVPVQLTSISAPEHKFEGLTQIFQKAYEHEQHISESINNIVDHAIKSKDHATFNFLQWYVAEQHEEEVLFKDILDKIELIGNENHGLYLADQYVKGIAKSRKS

SEQ ID NO: 5230 - protein, 1373 aa, Artificial Sequence
  SARS-CoV-2/pangolin/Guangxi/P5E/2017__EPI_ISL_410541 spike protein (1-1205)(G883C_L1028C) Ferritin construct
MFVFLFVLPLVSSQCVNLTTRTGIPPGYTNSSTRGVYYPDKVFRSSILHLTQDLFLPFFSNVTWFNTITYQGGSKKFDNPVLPFNDGVYFASTEKSNIIRGWIFGTTLDARTQSLLIVNNATNVVIKVCEFQFCTDPFLGVYYHNNNKTWVENEFRVYSSANNCTFEYISQPFLMDLEGKQGNFKNLREFVFKNVDGYFKIYSKHTPIDLVRDLPRGFAALEPLVDLPIGINITRFQTLLALHRSYLTPGKLESGWTTGAAAYYVGYLQQRTFLLSYNQNGTITDAVDCSLDPLSETKCTLKSLTVEKGIYQTSNFRVQPTISIVRFPNITNLCPFGEVFNASKFASVYAWNRKRISNCVADYSVLYNSTSFSTFKCYGVSPTKLNDLCFTNVYADSFVVKGDEVRQIAPGQTGVIADYNYKLPDDFTGCVIAWNSVKQDALTGDNYGYLYRLFRKSKLKPFERDISTEIYQAGSTPCNGQVGLNCYYPLERYGFHPTTGVNYQPFRVVVLSFELLNGPATVCGPKLSTTLVKDKCVNFNFNGLTGTGVLTTSKKQFLPFQQFGRDISDTTDAVRDPQTLEILDITPCSFGGVSVITPGTNTSNQVAVLYQDVNCTEVPMAIHAEQLTPAWRVYSAGANVFQTRAGCLVGAEHVNNSYECDIPVGAGICASYHSMSSFRSVNQRSIIAYTMSLGAENSVAYSNNSIAIPTNFTISVTTEILPVSMTKTSVDCTMYICGDSIECSNLLLQYGSFCTQLNRALTGIAVEQDKNTQEVFAQVKQIYKTPPIKDFGGFNFSQILPDPSKPSKRSFIEDLLFNKVTLADAGFIKQYGDCLGDIAARDLICAQKFNGLTVLPPLLTDEMIAQYTSALLAGTITSGWTFCAGAALQIPFAMQMAYRFNGIGVTQNVLYENQKLIANQFNSAIGKIQDSLSSTASALGKLQDVVNQNAQALNTLVKQLSSNFGAISSVLNDILSRLDKVEAEVQIDRLITGRLQSLQTYVTQQLIRAAEIRASANLAATKMSECVCGQSKRVDFCGKGYHLMSFPQSAPHGVVFLHVTYVPAQEKNFTTAPAICHEGKAHFPREGVFVSNGTHWFITQRNFYEPQIITTDNTFVSGSCDVVIGIVNNTVYDPLQPELDSFKEELDKYFKNHTSPDVDLGDISGINASVVNIQKEIDRLNEVAKNLNESLIDLQELGKYEQYIKGGGGSDIIKLLNEQVNKEMQSSNLYMSMSSWCYTHSLDGAGLFLFDHAAEEYEHAKKLIIFLNENNVPVQLTSISAPEHKFEGLTQIFQKAYEHEQHISESINNIVDHAIKSKDHATFNFLQWYVAEQHEEEVLFKDILDKIELIGNENHGLYLADQYVKGIAKSRKS

SEQ ID NO: 5231 - protein, 1371 aa, Artificial Sequence
  SARS-CoV-2/pangolin/Guangxi/P1E/2017__EPI_ISL_410539 spike protein (1-1203)(G881C_L1026C) Ferritin construct
MFVFLFVLPLVSSQCVNLTTRTGIQPGYTNSSTRGVYYPDKVFRSSILHLTQDLFLPFFSNVTWFNTINYQGGFKKFDNPVLPFNDGVYFASTEKSNIIRGWIFGTTLDARTQSLLIVNNATNVVIKVCEFQFCTDPFLGVYYHNNNKTWVENEFRVYSSANNCTFEYISQPFLMDLEGKQGNFKNLREFVFKNVDGYFKIYSKHTPIDLVRDLPRGFAALEPLVDLPIGINITRFQTLLALHRSYLTPGKLESGWTTGAAAYYVGYLQQRTFLLSYNQNGTITDAVDCSLDPLSETKCTLKSLTVEKGIYQTSNFRVQPTISIVRFPNITNLCPFGEVFNASKFASVYAWNRKRISNCVADYSVLYNSTSFSTFKCYGVSPTKLNDLCFTNVYADSFVVKGDEVRQIAPGQTGVIADYNYKLPDDFTGCVIAWNSVKQDALTGGNYLYRLFRKSKLKPFERDISTEIYQAGSTPCNGQVGLNCYYPLERYGFHPTTGVNYQPFRVVVLSFELLNGPATVCGPKLSTTLVKDKCVNFNFNGLTGTGVLTTSKKQFLPFQQFGRDISDTTDAVRDPQTLEILDITPCSFGGVSVITPGTNTSNQVAVLYQDVNCTEVPMAIHAEQLTPAWRVYSAGANVFQTRAGCLVGAEHVNNSYECDIPVGAGICASYHSMSSLRSVNQRSIIAYTMSLGAENSVAYSNNSIAIPTNFTISVTTEILPVSMTKTSVDCTMYICGDSIECSNLLLQYGSFCTQLNRALTGIAVEQDKNTQEVFAQVKQIYKTPPIKDFGGFNFSQILPDPSKPSKRSFIEDLLFNKVTLADAGFIKQYGDCLGDIAARDLICAQKFNGLTVLPPLLTDEMIAQYTSALLAGTITSGWTFCAGAALQIPFAMQMAYRFNGIGVTQNVLYENQKLIANQFNSAIGKIQDSLSSTASALGKLQDVVNQNAQALNTLVKQLSSNFGAISSVLNDILSRLDKVEAEVQIDRLITGRLQSLQTYVTQQLIRAAEIRASANLAATKMSECVCGQSKRVDFCGKGYHLMSFPQSAPHGVVFLHVTYVPAQEKNFTTAPAICHEGKAHFPREGVFVSNGTHWFITQRNFYEPQIITTDNTFVSGSCDVVIGIVNNTVYDPLQPELDSFKEELDKYFKNHTSPDVDLGDISGINASVVNIQKEIDRLNEVAKNLNESLIDLQELGKYEQYIKGGGGSDIIKLLNEQVNKEMQSSNLYMSMSSWCYTHSLDGAGLFLFDHAAEEYEHAKKLIIFLNENNVPVQLTSISAPEHKFEGLTQIFQKAYEHEQHISESINNIVDHAIKSKDHATFNFLQWYVAEQHEEEVLFKDILDKIELIGNENHGLYLADQYVKGIAKSRKS

SEQ ID NO: 5232 - protein, 1379 aa, Artificial Sequence
  SARS-CoV-2/Wuhan/WIV05/2019__EPI_ISL_402128 spike protein (1-1211)(I909C_Y1047C) Ferritin construct
MFVFLVLLPLVSSQCVNLTTRTQLPPAYTNSFTRGVYYPDKVFRSSVLHSTQDLFLPFFSNVTWFHAIHVSGTNGTKRFDNPVLPFNDGVYFASTEKSNIIRGWIFGTTLDSKTQSLLIVNNATNVVIKVCEFQFCNDPFLGVYYHKNNKSWMESEFRVYSSANNCTFEYVSQPFLMDLEGKQGNFKNLREFVFKNIDGYFKIYSKHTPINLVRDLPQGFSALEPLVDLPIGINITRFQTLLALHRSYLTPGDSSSGWTAGAAAYYVGYLQPRTFLLKYNENGTITDAVDCALDPLSETKCTLKSFTVEKGIYQTSNFRVQPTESIVRFPNITNLCPFGEVFNATRFASVYAWNRKRISNCVADYSVLYNSASFSTFKCYGVSPTKLNDLCFTNVYADSFVIRGDEVRQIAPGQTGKIADYNYKLPDDFTGCVIAWNSNNLDSKVGGNYNYLYRLFRKSNLKPFERDISTEIYQAGSTPCNGVEGFNCYFPLQSYGFQPTNGVGYQPYRVVVLSFELLHAPATVCGPKKSTNLVKNKCVNFNFNGLTGTGVLTESNKKFLPFQQFGRDIADTTDAVRDPQTLEILDITPCSFGGVSVITPGTNTSNQVAVLYQDVNCTEVPVAIHADQLTPTWRVYSTGSNVFQTRAGCLIGAEHVNNSYECDIPIGAGICASYQTQTNSPRRARSVASQSIIAYTMSLGAENSVAYSNNSIAIPTNFTISVTTEILPVSMTKTSVDCTMYICGDSTECSNLLLQYGSFCTQLNRALTGIAVEQDKNTQEVFAQVKQIYKTPPIKDFGGFNFSQILPDPSKPSKRSFIEDLLFNKVTLADAGFIKQYGDCLGDIAARDLICAQKFNGLTVLPPLLTDEMIAQYTSALLAGTITSGWTFGAGAALQIPFAMQMAYRFNGCGVTQNVLYENQKLIANQFNSAIGKIQDSLSSTASALGKLQDVVNQNAQALNTLVKQLSSNFGAISSVLNDILSRLDKVEAEVQIDRLITGRLQSLQTYVTQQLIRAAEIRASANLAATKMSECVLGQSKRVDFCGKGCHLMSFPQSAPHGVVFLHVTYVPAQEKNFTTAPAICHDGKAHFPREGVFVSNGTHWFVTQRNFYEPQIITTDNTFVSGNCDVVIGIVNNTVYDPLQPELDSFKEELDKYFKNHTSPDVDLGDISGINASVVNIQKEIDRLNEVAKNLNESLIDLQELGKYEQYIKGGGGSDIIKLLNEQVNKEMQSSNLYMSMSSWCYTHSLDGAGLFLFDHAAEEYEHAKKLIIFLNENNVPVQLTSISAPEHKFEGLTQIFQKAYEHEQHISESINNIVDHAIKSKDHATFNFLQWYVAEQHEEEVLFKDILDKIELIGNENHGLYLADQYVKGIAKSRKS

SEQ ID NO: 5233 - protein, 1375 aa, Artificial Sequence
  SARS-CoV-2/bat/Yunnan/RaTG13/2013__EPI_ISL_402131 spike protein (1-1207)(I905C_Y1043C) Ferritin construct
MFVFLVLLPLVSSQCVNLTTRTQLPPAYTNSSTRGVYYPDKVFRSSVLHLTQDLFLPFFSNVTWFHAIHVSGTNGIKRFDNPVLPFNDGVYFASTEKSNIIRGWIFGTTLDSKTQSLLIVNNATNVVIKVCEFQFCNDPFLGVYYHKNNKSWMESEFRVYSSANNCTFEYVSQPFLMDLEGKQGNFKNLREFVFKNIDGYFKIYSKHTPINLVRDLPPGFSALEPLVDLPIGINITRFQTLLALHRSYLTPGDSSSGWTAGAAAYYVGYLQPRTFLLKYNENGTITDAVDCALDPLSETKCTLKSFTVEKGIYQTSNFRVQPTDSIVRFPNITNLCPFGEVFNATTFASVYAWNRKRISNCVADYSVLYNSTSFSTFKCYGVSPTKLNDLCFTNVYADSFVITGDEVRQIAPGQTGKIADYNYKLPDDFTGCVIAWNSKHIDAKEGGNFNYLYRLFRKANLKPFERDISTEIYQAGSKPCNGQTGLNCYYPLYRYGFYPTDGVGHQPYRVVVLSFELLNAPATVCGPKKSTNLVKNKCVNFNFNGLTGTGVLTESNKKFLPFQQFGRDIADTTDAVRDPQTLEILDITPCSFGGVSVITPGTNASNQVAVLYQDVNCTEVPVAIHADQLTPTWRVYSTGSNVFQTRAGCLIGAEHVNNSYECDIPIGAGICASYQTQTNSRSVASQSIIAYTMSLGAENSVAYSNNSIAIPTNFTISVTTEILPVSMTKTSVDCTMYICGDSTECSNLLLQYGSFCTQLNRALTGIAVEQDKNTQEVFAQVKQIYKTPPIKDFGGFNFSQILPDPSKPSKRSFIEDLLFNKVTLADAGFIKQYGDCLGDIAARDLICAQKFNGLTVLPPLLTDEMIAQYTSALLAGTITSGWTFGAGAALQIPFAMQMAYRFNGCGVTQNVLYENQKLIANQFNSAIGKIQDSLSSTASALGKLQDVVNQNAQALNTLVKQLSSNFGAISSVLNDILSRLDKVEAEVQIDRLITGRLQSLQTYVTQQLIRAAEIRASANLAATKMSECVLGQSKRVDFCGKGCHLMSFPQSAPHGVVFLHVTYVPAQEKNFTTAPAICHDGKAHFPREGVFVSNGTHWFVTQRNFYEPQIITTDNTFVSGSCDVVIGIVNNTVYDPLQPELDSFKEELDKYFKNHTSPDVDLGDISGINASVVNIQKEIDRLNEVAKNLNESLIDLQELGKYEQYIKGGGGSDIIKLLNEQVNKEMQSSNLYMSMSSWCYTHSLDGAGLFLFDHAAEEYEHAKKLIIFLNENNVPVQLTSISAPEHKFEGLTQIFQKAYEHEQHISESINNIVDHAIKSKDHATFNFLQWYVAEQHEEEVLFKDILDKIELIGNENHGLYLADQYVKGIAKSRKS

SEQ ID NO: 5234 - protein, 1379 aa, Artificial Sequence
  SARS-CoV-2/Wuhan/HBCDC-HB-01/2019__EPI_ISL_402132 spike protein (1-1211)(I909C_Y1047C) Ferritin construct
MFVFLVLLPLVSSQCVNLTTRTQLPPAYTNSITRGVYYPDKVFRSSVLHSTQDLFLPFFSNVTWFHAIHVSGTNGTKRFDNPVLPFNDGVYFASTEKSNIIRGWIFGTTLDSKTQSLLIVNNATNVVIKVCEFQFCNDPFLGVYYHKNNKSWMESEFRVYSSANNCTFEYVSQPFLMDLEGKQGNFKNLREFVFKNIDGYFKIYSKHTPINLVRDLPQGFSALEPLVDLPIGINITRFQTLLALHRSYLTPGDSSSGWTAGAAAYYVGYLQPRTFLLKYNENGTITDAVDCALDPLSETKCTLKSFTVEKGIYQTSNFRVQPTESIVRFPNITNLCPFGEVFNATRFASVYAWNRKRISNCVADYSVLYNSASFSTFKCYGVSPTKLNDLCFTNVYADSFVIRGDEVRQIAPGQTGKIADYNYKLPDDFTGCVIAWNSNNLDSKVGGNYNYLYRLFRKSNLKPFERDISTEIYQAGSTPCNGVEGFNCYFPLQSYGFQPTNGVGYQPYRVVVLSFELLHAPATVCGPKKSTNLVKNKCVNFNFNGLTGTGVLTESNKKFLPFQQFGRDIADTTDAVRDPQTLEILDITPCSFGGVSVITPGTNTSNQVAVLYQDVNCTEVPVAIHADQLTPTWRVYSTGSNVFQTRAGCLIGAEHVNNSYECDIPIGAGICASYQTQTNSPRRARSVASQSIIAYTMSLGAENSVAYSNNSIAIPTNFTISVTTEILPVSMTKTSVDCTMYICGDSTECSNLLLQYGSFCTQLNRALTGIAVEQDKNTQEVFAQVKQIYKTPPIKDFGGFNFSQILPDPSKPSKRSFIEDLLFNKVTLADAGFIKQYGDCLGDIAARDLICAQKFNGLTVLPPLLTDEMIAQYTSALLAGTITSGWTFGAGAALQIPFAMQMAYRFNGCGVTQNVLYENQKLIANQFNSAIGKIQDSLSSTASALGKLQDVVNQNAQALNTLVKQLSSNFGAISSVLNDILSRLDKVEAEVQIDRLITGRLQSLQTYVTQQLIRAAEIRASANLAATKMSECVLGQSKRVDFCGKGCHLMSFPQSAPHGVVFLHVTYVPAQEKNFTTAPAICHDGKAHFPREGVFVSNGTHWFVTQRNFYEPQIITTDNTFVSGNCDVVIGIVNNTVYDPLQPELDSFKEELDKYFKNHTSPDVDLGDISGINASVVNIQKEIDRLNEVAKNLNESLIDLQELGKYEQYIKGGGGSDIIKLLNEQVNKEMQSSNLYMSMSSWCYTHSLDGAGLFLFDHAAEEYEHAKKLIIFLNENNVPVQLTSISAPEHKFEGLTQIFQKAYEHEQHISESINNIVDHAIKSKDHATFNFLQWYVAEQHEEEVLFKDILDKIELIGNENHGLYLADQYVKGIAKSRKS

SEQ ID NO: 5235 - protein, 1379 aa, Artificial Sequence
  SARS-CoV-2/Guangdong/20SF028/2020__EPI_ISL_403936 spike protein (1-1211)(I909C_Y1047C) Ferritin construct
MFVFLVLLPLVSSQCVNLTTRTQLPPAYTNSFTRGVYYPDKVFRSSVLYSTQDLFLPFFSNVTWFHAIHVSGTNGTKRFDNPVLPFNDGVYFASTEKSNIIRGWIFGTTLDSKTQSLLIVNNATNVVIKVCEFQFCNDPFLGVYYHKNNKSWMESEFRVYSSANNCTFEYVSQPFLMDLEGKQGNFKNLREFVFKNIDGYFKIYSKHTPINLVRDLPQGFSALEPLVDLPIGINITRFQTLLALHRSYLTPGDSSSGWTAGAAAYYVGYLQPRTFLLKYNENGTITDAVDCALDPLSETKCTLKSFTVEKGIYQTSNFRVQPTESIVRFPNITNLCPFGEVFNATRFASVYAWNRKRISNCVADYSVLYNSASFSTFKCYGVSPTKLNDLCFTNVYADSFVIRGDEVRQIAPGQTGKIADYNYKLPDDFTGCVIAWNSNNLDSKVGGNYNYLYRLFRKSNLKPFERDISTEIYQAGSTPCNGVEGFNCYFPLQSYGFQPTNGVGYQPYRVVVLSFELLHAPATVCGPKKSTNLVKNKCVNFNFNGLTGTGVLTESNKKFLPFQQFGRDIADTTDAVRDPQTLEILDITPCSFGGVSVITPGTNTSNQVAVLYQDVNCTEVPVAIHADQLTPTWRVYSTGSNVFQTRAGCLIGAEHVNNSYECDIPIGAGICASYQTQTNSPRRARSVASQSIIAYTMSLGAENSVAYSNNSIAIPTNFTISVTTEILPVSMTKTSVDCTMYICGDSTECSNLLLQYGSFCTQLNRALTGIAVEQDKNTQEVFAQVKQIYKTPPIKDFGGFNFSQILPDPSKPSKRSFIEDLLFNKVTLADAGFIKQYGDCLGDIAARDLICAQKFNGLTVLPPLLTDEMIAQYTSALLAGTITSGWTFGAGAALQIPFAMQMAYRFNGCGVTQNVLYENQKLIANQFNSAIGKIQDSLSSTASALGKLQDVVNQNAQALNTLVKQLSSNFGAISSVLNDILSRLDKVEAEVQIDRLITGRLQSLQTYVTQQLIRAAEIRASANLAATKMSECVLGQSKRVDFCGKGCHLMSFPQSAPHGVVFLHVTYVPAQEKNFTTAPAICHDGKAHFPREGVFVSNGTHWFVTQRNFYEPQIITTDNTFVSGNCDVVIGIVNNTVYDPLQPELDSFKEELDKYFKNHTSPDVDLGDISGINASVVNIQKEIDRLNEVAKNLNESLIDLQELGKYEQYIKGGGGSDIIKLLNEQVNKEMQSSNLYMSMSSWCYTHSLDGAGLFLFDHAAEEYEHAKKLIIFLNENNVPVQLTSISAPEHKFEGLTQIFQKAYEHEQHISESINNIVDHAIKSKDHATFNFLQWYVAEQHEEEVLFKDILDKIELIGNENHGLYLADQYVKGIAKSRKS

SEQ ID NO: 5236 - protein, 1379 aa, Artificial Sequence
  SARS-CoV-2/Shenzhen/SZTH-001/2020__EPI_ISL_406592 spike protein (1-1211)(I909C_Y1047C) Ferritin construct
MFVFLVLLPLVSSQCVNLTTRTQLPPAYTNSFTRGVYYPDKVFRSSVLHSTQDLFLPFFSNVTWFHAIHVSGTNGTKRFDNPVLPFNDGVYFASTEKSNIIRGWIFGTTLDSKTQSLLIVNNATNVVIKVCEFQFCNDPFLGVYYHKNNKSWMESEFRVYSSANNCTFEYVSQPFLMDLEGKQGNFKNLREFVFKNIDGYFKIYSKHTPINLVRDLPQGFSALEPLVDLPIGINITRFQTLLALHRSYLTPGDSSSGWTAGAAAYYVGYLQPRTFLLKYNENGTITDAVDCALDPLSETKCTLKSFTVEKGIYQTSNFRVQPTESIVRFPNITNLCPFGEVFNATRFASVYAWNRKRISNCVADYSVLYNSASFSTFKCYGVSPTKLNDLCFTNVYADSFVIRGDEVRQIAPGQTGKIADYNYKLPDDFTGCVIAWNSNNLDSKVGGNYNYLYRLFRKSNLKPFERDISTEIYQAGSTPCNGVEGFNCYFPLQSYGFQPTNGVGYQPYRVVVLSFELLHAPATVCGPKKSTNLVKNKCVNFNFNGLTGTGVLTESNKKFLPFQQFGRDIADTTDAVRDPQTLEILDITPCSFGGVSVITPGTNTSNQVAVLYQDVNCTEVPVAIHADQLTPTWRVYSTGSNVFQTRAGCLIGAEHVNNSYECDIPIGAGICASYQTQTNSPRRARSVASQSIIAYTMSLGAENSVAYSNNSIAIPTNFTISVTTEILPVSMTKTSVDCTMYICGDSTECSNLLLQYGSFCTQLNRALTGIAVEQDKNTQEVFAQVKQIYKTPPIKDFGGFNFSQILPDPSKPSKRSFIEDLLFNKVTLADAGFIKQYGDCLGDIAARDLICAQKFNGLTVLPPLLTDEMIAQYTSALLAGTITSGWTFGAGAALQIPFAMQMAYRFNGCGVTQNVLYENQKLIANQFNSAIGKIQDSLSSTASALGKLQDVVNQNAQALNTLVKQLSSNFGAISSVLNDILSRLDKVEAEVQIDRLITGRLQSLQTYVTQQLIRAAEIRASANLAATKMSECVLGQSKRVDFCGKGCHLMSFPQSAPHGVVFLHVTYVPAQEKNFTTAPAICHDGKAHFPREGVFVSNGTHWFVTQRNFYEPQIITTDNTFVSGNCDVLIGIVNNTVYDPLQPELDSFKEELDKYFKNHTSPDVDLGDISGINASVVNIQKEIDRLNEVAKNLNESLIDLQELGKYEQYIKGGGGSDIIKLLNEQVNKEMQSSNLYMSMSSWCYTHSLDGAGLFLFDHAAEEYEHAKKLIIFLNENNVPVQLTSISAPEHKFEGLTQIFQKAYEHEQHISESINNIVDHAIKSKDHATFNFLQWYVAEQHEEEVLFKDILDKIELIGNENHGLYLADQYVKGIAKSRKS

SEQ ID NO: 5237 - protein, 1379 aa, Artificial Sequence
  SARS-CoV-2/Shenzhen/SZTH-004/2020__EPI_ISL_406595 spike protein (1-1211)(I909C_Y1047C) Ferritin construct
MFVFLVLLPLVSSQCVNLTTRTQLPPAYTNSFTRGVYYPDKVFRSSVLHSTQDLFLPFFSNVTWFHAIHVSGTNGTKRFDNPVLPFNDGVYFASTEKSNIIRGWIFGTTLDSKTQSLLIVNNATNVVIKVCEFQFCNDPFLGVYYHKNNKSWMESEFRVYSSANNCTFEYVSQPFLMDLEGKQGNFKNLREFVFKNIDGYFKIYSKHTPINLVRDLPQGFSALEPLVDLPIGINITRFQTLLALHRSYLTPGDSSSGWTAGAAAYYVGYLQPRTFLLKYNENGTITDAVDCALDPLSETKCTLKSFTVEKGIYQTSNFRVQPTESIVRFPNITNLCPFGEVFNATRFASVYAWDRKRISNCVAYYSVLYNSASFSTFKCYGVSPTKLNDLCFTNVYADSFVIRGDEVRQIAPGQTGKIADYNYKLPDDFTGCVIAWNSNNLDSKVGGNYNYLYRLFRKSNLKPFERDISTEIYQAGSTPCNGVEGFNCYFPLQSYGFQPTNGVGYQPYRVVVLSFELLHAPATVCGPKKSTNLVKNKCVNFNFNGLTGTGVLTESNKKFLPFQQFGRDIADTTDAVRDPQTLEILDITPCSFGGVSVITPGTNTSNQVAVLYQDVNCTEVPVAIHADQLTPTWRVYSTGSNVFQTRAGCLIGAEHVNNSYECDIPIGAGICASYQTQTNSPRRARSVASQSIIAYTMSLGAENSVAYSNNSIAIPTNFTISVTTEILPVSMTKTSVDCTMYICGDSTECSNLLLQYGSFCTQLNRALTGIAVEQDKNTQEVFAQVKQIYKTPPIKDFGGFNFSQILPDPSKPSKRSFIEDLLFNKVTLADAGFIKQYGDCLGDIAARDLICAQKFNGLTVLPPLLTDEMIAQYTSALLAGTITSGWTFGAGAALQIPFAMQMAYRFNGCGVTQNVLYENQKLIANQFNSAIGKIQDSLSSTASALGKLQDVVNQNAQALNTLVKQLSSNFGAISSVLNDILSRLDKVEAEVQIDRLITGRLQSLQTYVTQQLIRAAEIRASANLAATKMSECVLGQSKRVDFCGKGCHLMSFPQSAPHGVVFLHVTYVPAQEKNFTTAPAICHDGKAHFPREGVFVSNGTHWFVTQRNFYEPQIITTDNTFVSGNCDVVIGIVNNTVYDPLQPELDSFKEELDKYFKNHTSPDVDLGDISGINASVVNIQKEIDRLNEVAKNLNESLIDLQELGKYEQYIKGGGGSDIIKLLNEQVNKEMQSSNLYMSMSSWCYTHSLDGAGLFLFDHAAEEYEHAKKLIIFLNENNVPVQLTSISAPEHKFEGLTQIFQKAYEHEQHISESINNIVDHAIKSKDHATFNFLQWYVAEQHEEEVLFKDILDKIELIGNENHGLYLADQYVKGIAKSRKS

SEQ ID NO: 5238 - protein, 1379 aa, Artificial Sequence
  SARS-CoV-2/France/IDF0372/2020__EPI_ISL_406596 spike protein (1-1211)(I909C_Y1047C) Ferritin construct
MFVFLVLLPLVSSQCVNLTTRTQLPPAYTNSFTRGVYYPDKVFRSSVLHSTQDLFLPFFSNVTWFHAIHVSGTNGTKRFDNPVLPFNDGVYFASTEKSNIIRGWIFGTTLDSKTQSLLIVNNATNVVIKVCEFQFCNDPFLGVYYHKNNKSWMESEFRVYSSANNCTFEYVSQPFLMDLEGKQGNFKNLREFVFKNIDGYFKIYSKHTPINLVRDLPQGFSALEPLVDLPIGINITRFQTLLALHRSYLTPGDSSSGWTAGAAAYYVGYLQPRTFLLKYNENGTITDAVDCALDPLSETKCTLKSFTVEKGIYQTSNFRVQPTESIVRFPNITNLCPFGEVFNATRFASVYAWNRKRISNCVADYSFLYNSASFSTFKCYGVSPTKLNDLCFTNVYADSFVIRGDEVRQIAPGQTGKIADYNYKLPDDFTGCVIAWNSNNLDSKVGGNYNYLYRLFRKSNLKPFERDISTEIYQAGSTPCNGVEGFNCYFPLQSYGFQPTNGVGYQPYRVVVLSFELLHAPATVCGPKKSTNLVKNKCVNFNFNGLTGTGVLTESNKKFLPFQQFGRDIADTTDAVRDPQTLEILDITPCSFGGVSVITPGTNTSNQVAVLYQDVNCTEVPVAIHADQLTPTWRVYSTGSNVFQTRAGCLIGAEHVNNSYECDIPIGAGICASYQTQTNSPRRARSVASQSIIAYTMSLGAENSVAYSNNSIAIPTNFTISVTTEILPVSMTKTSVDCTMYICGDSTECSNLLLQYGSFCTQLNRALTGIAVEQDKNTQEVFAQVKQIYKTPPIKDFGGFNFSQILPDPSKPSKRSFIEDLLFNKVTLADAGFIKQYGDCLGDIAARDLICAQKFNGLTVLPPLLTDEMIAQYTSALLAGTITSGWTFGAGAALQIPFAMQMAYRFNGCGVTQNVLYENQKLIANQFNSAIGKIQDSLSSTASALGKLQDVVNQNAQALNTLVKQLSSNFGAISSVLNDILSRLDKVEAEVQIDRLITGRLQSLQTYVTQQLIRAAEIRASANLAATKMSECVLGQSKRVDFCGKGCHLMSFPQSAPHGVVFLHVTYVPAQEKNFTTAPAICHDGKAHFPREGVFVSNGTHWFVTQRNFYEPQIITTDNTFVSGNCDVVIGIVNNTVYDPLQPELDSFKEELDKYFKNHTSPDVDLGDISGINASVVNIQKEIDRLNEVAKNLNESLIDLQELGKYEQYIKGGGGSDIIKLLNEQVNKEMQSSNLYMSMSSWCYTHSLDGAGLFLFDHAAEEYEHAKKLIIFLNENNVPVQLTSISAPEHKFEGLTQIFQKAYEHEQHISESINNIVDHAIKSKDHATFNFLQWYVAEQHEEEVLFKDILDKIELIGNENHGLYLADQYVKGIAKSRKS

SEQ ID NO: 5239 - protein, 1379 aa, Artificial Sequence
  SARS-CoV-2/Australia/VIC01/2020__EPI_ISL_406844 spike protein (1-1211)(I909C_Y1047C) Ferritin construct
MFVFLVLLPLVSSQCVNLTTRTQLPPAYTNSFTRGVYYPDKVFRSSVLHSTQDLFLPFFSNVTWFHAIHVSGTNGTKRFDNPVLPFNDGVYFASTEKSNIIRGWIFGTTLDSKTQSLLIVNNATNVVIKVCEFQFCNDPFLGVYYHKNNKSWMESEFRVYSSANNCTFEYVSQPFLMDLEGKQGNFKNLREFVFKNIDGYFKIYSKHTPINLVRDLPQGFSALEPLVDLPIGINITRFQTLLALHRRYLTPGDSSSGWTAGAAAYYVGYLQPRTFLLKYNENGTITDAVDCALDPLSETKCTLKSFTVEKGIYQTSNFRVQPTESIVRFPNITNLCPFGEVFNATRFASVYAWNRKRISNCVADYSVLYNSASFSTFKCYGVSPTKLNDLCFTNVYADSFVIRGDEVRQIAPGQTGKIADYNYKLPDDFTGCVIAWNSNNLDSKVGGNYNYLYRLFRKSNLKPFERDISTEIYQAGSTPCNGVEGFNCYFPLQSYGFQPTNGVGYQPYRVVVLSFELLHAPATVCGPKKSTNLVKNKCVNFNFNGLTGTGVLTESNKKFLPFQQFGRDIADTTDAVRDPQTLEILDITPCSFGGVSVITPGTNTSNQVAVLYQDVNCTEVPVAIHADQLTPTWRVYSTGSNVFQTRAGCLIGAEHVNNSYECDIPIGAGICASYQTQTNSPRRARSVASQSIIAYTMSLGAENSVAYSNNSIAIPTNFTISVTTEILPVSMTKTSVDCTMYICGDSTECSNLLLQYGSFCTQLNRALTGIAVEQDKNTQEVFAQVKQIYKTPPIKDFGGFNFSQILPDPSKPSKRSFIEDLLFNKVTLADAGFIKQYGDCLGDIAARDLICAQKFNGLTVLPPLLTDEMIAQYTSALLAGTITSGWTFGAGAALQIPFAMQMAYRFNGCGVTQNVLYENQKLIANQFNSAIGKIQDSLSSTASALGKLQDVVNQNAQALNTLVKQLSSNFGAISSVLNDILSRLDKVEAEVQIDRLITGRLQSLQTYVTQQLIRAAEIRASANLAATKMSECVLGQSKRVDFCGKGCHLMSFPQSAPHGVVFLHVTYVPAQEKNFTTAPAICHDGKAHFPREGVFVSNGTHWFVTQRNFYEPQIITTDNTFVSGNCDVVIGIVNNTVYDPLQPELDSFKEELDKYFKNHTSPDVDLGDISGINASVVNIQKEIDRLNEVAKNLNESLIDLQELGKYEQYIKGGGGSDIIKLLNEQVNKEMQSSNLYMSMSSWCYTHSLDGAGLFLFDHAAEEYEHAKKLIIFLNENNVPVQLTSISAPEHKFEGLTQIFQKAYEHEQHISESINNIVDHAIKSKDHATFNFLQWYVAEQHEEEVLFKDILDKIELIGNENHGLYLADQYVKGIAKSRKS

SEQ ID NO: 5240 - protein, 1379 aa, Artificial Sequence
  SARS-CoV-2/Germany/BavPat1/2020__EPI_ISL_406862 spike protein (1-1211)(I909C_Y1047C) Ferritin construct
MFVFLVLLPLVSSQCVNLTTRTQLPPAYTNSFTRGVYYPDKVFRSSVLHSTQDLFLPFFSNVTWFHAIHVSGTNGTKRFDNPVLPFNDGVYFASTEKSNIIRGWIFGTTLDSKTQSLLIVNNATNVVIKVCEFQFCNDPFLGVYYHKNNKSWMESEFRVYSSANNCTFEYVSQPFLMDLEGKQGNFKNLREFVFKNIDGYFKIYSKHTPINLVRDLPQGFSALEPLVDLPIGINITRFQTLLALHRSYLTPGDSSSGWTAGAAAYYVGYLQPRTFLLKYNENGTITDAVDCALDPLSETKCTLKSFTVEKGIYQTSNFRVQPTESIVRFPNITNLCPFGEVFNATRFASVYAWNRKRISNCVADYSVLYNSASFSTFKCYGVSPTKLNDLCFTNVYADSFVIRGDEVRQIAPGQTGKIADYNYKLPDDFTGCVIAWNSNNLDSKVGGNYNYLYRLFRKSNLKPFERDISTEIYQAGSTPCNGVEGFNCYFPLQSYGFQPTNGVGYQPYRVVVLSFELLHAPATVCGPKKSTNLVKNKCVNFNFNGLTGTGVLTESNKKFLPFQQFGRDIADTTDAVRDPQTLEILDITPCSFGGVSVITPGTNTSNQVAVLYQGVNCTEVPVAIHADQLTPTWRVYSTGSNVFQTRAGCLIGAEHVNNSYECDIPIGAGICASYQTQTNSPRRARSVASQSIIAYTMSLGAENSVAYSNNSIAIPTNFTISVTTEILPVSMTKTSVDCTMYICGDSTECSNLLLQYGSFCTQLNRALTGIAVEQDKNTQEVFAQVKQIYKTPPIKDFGGFNFSQILPDPSKPSKRSFIEDLLFNKVTLADAGFIKQYGDCLGDIAARDLICAQKFNGLTVLPPLLTDEMIAQYTSALLAGTITSGWTFGAGAALQIPFAMQMAYRFNGCGVTQNVLYENQKLIANQFNSAIGKIQDSLSSTASALGKLQDVVNQNAQALNTLVKQLSSNFGAISSVLNDILSRLDKVEAEVQIDRLITGRLQSLQTYVTQQLIRAAEIRASANLAATKMSECVLGQSKRVDFCGKGCHLMSFPQSAPHGVVFLHVTYVPAQEKNFTTAPAICHDGKAHFPREGVFVSNGTHWFVTQRNFYEPQIITTDNTFVSGNCDVVIGIVNNTVYDPLQPELDSFKEELDKYFKNHTSPDVDLGDISGINASVVNIQKEIDRLNEVAKNLNESLIDLQELGKYEQYIKGGGGSDIIKLLNEQVNKEMQSSNLYMSMSSWCYTHSLDGAGLFLFDHAAEEYEHAKKLIIFLNENNVPVQLTSISAPEHKFEGLTQIFQKAYEHEQHISESINNIVDHAIKSKDHATFNFLQWYVAEQHEEEVLFKDILDKIELIGNENHGLYLADQYVKGIAKSRKS

SEQ ID NO: 5241 - protein, 1379 aa, Artificial Sequence
  SARS-CoV-2/Wuhan/HBCDC-HB-02/2020__EPI_ISL_412978 spike protein (1-1211)(I909C_Y1047C) Ferritin construct
MFVFLVLLPLVSSQCVNLTTRTQLPPAYTNSFTRGVYYPDKVFRSSVLHSTQDLFLPFFSNVTWFHAIHVSGTNGTKRFDNPVLPFNDGVYFASTEKSNIIRGWIFGTTLDSKTQSLLIVNNATNVVIKVCEFQFCNDPFLGVYYHKNNKSWMESEFRVYSSANNCTFEYVSQPFLMDLEGKQGNFKNLREFVFKNIDGYFKIYSKHTPINLVRDLPQGFSALEPLVDLPIGINITRFQTLLALHRSYLTPGDSSSGWTAGAAAYYVGYLQPRTFLLKYNENGTITDAVDCALDPLSETKCTLKSFTVEKGIYQTSNFRVQPTESIVRFPNITNLCPFGEVFNATRFASVYAWNRKRISNCVADYSVLYNSASFSTFKCYGVSPTKLNDLCFTNVYADSFVIRGDEVRQIAPGQTGKIADYNYKLPDDFTGCVIAWNSNNLDSKVGGNYNYLYRLFRKSNLKPFERDISTEIYQAGSTPCNGVEGFNCYFPLQSYGFQPTNGVGYQPYRVVVLSFELLHAPATVCGPKKSTNLVKNKCVNFNFNGLTGTGVLTESNKKFLPFQQFGRDIADTTDAVRDPQTLEILDITPCSFGGVSVITPGTNTSNQVAVLYQDVNCTEVPVAIHADQLTPTWRVYSTGSNVFQTRAGCLIGAEHVNNSYECDIPIGAGICASYQTQTNSPRRARSVASQSIIAYTMSLGAENSVAYSNNSIAIPTNFTISVTTEILPVSMTKTSVDCTMYICGDSTECSNFLLQYGSFCTQLNRALTGIAVEQDKNTQEVFAQVKQIYKTPPIKDFGGFNFSQILPDPSKPSKRSFIEDLLFNKVTLADAGFIKQYGDCLGDIAARDLICAQKFNGLTVLPPLLTDEMIAQYTSALLAGTITSGWTFGAGAALQIPFAMQMAYRFNGCGVTQNVLYENQKLIANQFNSAIGKIQDSLSSTASALGKLQDVVNQNAQALNTLVKQLSSNFGAISSVLNDILSRLDKVEAEVQIDRLITGRLQSLQTYVTQQLIRAAEIRASANLAATKMSECVLGQSKRVDFCGKGCHLMSFPQSAPHGVVFLHVTYVPAQEKNFTTAPAICHDGKAHFPREGVFVSNGTHWFVTQRNFYEPQIITTDNTFVSGNCDVVIGIVNNTVYDPLQPELDSFKEELDKYFKNHTSPDVDLGDISGINASVVNIQKEIDRLNEVAKNLNESLIDLQELGKYEQYIKGGGGSDIIKLLNEQVNKEMQSSNLYMSMSSWCYTHSLDGAGLFLFDHAAEEYEHAKKLIIFLNENNVPVQLTSISAPEHKFEGLTQIFQKAYEHEQHISESINNIVDHAIKSKDHATFNFLQWYVAEQHEEEVLFKDILDKIELIGNENHGLYLADQYVKGIAKSRKS

SEQ ID NO: 5242 - protein, 1379 aa, Artificial Sequence
  SARS-CoV-2/Australia/QLD02/2020__EPI_ISL_407896 spike protein (1-1211)(I909C_Y1047C) Ferritin construct
MFVFLVLLPLVSSQCVNLTTRTQLPPAYTNSFTRGVYYPDKVFRSSVLHSTQDLFLPFFSNVTWFHAIHVSGTNGTKRFDNPVLPFNDGVYFASTEKSNIIRGWIFGTTLDSKTQSLLIVNNATNVVIKVCEFQFCNDPFLGVYYHKNNKSWMESEFRVYSSANNCTFEYVSQPFLMDLEGKQGNFKNLREFVFKNIDGYFKIYSKHTPINLVRDLPQGFSALEPLVDLPIGINITRFQTLLALHRSYLTPGDSSSGWTAGAAAYYVGYLQPRTFLLKYNENGTITDAVDCALDPLSETKCTLKSFTVEKGIYQTSNFRVQPTESIVRFPNITNLCPFGEVFNATRFASVYAWNRKRISNCVADYSVLYNSASFSTFKCYGVSPTKLNDLCFTNVYADSFVIRGDEVRQIAPGQTGKIADYNYKLPDDFTGCVIAWNSNNLDSKVGGNYNYLYRLFRKSNLKPFERDISTEIYQAGSTPCNGVEGFNCYFPLQSYGFQPTNGVGYQPYRVVVLSFELLHAPATVCGPKKSTNLVKNKCVNFNFNGLTGTGVLTESNKKFLPFQQFGRDIADTTDAVRDPQTLEILDITPCSFGGVSVITPGTNTSNQVAVLYQDVNCTEVPVAIHADQLTPTWRVYSTGSNVFQTRAGCLIGAEHVNNSYECDIPIGAGICASYQTQTNSPRRARSVASQSIIAYTMSLGAENSVAYSNNSIAIPTNFTISVTTEILPVSMTKTSVDCTMYICGDSTECSNLLLQYGSFCTQLNRALTGIAVEQDKNTQEVFAQVKQIYKTPPIKDFGGFNFSQILPDPSKPSKRSFIEDLLFNKVTLADAGFIKQYGDCLGDIAARDLICAQKFNGLTVLPPLLTDEMIAQYTSALLAGTITSGWTFGAGAALQIPFAMQMAYRFNGCGVTQNVLYENQKLIANQFNSAIGKIQDSLSSTASALGKLQDVVNQNAQALNTLVKQLSSNFGAISSVLNDILSRLDKVEAEVQIDRLITGRLQSLQTYVTQQLIRAAEIRASANLAATKMSECVLGQSKRVDFCGKGCHLMSFPQSAPHGVVFLHVTYVPAQEKNFTTAPAICHDGKAHFPREGVFVSNGTHWFVTQRNFYEPQIITTDNTFVSGNCDVVIGIVNNTVYDPLQLELDSFKEELDKYFKNHTSPDVDLGDISGINASVVNIQKEIDRLNEVAKNLNESLIDLQELGKYEQYIKGGGGSDIIKLLNEQVNKEMQSSNLYMSMSSWCYTHSLDGAGLFLFDHAAEEYEHAKKLIIFLNENNVPVQLTSISAPEHKFEGLTQIFQKAYEHEQHISESINNIVDHAIKSKDHATFNFLQWYVAEQHEEEVLFKDILDKIELIGNENHGLYLADQYVKGIAKSRKS

SEQ ID NO: 5243 - protein, 1379 aa, Artificial Sequence
  SARS-CoV-2/India/1-31/2020__EPI_ISL_413523 spike protein (1-1211)(I909C_Y1047C) Ferritin construct
MFVFLVLLPLVSSQCVNLTTRTQLPPAYTNSFTRGVYYPDKVFRSSVLHSTQDLFLPFFSNVTWFHAIHVSGTNGTKRFDNPVLPFNDGVYFASTEKSNIIRGWIFGTTLDSKTQSLLIVNNATNVVIKVCEFQFCNDPFLGVYYHKNNKSWMESEFRVYSSANNCTFEYVSQPFLMDLEGKQGNFKNLREFVFKNIDGYFKIYSKHTPINLVRDLPQGFSALEPLVDLPIGINITRFQTLLALHRSYLTPGDSSSGWTAGAAAYYVGYLQPRTFLLKYNENGTITDAVDCALDPLSETKCTLKSFTVEKGIYQTSNFRVQPTESIVRFPNITNLCPFGEVFNATRFASVYAWNRKRISNCVADYSVLYNSASFSTFKCYGVSPTKLNDLCFTNVYADSFVIRGDEVRQIAPGQTGKIADYNYKLPDDFTGCVIAWNSNNLDSKVGGNYNYLYRLFRKSNLKPFERDISTEIYQAGSTPCNGVEGFNCYFPLQSYGFQPTNGVGYQPYRVVVLSFELLHAPATVCGPKKSTNLVKNKCVNFNFNGLTGTGVLTESNKKFLPFQQFGRDIADTTDAVRDPQTLEILDITPCSFGGVSVITPGTNTSNQVAVLYQDVNCTEVPVAIHADQLTPTWRVYSTGSNVFQTRAGCLIGAEHVNNSYECDIPIGAGICASYQTQTNSPRRARSVASQSIIAYTMSLGAENSVAYSNNSIAIPTNFTISVTTEILPVSMTKTSVDCTMYICGDSTECSNLLLQYGSFCTQLNRALTGIAVEQDKNTQEVFAQVKQIYKTPPIKDFGGFNFSQILPDPSKPSKRSFIEDLLFNKVTLADAGFIKQYGDCLGDIAARDLICAQKFNGLTVLPPLLTDEMIAQYTSALLAGTITSGWTFGAGAALQIPFAMQMAYRFNGCGVTQNVLYENQKLIANQFNSVIGKIQDSLSSTASALGKLQDVVNQNAQALNTLVKQLSSNFGAISSVLNDILSRLDKVEAEVQIDRLITGRLQSLQTYVTQQLIRAAEIRASANLAATKMSECVLGQSKRVDFCGKGCHLMSFPQSAPHGVVFLHVTYVPAQEKNFTTAPAICHDGKAHFPREGVFVSNGTHWFVTQRNFYEPQIITTDNTFVSGNCDVVIGIVNNTVYDPLQPELDSFKEELDKYFKNHTSPDVDLGDISGINASVVNIQKEIDRLNEVAKNLNESLIDLQELGKYEQYIKGGGGSDIIKLLNEQVNKEMQSSNLYMSMSSWCYTHSLDGAGLFLFDHAAEEYEHAKKLIIFLNENNVPVQLTSISAPEHKFEGLTQIFQKAYEHEQHISESINNIVDHAIKSKDHATFNFLQWYVAEQHEEEVLFKDILDKIELIGNENHGLYLADQYVKGIAKSRKS

SEQ ID NO: 5244 - protein, 1379 aa, Artificial Sequence
  SARS-CoV-2/Guangdong/GD2020087-P0008/2020__EPI_ISL_413863 spike protein (1-1211)(I909C_Y1047C) Ferritin construct
MFVFLVLLPLVSSQCVNLTTRTQLPPAYTNSFTRGVYYPDKVFRSSVLHSTQDLFLPFFSNVTWFHAIHVSGTNGTKRFDNPVLPFNDGVYFASTEKSNIIRGWIFGTTLDSKTQSLLIVNNATNVVIKVCEFQFCNDPFLGVYYHKNNKSWMESEFRVYSSANNCTFEYVSQPFLMDLEGKQGNFKNLREFVFKNIDGYFKIYSKHTPINLVRDLPQGFSALEPLVDLPIGINITRFQTLLALHRSYLTPGDSSSGWTAGAAAYYVGYLQPRTFLLKYNENGTITDAVDCALDPLSETKCTLKSFTVEKGIYQTSNFRVQPTESIVRFPNITNLCPFGEVFNATRFASVYAWNRKRISNCVADYSVLYNSASFSTFKCYGVSPTKLNDLCFTNVYADSFVIRGDEVREIAPGQTGKIADYNYKLPDDFTGCVIAWNSNNLDSKVGGNYNYLYRLFRKSNLKPFERDISTEIYQAGSTPCNGVEGFNCYFPLQSYGFQPTNGVGYQPYRVVVLSFELLHAPATVCGPKKSTNLVKNKCVNFNFNGLTGTGVLTESNKKFLPFQQFGRDIADTTDAVRDPQTLEILDITPCSFGGVSVITPGTNTSNQVAVLYQDVNCTEVPVAIHADQLTPTWRVYSTGSNVFQTRAGCLIGAEHVNNSYECDIPIGAGICASYQTQTNSPRRARSVASQSIIAYTMSLGAENSVAYSNNSIAIPTNFTISVTTEILPVSMTKTSVDCTMYICGDSTECSNLLLQYGSFCTQLNRALTGIAVEQDKNTQEVFAQVKQIYKTPPIKDFGGFNFSQILPDPSKPSKRSFIEDLLFNKVTLADAGFIKQYGDCLGDIAARDLICAQKFNGLTVLPPLLTDEMIAQYTSALLAGTITSGWTFGAGAALQIPFAMQMAYRFNGCGVTQNVLYENQKLIANQFNSAIGKIQDSLSSTASALGKLQDVVNQNAQALNTLVKQLSSNFGAISSVLNDILSRLDKVEAEVQIDRLITGRLQSLQTYVTQQLIRAAEIRASANLAATKMSECVLGQSKRVDFCGKGCHLMSFPQSAPHGVVFLHVTYVPAQEKNFTTAPAICHDGKAHFPREGVFVSNGTHWFVTQRNFYEPQIITTDNTFVSGNCDVVIGIVNNTVYDPLQPELDSFKEELDKYFKNHTSPDVDLGDISGINASVVNIQKEIDRLNEVAKNLNESLIDLQELGKYEQYIKGGGGSDIIKLLNEQVNKEMQSSNLYMSMSSWCYTHSLDGAGLFLFDHAAEEYEHAKKLIIFLNENNVPVQLTSISAPEHKFEGLTQIFQKAYEHEQHISESINNIVDHAIKSKDHATFNFLQWYVAEQHEEEVLFKDILDKIELIGNENHGLYLADQYVKGIAKSRKS

SEQ ID NO: 5245 - protein, 1379 aa, Artificial Sequence
  SARS-CoV-2/Sweden/01/2020__EPI_ISL_411951 spike protein (1-1211)(I909C_Y1047C) Ferritin construct
MFVFLVLLPLVSSQCVNLTTRTQLPPAYTNSFTRGVYYPDKVFRSSVLHSTQDLFLPFFSNVTWFHAIHVSGTNGTKRFDNPVLPFNDGVYFASTEKSNIIRGWIFGTTLDSKTQSLLIVNNATNVVIKVCEFQFCNDPFLGVYYHKNNKSWMESEFRVYSSANNCTFEYVSQPFLMDLEGKQGNFKNLREFVFKNIDGYFKIYSKHTPINLVRDLPQGFSALEPLVDLPIGINITRFQTLLALHRSYLTPGDSSSGWTAGAAAYYVGYLQPRTFLLKYNENGTITDAVDCALDPLSETKCTLKSFTVEKGIYQTSNFRVQPTESIVRFPNITNLCPFGEVFNATRFASVYAWNRKRISNCVADYSVLYNSASFSTFKCYGVSPTKLNDLCFTNVYADSFVIRGDEVRQIAPGQTGKIADYNYKLPDDFTGCVIAWNSNNLDSKVGGNYNYLYRLFRKSNLKPFERDISTEIYQAGSTPCNGVEGFNCYFPLQSYGFQPTNGVGYQPYRVVVLSFELLHAPATVCGPKKSTNLVKNKCVNFNFNGLTGTGVLTESNKKFLPFQQFGRDIADTTDAVRDPQTLEILDITPCSFGGVSVITPGTNTSNQVAVLYQDVNCTEVPVAIHADQLTPTWRVYSTGSNVFQTRAGCLIGAEHVNNSYECDIPIGAGICASYQTQTNSPRRARSVASQSIIAYTMSLGAENSVAYSNNSIAIPTNFTISVTTEILPVSMTKTSVDCTMYICGDSTECSNLLLQYGSFCTQLNRALTGIAVEQDKNTQEVFAQVKQIYKTPPIKDCGGFNFSQILPDPSKPSKRSFIEDLLFNKVTLADAGFIKQYGDCLGDIAARDLICAQKFNGLTVLPPLLTDEMIAQYTSALLAGTITSGWTFGAGAALQIPFAMQMAYRFNGCGVTQNVLYENQKLIANQFNSAIGKIQDSLSSTASALGKLQDVVNQNAQALNTLVKQLSSNFGAISSVLNDILSRLDKVEAEVQIDRLITGRLQSLQTYVTQQLIRAAEIRASANLAATKMSECVLGQSKRVDFCGKGCHLMSFPQSAPHGVVFLHVTYVPAQEKNFTTAPAICHDGKAHFPREGVFVSNGTHWFVTQRNFYEPQIITTDNTFVSGNCDVVIGIVNNTVYDPLQPELDSFKEELDKYFKNHTSPDVDLGDISGINASVVNIQKEIDRLNEVAKNLNESLIDLQELGKYEQYIKGGGGSDIIKLLNEQVNKEMQSSNLYMSMSSWCYTHSLDGAGLFLFDHAAEEYEHAKKLIIFLNENNVPVQLTSISAPEHKFEGLTQIFQKAYEHEQHISESINNIVDHAIKSKDHATFNFLQWYVAEQHEEEVLFKDILDKIELIGNENHGLYLADQYVKGIAKSRKS

SEQ ID NO: 5246 - protein, 1379 aa, Artificial Sequence
  SARS-CoV-2/Tianmen/HBCDC-HB-07/2020__EPI_ISL_412983 spike protein (1-1211)(I909C_Y1047C) Ferritin construct
MFVFLVLLPLVSSQCVNLTTRTQLPPAYTNSFTRGVYYPDKVFRSSVLHSTQDLFLPFFSNVTWFHAIHVSGTNGTKRFDNPVLPFNDGVYFASTEKSNIIRGWIFGTTLDSKTQSLLIVNNATNVVIKVCEFQFCNDPFLGVYYHKNNKSWMESEFRVYSSANNCTFEYVSQPFLMDLEGKQGNFKNLREFVFKNIDGYFKIYSKHTPINLVRDLPQGFSALEPLVDLPIGINITRFQTLLALHRSYLTPGDSSSGWTAGAAAYYVGYLQPRTFLLKYNENGTITDAVDCALDPLSETKCTLKSFTVEKGIYQTSNFRVQPTESIVRFPNITNLCPFGEVFNATRFASVYAWNRKRISNCVADYSVLYNSASFSTFKCYGVSPTKLNDLCFTNVYADSFVIRGDEVRQIAPGQTGKIADYNYKLPDDFTGCVIAWNSNNLDSKVGGNYNYLYRLFRKSNLKPFERDISTEIYQAGSTPCNGVEGFNCYFPLQSYGFQPTNGVGYQPYRVVVLSFELLHAPATVCGPKKSTNLVKNKCVNFNFNGLTGTGVLTESNKKFLPFQQFGRDIADTTDAVRDPQTLEILDITPCSFGGVSVITPGTNTSNQVAVLYQDLNCTEVPVAIHADQLTPTWRVYSTGSNVFQTRAGCLIGAEHVNNSYECDIPIGAGICASYQTQTNSPRRARSVASQSIIAYTMSLGAENSVAYSNNSIAIPTNFTISVTTEILPVSMTKTSVDCTMYICGDSTECSNLLLQYGSFCTQLNRALTGIAVEQDKNTQEVFAQVKQIYKTPPIKDFGGFNFSQILPDPSKPSKRSFIEDLLFNKVTLADAGFIKQYGDCLGDIAARDLICAQKFNGLTVLPPLLTDEMIAQYTSALLAGTITSGWTFGAGAALQIPFAMQMAYRFNGCGVTQNVLYENQKLIANQFNSAIGKIQDSLSSTASALGKLQDVVNQNAQALNTLVKQLSSNFGAISSVLNDILSRLDKVEAEVQIDRLITGRLQSLQTYVTQQLIRAAEIRASANLAATKMSECVLGQSKRVDFCGKGCHLMSFPQSAPHGVVFLHVTYVPAQEKNFTTAPAICHDGKAHFPREGVFVSNGTHWFVTQRNFYEPQIITTDNTFVSGNCDVVIGIVNNTVYDPLQPELDSFKEELDKYFKNHTSPDVDLGDISGINASVVNIQKEIDRLNEVAKNLNESLIDLQELGKYEQYIKGGGGSDIIKLLNEQVNKEMQSSNLYMSMSSWCYTHSLDGAGLFLFDHAAEEYEHAKKLIIFLNENNVPVQLTSISAPEHKFEGLTQIFQKAYEHEQHISESINNIVDHAIKSKDHATFNFLQWYVAEQHEEEVLFKDILDKIELIGNENHGLYLADQYVKGIAKSRKS

SEQ ID NO: 5247 - protein, 1379 aa, Artificial Sequence
  SARS-CoV-2/Hong Kong/case42_VM20002493/2020__EPI_ISL_414527 spike protein (1-1211)(I909C_Y1047C) Ferritin construct
MFVFLVLLPLVSSQCVNLTTRTQLPPAYTNSFTRGVYYPDKVFRSSVLHSTQDLFLPFFSNVTWFHAIHVSGTNGTKRFDNPVLPFNDGVYFASTEKSNIIRGWIFGTTLDSKTQSLLIVNNATNVVIKVCEFQFCNDPFLGVYYHKNNKSWMESEFRVYSSANNCTFEYVSQPFLMDLEGKQGNFKNLREFVFKNIDGYFKIYSKHTPINLVRDLPQGFSALEPLVDLPIGINITRFQTLLALHRSYLTPGDSSSGWTAGAAAYYVGYLQPRTFLLKYNENGTITDAVDCALDPLSETKCTLKSFTVEKGIYQTSNFRVQPTESIVRFPNITNLCPFGEVFNATRFASVYAWNRKRISNCVADYSVLYNSASFSTFKCYGVSPTKLNDLCFTNVYADSFVIRGDEVRQIAPGQTGKIADYNYKLPDDFTGCVIAWNSNNLDSKVGGNYNYLYRLFRKSNLKPFERDISTEIYQAGSTPCNGVEGFNCYFPLQSYGFQPTNGVGYQPYRVVVLSFELLHAPATVCGPKKSTNLVKNKCVNFNFNGLTGTGVLTESNKKFLPFQQFGRDIADTTDAVRDPQTLEILDITPCSFGGVSVITPGTNTSNQVAVLYQDVNCTEVPVAIHADQLTPTWRVYSTGSNVFQTRAGCLIGAEHVNNSYECDIPIGAGICASYQTQTNSPRRARSVASQSIIAYTMSLGAENSVAYSNNSIAIPTNFAISVTTEILPVSMTKTSVDCTMYICGDSTECSNLLLQYGSFCTQLNRALTGIAVEQDKNTQEVFAQVKQIYKTPPIKDFGGFNFSQILPDPSKPSKRSFIEDLLFNKVTLADAGFIKQYGDCLGDIAARDLICAQKFNGLTVLPPLLTDEMIAQYTSALLAGTITSGWTFGAGAALQIPFAMQMAYRFNGCGVTQNVLYENQKLIANQFNSAIGKIQDSLSSTASALGKLQDVVNQNAQALNTLVKQLSSNFGAISSVLNDILSRLDKVEAEVQIDRLITGRLQSLQTYVTQQLIRAAEIRASANLAATKMSECVLGQSKRVDFCGKGCHLMSFPQSAPHGVVFLHVTYVPAQEKNFTTAPAICHDGKAHFPREGVFVSNGTHWFVTQRNFYEPQIITTDNTFVSGNCDVVIGIVNNTVYDPLQPELDSFKEELDKYFKNHTSPDVDLGDISGINASVVNIQKEIDRLNEVAKNLNESLIDLQELGKYEQYIKGGGGSDIIKLLNEQVNKEMQSSNLYMSMSSWCYTHSLDGAGLFLFDHAAEEYEHAKKLIIFLNENNVPVQLTSISAPEHKFEGLTQIFQKAYEHEQHISESINNIVDHAIKSKDHATFNFLQWYVAEQHEEEVLFKDILDKIELIGNENHGLYLADQYVKGIAKSRKS

SEQ ID NO: 5248 - protein, 1379 aa, Artificial Sequence
  SARS-CoV-2/USA/CruiseA-23/2020__EPI_ISL_414482 spike protein (1-1211)(I909C_Y1047C) Ferritin construct
MFVFLVLLPLVSSQCVNLTTRTQLPPAYTNSFTRGVYYPDKVFRSSVLHSTQDLFLPFFSNVTWFHAIHVSGTNGTKRFDNPVLPFNDGVYFASTEKSNIIRGWIFGTTLDSKTQSLLIVNNATNVVIKVCEFQFCNDPFLGVYYHKNNKSWMESEFRVYSSANNCTFEYVSQPFLMDLEVKQGNFKNLREFVFKNIDGYFKIYSKHTPINLVRDLPQGFSALEPLVDLPIGINITRFQTLLALHRSYLTPGDSSSGWTAGAAAYYVGYLQPRTFLLKYNENGTITDAVDCALDPLSETKCTLKSFTVEKGIYQTSNFRVQPTESIVRFPNITNLCPFGEVFNATRFASVYAWNRKRISNCVADYSVLYNSASFSTFKCYGVSPTKLNDLCFTNVYADSFVIRGDEVRQIAPGQTGKIADYNYKLPDDFTGCVIAWNSNNLDSKVGGNYNYLYRLFRKSNLKPFERDISTEIYQAGSTPCNGVEGFNCYFPLQSYGFQPTNGVGYQPYRVVVLSFELLHAPATVCGPKKSTNLVKNKCVNFNFNGLTGTGVLTESNKKFLPFQQFGRDIADTTDAVRDPQTLEILDITPCSFGGVSVITPGTNTSNQVAVLYQDVNCTEVPVAIHADQLTPTWRVYSTGSNVFQTRAGCLIGAEHVNNSYECDIPIGAGICASYQTQTNSPRRARSVASQSIIAYTMSLGAENSVAYSNNSIAIPTNFTISVTTEILPVSMTKTSVDCTMYICGDSTECSNLLLQYGSFCTQLNRALTGIAVEQDKNTQEVFAQVKQIYKTPPIKDFGGFNFSQILPDPSKPSKRSFIEDLLFNKVTLADAGFIKQYGDCLGDIAARDLICAQKFNGLTVLPPLLTDEMIAQYTSALLAGTITSGWTFGAGAALQIPFAMQMAYRFNGCGVTQNVLYENQKLIANQFNSAIGKIQDSLSSTASALGKLQDVVNQNAQALNTLVKQLSSNFGAISSVLNDILSRLDKVEAEVQIDRLITGRLQSLQTYVTQQLIRAAEIRASANLAATKMSECVLGQSKRVDFCGKGCHLMSFPQSAPHGVVFLHVTYVPAQEKNFTTAPAICHDGKAHFPREGVFVSNGTHWFVTQRNFYEPQIITTDNTFVSGNCDVVIGIVNNTVYDPLQPELDSFKEELDKYFKNHTSPDVDLGDISGINASVVNIQKEIDRLNEVAKNLNESLIDLQELGKYEQYIKGGGGSDIIKLLNEQVNKEMQSSNLYMSMSSWCYTHSLDGAGLFLFDHAAEEYEHAKKLIIFLNENNVPVQLTSISAPEHKFEGLTQIFQKAYEHEQHISESINNIVDHAIKSKDHATFNFLQWYVAEQHEEEVLFKDILDKIELIGNENHGLYLADQYVKGIAKSRKS

SEQ ID NO: 5249 - protein, 1379 aa, Artificial Sequence
  SARS-CoV-2/Hong Kong/case85_VM20002868/2020__EPI_ISL_414519 spike protein (1-1211)(I909C_Y1047C) Ferritin construct
MFVFLVLVPLVSSQCVNLTTRTQLPPAYTNSFTRGVYYPDKVFRSSVLHSTQDLFLPFFSNVTWFHAIHVSGTNGTKRFDNPVLPFNDGVYFASTEKSNIIRGWIFGTTLDSKTQSLLIVNNATNVVIKVCEFQFCNDPFLGVYYHKNNKSWMESEFRVYSSANNCTFEYVSQPFLMDLEGKQGNFKNLREFVFKNIDGYFKIYSKHTPINLVRDLPQGFSALEPLVDLPIGINITRFQTLLALHRSYLTPGDSSSGWTAGAAAYYVGYLQPRTFLLKYNENGTITDAVDCALDPLSETKCTLKSFTVEKGIYQTSNFRVQPTESIVRFPNITNLCPFGEVFNATRFASVYAWNRKRISNCVADYSVLYNSASFSTFKCYGVSPTKLNDLCFTNVYADSFVIRGDEVRQIAPGQTGKIADYNYKLPDDFTGCVIAWNSNNLDSKVGGNYNYLYRLFRKSNLKPFERDISTEIYQAGSTPCNGVEGFNCYFPLQSYGFQPTNGVGYQPYRVVVLSFELLHAPATVCGPKKSTNLVKNKCVNFNFNGLTGTGVLTESNKKFLPFQQFGRDIADTTDAVRDPQTLEILDITPCSFGGVSVITPGTNTSNQVAVLYQDVNCTEVPVAIHADQLTPTWRVYSTGSNVFQTRAGCLIGAEHVNNSYECDIPIGAGICASYQTQTNSPRRARSVASQSIIAYTMSLGAENSVAYSNNSIAIPTNFTISVTTEILPVSMTKTSVDCTMYICGDSTECSNLLLQYGSFCTQLNRALTGIAVEQDKNTQEVFAQVKQIYKTPPIKDFGGFNFSQILPDPSKPSKRSFIEDLLFNKVTLADAGFIKQYGDCLGDIAARDLICAQKFNGLTVLPPLLTDEMIAQYTSALLAGTITSGWTFGAGAALQIPFAMQMAYRFNGCGVTQNVLYENQKLIANQFNSAIGKIQDSLSSTASALGKLQDVVNQNAQALNTLVKQLSSNFGAISSVLNDILSRLDKVEAEVQIDRLITGRLQSLQTYVTQQLIRAAEIRASANLAATKMSECVLGQSKRVDFCGKGCHLMSFPQSAPHGVVFLHVTYVPAQEKNFTTAPAICHDGKAHFPREGVFVSNGTHWFVTQRNFYEPQIITTDNTFVSGNCDVVIGIVNNTVYDPLQPELDSFKEELDKYFKNHTSPDVDLGDISGINASVVNIQKEIDRLNEVAKNLNESLIDLQELGKYEQYIKGGGGSDIIKLLNEQVNKEMQSSNLYMSMSSWCYTHSLDGAGLFLFDHAAEEYEHAKKLIIFLNENNVPVQLTSISAPEHKFEGLTQIFQKAYEHEQHISESINNIVDHAIKSKDHATFNFLQWYVAEQHEEEVLFKDILDKIELIGNENHGLYLADQYVKGIAKSRKS

SEQ ID NO: 5250 - protein, 1379 aa, Artificial Sequence; identical to SEQ ID NO: 5240
  SARS-CoV-2/England/200990660/2020__EPI_ISL_414523 spike protein (1-1211)(I909C_Y1047C) Ferritin construct

SEQ ID NO: 5251 - protein, 1379 aa, Artificial Sequence
  SARS-CoV-2/Australia/NSW09/2020__EPI_ISL_413595 spike protein (1-1211)(I909C_Y1047C) Ferritin construct
MFVFLVLLPLVSSQCVNLTTRTQLPPAYTNSFTRGVYYPDKVFRSSVLHSTQDLFLPFFSNVTWFHAIHVSGTNGTKRFDNPVLPFNDGVYFASTEKSNIIRGWIFGTTLDSKTQSLLIVNNATNVVIKVCEFQFCNDPFLGVYYHKNNKSWMESEFRVYSSANNCTFEYVSQPFLMDLEGKQGNFKNLREFVFKNIDGYFKIYSKHTPINLVRDLPQGFSALEPLVDLPIGINITRFQTLLALHRSYLTPGDSSSGWTAGAAAYYVGYLQPRTFLLKYNENGTITDAVDCALDPLSETKCTLKSFTVEKGIYQTSNFRVQPTESIVRFPNITNLCPFGEVFNATRFASVYAWNRKRISNCVADYSVLYNSASFSTFKCYGVSPTKLNDLCFTNVYADSFVIRGDEVRQIAPGQTGKIADYNYKLPDDFTGCVIAWNSNNLDSKVGGNYNYLYRLFRKSNLKPFERDISTEIYQAGSTPCNGVEGFNCYFPLQSYGFQPTNGVGYQPYRVVVLSFELLHAPATVCGPKKSTNLVKNKCVNFNFNGLTGTGVLTESNKKFLPFQQFGRDIADTTDAVRDPQTLEILDITPCSFGGVSVITPGTNTSNQVAVLYQDVNCTEVPVAIHADQLTPTWRVYSTGSNVFQTRAGCLIGAEHVNNSYECDIPIGAGICASYQTQTNSPRRARSVASQSIIAYTMSLGAENSVAYSNNSIAIPTNFTISVTTEILPVSMTKTSVDCTMYICGDSTECSNLLLQYGSFCTQLNRALTGIAVEQDKNTQEVFAQVKQIYKTPPIKDFGGFNFSQILPDPSKPSKRSFIEDLLFNKVTLADAGFIKQYGDCLGDIAARDLICAQKFNGLTVLPPLLTDEMIAQYTSALLAGTITSGWTFGAGAALQIPFAMQMAYRFNGCGVTQNVLYENQKLIANQFNSAIGKIQDSLSFTASALGKLQDVVNQNAQALNTLVKQLSSNFGAISSVLNDILSRLDKVEAEVQIDRLITGRLQSLQTYVTQQLIRAAEIRASANLAATKMSECVLGQSKRVDFCGKGCHLMSFPQSAPHGVVFLHVTYVPAQEKNFTTAPAICHDGKAHFPREGVFVSNGTHWFVTQRNFYEPQIITTDNTFVSGNCDVVIGIVNNTVYDPLQPELDSFKEELDKYFKNHTSPDVDLGDISGINASVVNIQKEIDRLNEVAKNLNESLIDLQELGKYEQYIKGGGGSDIIKLLNEQVNKEMQSSNLYMSMSSWCYTHSLDGAGLFLFDHAAEEYEHAKKLIIFLNENNVPVQLTSISAPEHKFEGLTQIFQKAYEHEQHISESINNIVDHAIKSKDHATFNFLQWYVAEQHEEEVLFKDILDKIELIGNENHGLYLADQYVKGIAKSRKS

SEQ ID NO: 5252 - protein, 1379 aa, Artificial Sequence; identical to SEQ ID NO: 5232
  SARS-CoV-2/Australia/NSW10/2020__EPI_ISL_413596 spike protein (1-1211)(I909C_Y1047C) Ferritin construct

SEQ ID NO: 5253 - protein, 1379 aa, Artificial Sequence
  SARS-CoV-2/Switzerland/1000477797/2020__EPI_ISL_413023 spike protein (1-1211)(I909C_Y1047C) Ferritin construct
MFVFLVLLPLVSSQCVNLTTRTQLPPAYTNSFTRGVYYPDKVFRSSVLHSTQDLFLPFFSNVTWFHAIHVSGTNGTKRFDNPVLPFNDGVYFASTEKSNIIRGWIFGTTLDSKTQSLLIVNNATNVVIKVCEFQFCNDPFLGVYYHKNNKSWMESEFRVYSSANNCTFEYVSQPFLMDLEGKQGNFKNLREFVFKNIDGYFNIYSKHTPINLVRDLPQGFSALEPLVDLPIGINITRFQTLLALHRSYLTPGDSSSGWTAGAAAYYVGYLQPRTFLLKYNENGTITDAVDCALDPLSETKCTLKSFTVEKGIYQTSNFRVQPTESIVRFPNITNLCPFGEVFNATRFASVYAWNRKRISNCVADYSVLYNSASFSTFKCYGVSPTKLNDLCFTNVYADSFVIRGDEVRQIAPGQTGKIADYNYKLPDDFTGCVIAWNSNNLDSKVGGNYNYLYRLFRKSNLKPFERDISTEIYQAGSTPCNGVEGFNCYFPLQSYGFQPTNGVGYQPYRVVVLSFELLHAPATVCGPKKSTNLVKNKCVNFNFNGLTGTGVLTESNKKFLPFQQFGRDIADTTDAVRDPQTLEILDITPCSFGGVSVITPGTNTSNQVAVLYQGVNCTEVPVAIHADQLTPTWRVYSTGSNVFQTRAGCLIGAEHVNNSYECDIPIGAGICASYQTQTNSPRRARSVASQSIIAYTMSLGAENSVAYSNNSIAIPTNFTISVTTEILPVSMTKTSVDCTMYICGDSTECSNLLLQYGSFCTQLNRALTGIAVEQDKNTQEVFAQVKQIYKTPPIKDFGGFNFSQILPDPSKPSKRSFIEDLLFNKVTLADAGFIKQYGDCLGDIAARDLICAQKFNGLTVLPPLLTDEMIAQYTSALLAGTITSGWTFGAGAALQIPFAMQMAYRFNGCGVTQNVLYENQKLIANQFNSAIGKIQDSLSSTASALGKLQDVVNQNAQALNTLVKQLSSNFGAISSVLNDILSRLDKVEAEVQIDRLITGRLQSLQTYVTQQLIRAAEIRASANLAATKMSECVLGQSKRVDFCGKGCHLMSFPQSAPHGVVFLHVTYVPAQEKNFTTAPAICHDGKAHFPREGVFVSNGTHWFVTQRNFYEPQIITTDNTFVSGNCDVVIGIVNNTVYDPLQPELDSFKEELDKYFKNHTSPDVDLGDISGINASVVNIQKEIDRLNEVAKNLNESLIDLQELGKYEQYIKGGGGSDIIKLLNEQVNKEMQSSNLYMSMSSWCYTHSLDGAGLFLFDHAAEEYEHAKKLIIFLNENNVPVQLTSISAPEHKFEGLTQIFQKAYEHEQHISESINNIVDHAIKSKDHATFNFLQWYVAEQHEEEVLFKDILDKIELIGNENHGLYLADQYVKGIAKSRKS

SEQ ID NO: 5254 - protein, 1379 aa, Artificial Sequence
  SARS-CoV-2/Belgium/BA-02291/2020__EPI_ISL_415159 spike protein (1-1211)(I909C_Y1047C) Ferritin construct
MFVFLVLLPLVSSQCVNLTTRTQLPPAYTNSFTRGVYYPDKVFRSSVLHSTQDLFLPFFSNVTWFHAIHVSGTNGTKRFDNPVLPFNDGVYFASTEKSNIIRGWIFGTTLDSKTQSLLIVNNATNVVIKVCEFQFCNDPFLGVYYHKNNKSWMESEFRVYSSANNCTFEYVSQPFLMDLEGKQGNFKNLREFVFKNIDGYFKIYSKHTPINLVRDLPQGFSALEPLVDLPIGINITRFQTLLALHRSYLTPGDSSSGWTAGAAAYYVGYLQPRTFLLKYNENGTITDAVDCALDPLSETKCTLKSFTVEKGIYQTSNFRVQPTESIVRFPNITNLCPFGEVFNATRFASVYAWNRKRISNCVADYSVLYNSASFSTFKCYGVSPTKLNDLCFTNVYADSFVIRGDEVRQIAPGQTGKIADYNYKLPDDFTGCVIAWNSNNLDSKVGGNYNYLYRLFRRSNLKPFERDISTEIYQAGSTPCNGVEGFNCYFPLQSYGFQPTNGVGYQPYRVVVLSFELLPAPATVCGPKKSTNLVKNKCVNFNFNGLTGTGVLTESNKKFLPFQQFGRDIADTTDAVRDPQTLEILDITPCSFGGVSVITPGTNTSNQVAVLYQGVNCTEVPVAIHADQLTPTWRVYSTGSNVFQTRAGCLIGAEHVNNSYECDIPIGAGICASYQTQTNSPRRARSVASQSIIAYTMSLGAENSVAYSNNSIAIPTNFTISVTTEILPVSMTKTSVDCTMYICGDSTECSNLLLQYGSFCTQLNRALTGIAVEQDKNTQEVFAQVKQIYKTPPIKDFGGFNFSQILPDPSKPSKRSFIEDLLFNKVTLADAGFIKQYGDCLGDIAARDLICAQKFNGLTVLPPLLTDEMIAQYTSALLAGTITSGWTFGAGAALQIPFAMQMAYRFNGCGVTQNVLYENQKLIANQFNSAIGKIQDSLSSAAPALGKLQDVVNQNAQALNTLVKQLSSNFGAISSVLNDILSRLDKVEAEVQIDRLITGRLQSLQTYVTQQLIRAAEIRASANLAATKMSECVLGQSKRVDFCGKGCHLMSFPQSAPHGVVFLHVTYVPAQEKNFTTAPAICHDGKAHFPREGVFVSNGTHWFVTQRNFYEPQIITTDNTFVSGNCDVVIGIVNNTVYDPLQPELDSFKEELDKYFKNHTSPDVDLGDISGINASVVNIQKEIDRLNEVAKNLNESLIDLQELGKYEQYIKGGGGSDIIKLLNEQVNKEMQSSNLYMSMSSWCYTHSLDGAGLFLFDHAAEEYEHAKKLIIFLNENNVPVQLTSISAPEHKFEGLTQIFQKAYEHEQHISESINNIVDHAIKSKDHATFNFLQWYVAEQHEEEVLFKDILDKIELIGNENHGLYLADQYVKGIAKSRKS

SEQ ID NO: 5255 - protein, 1379 aa, Artificial Sequence
  SARS-CoV-2/USA/WA8-UW5/2020__EPI_ISL_413486 spike protein (1-1211)(I909C_Y1047C) Ferritin construct
MFVFLVLLPLVSSQCVNLTTRTQLPPAYTNSFTRGVYYPDKVFRSSVLHSTQDLFLPFFSNVTWFHAIHVSGTNGTKRFDNPVLPFNDGVYFASTEKSNIIRGWIFGTTLDSKTQSLLIVNNATNVVIKVCEFQFCNDPFLGVYYHKNNKSWMESEFRVYSSANNCTFEYVSQPFLMDLEGKQGNFKNLREFVFKNIDGYFKIYSKHTPINLVRDLPQGFSALEPLVDLPIGINITRFQTLLALHRSYLTPGDSSSGWTAGAAAYYVGYLQPRTFLLKYNENGTITDAVDCALDPLSETKCTLKSFTVEKGIYQTSNFRVQPTESIVRFPNITNLCPFGEVFNATRFASVYAWNRKRISNCVADYSVLYNSASFSTFKCYGVSPTKLNDLCFTNVYADSFVIRGDEVRQIAPGQTGKIADYNYKLPDDFTGCVIAWNSNNLDSKVGGNYNYLYRLFRKSNLKPFERDISTEIYQAGSTPCNGVEGFNCYFPLQSYGFQPTNGVGYQPYRVVVLSFELLHAPATVCGPKKSTNLVKNKCVNFNFNGLTGTGVLTESNKKFLPFQQFGRDIADTTDAVRDPQTLEILDITPCSFGGVSVITPGTNTSNQVAVLYQDVNCTEVPVAIHADQLTPTWRVYSTGSNVFQTRAGCLIGAEYVNNSYECDIPIGAGICASYQTQTNSPRRARSVASQSIIAYTMSLGAENSVAYSNNSIAIPTNFTISVTTEILPVSMTKTSVDCTMYICGDSTECSNLLLQYGSFCTQLNRALTGIAVEQDKNTQEVFAQVKQIYKTPPIKDFGGFNFSQILPDPSKPSKRSFIEDLLFNKVTLADAGFIKQYGDCLGDIAARDLICAQKFNGLTVLPPLLTDEMIAQYTSALLAGTITSGWTFGAGAALQIPFAMQMAYRFNGCGVTQNVLYENQKLIANQFNSAIGKIQDSLSSTASALGKLQDVVNQNAQALNTLVKQLSSNFGAISSVLNDILSRLDKVEAEVQIDRLITGRLQSLQTYVTQQLIRAAEIRASANLAATKMSECVLGQSKRVDFCGKGCHLMSFPQSAPHGVVFLHVTYVPAQEKNFTTAPAICHDGKAHFPREGVFVSNGTHWFVTQRNFYEPQIITTDNTFVSGNCDVVIGIVNNTVYDPLQPELDSFKEELDKYFKNHTSPDVDLGDISGINASVVNIQKEIDRLNEVAKNLNESLIDLQELGKYEQYIKGGGGSDIIKLLNEQVNKEMQSSNLYMSMSSWCYTHSLDGAGLFLFDHAAEEYEHAKKLIIFLNENNVPVQLTSISAPEHKFEGLTQIFQKAYEHEQHISESINNIVDHAIKSKDHATFNFLQWYVAEQHEEEVLFKDILDKIELIGNENHGLYLADQYVKGIAKSRKS

SEQ ID NO: 5256 - protein, 1379 aa, Artificial Sequence
  SARS-CoV-2/England/20102000506/2020__EPI_ISL_415147 spike protein (1-1211)(I909C_Y1047C) Ferritin construct
MFVFLVLLPLVSSQCVNLTTRTQLPPAYTNSFTRGVYYPDKVFRSSVLHSTQDLFLPFFSNVTWFHAIHVSGTNGTKRFDNPVLPFNDGVYFASTEKSNIIRGWIFGTTLDSKTQSLLIVNNATNVVIKVCEFQFCNDPFLGVYYHKNNKSWMESEFRVYSSANNCTFEYVSQPFLMDLEGKQGNFKNLREFVFKNIDGYFKIYSKHTPINLVRDLPQGFSALEPLVDLPIGINITRFQTLLALHRSYLTPGDSSSGWTAGAAAYYVGYLQPRTFLLKYNENGTITDAVDCALDPLSETKCTLKSFTVEKGIYQTSNFRVQPTESIVRFPNITNLCPFGEVFNATRFASVYAWNRKRISNCVADYSVLYNSASFSTFKCYGVSPTKLNDLCFTNVYADSFVIRGDEVRQIAPGQTGKIADYNYKLPDDFTGCVIAWNSNNLDSKVGGNYNYLYRLFRKSNLKPFERDISTEIYQAGSTPCNGVEGFNCYFPLQSYGFQPTNGVGYQPYRVVVLSFELLHAPATVCGPKKSTNLVKNKCVNFNFNGLTGTGVLTESNKKFLPFQQFGRDIADTTDAVRDPQTLEILDITPCSFGGVSVITPGTNTSNQVAVLYQGVNCTEVPVAIHADQLTPTWRVYSTGSNVFQTRAGCLIGAEHVNNSYECDIPIGAGICASYQTQTNSPRRARSVASQSIIAYTMSLGAENSVAYSNNSIAIPTNFTISVTTEILPVSMTKTSVDCTMYICGDSTECSNLLLQYGSFCTQLNRALTGIAVEQDKNTQEVFAQVKQIYKTPPIKDFGGFNFSQILPDPSKPSKRSFIEDLLFNKVTLADAGFIKQYGYCLGDIAARDLICAQKFNGLTVLPPLLTDEMIAQYTSALLAGTITSGWTFGAGAALQIPFAMQMAYRFNGCGVTQNVLYENQKLIANQFNSAIGKIQDSLSSTASALGKLQDVVNQNAQALNTLVKQLSSNFGAISSVLNDILSRLDKVEAEVQIDRLITGRLQSLQTYVTQQLIRAAEIRASANLAATKMSECVLGQSKRVDFCGKGCHLMSFPQSAPHGVVFLHVTYVPAQEKNFTTAPAICHDGKAHFPREGVFVSNGTHWFVTQRNFYEPQIITTDNTFVSGNCDVVIGIVNNTVYDPLQPELDSFKEELDKYFKNHTSPDVDLGDISGINASVVNIQKEIDRLNEVAKNLNESLIDLQELGKYEQYIKGGGGSDIIKLLNEQVNKEMQSSNLYMSMSSWCYTHSLDGAGLFLFDHAAEEYEHAKKLIIFLNENNVPVQLTSISAPEHKFEGLTQIFQKAYEHEQHISESINNIVDHAIKSKDHATFNFLQWYVAEQHEEEVLFKDILDKIELIGNENHGLYLADQYVKGIAKSRKS

SEQ ID NO: 5257 - protein, 1379 aa, Artificial Sequence
  SARS-CoV-2/Belgium/VAG-03013/2020__EPI_ISL_415155 spike protein (1-1211)(I909C_Y1047C) Ferritin construct
MFVFLVLLPLVSSQCVNLTTRTQLPPAYTNSFTRGVYYPDKVFRSSVLHSTQDLFLPFFSNVTWFHAIHVSGTNGTKRFDNPVLPFNDGVYFASTEKSNIIRGWIFGTTLDSKTQSLLIVNNATNVVIKVCEFQFCNDPFLGVYYHKNNKSWMESEFRVYSSANNCTFEYVSQPFLMDLEGKQGNFKNLREFVFKNIDGYFKIYSKHTPINLVRDLPQGFSALEPLVDLPIGINITRFQTLLALHRSYLTPGDSSSGWTAGAAAYYVGYLQPRTFLLKYNENGTITDAVDCALDPLSETKCTLKSFTVEKGIYQTSNFRVQPTESIVRFPNITNLCPFGEVFNATRFASVYAWNRKRISNCVADYSVLYNSASFSTFKCYGVSPTKLNDLCFTNVYADSFVIRGDEVRQIAPGQTGKIADYNYKLPDDFTGCVIAWNSNNLDSKVGGNYNYLYRLFRKSNLKPFERDISTEIYQAGSTPCNGVEGFNCYFPLQSYGFQPTNGVGYQPYRVVVLSFELLHAPATVCGPKKSTNLVKNKCVNFNFNGLTGTGVLTESNKKFLPFQQFGRDIADTTDAVRDPQTLEILDITPCSFGGVSVITPGTNTSNQVAVLYQGVNCTEVPVAIHADQLTPTWRVYSTGSNVFQTRAGCLIGAEHVNNSYECDIPIGAGICASYQTQTNSPRRARSVASQSIIAYTMSLGAENSVAYSNNSIAIPTNFTISVTTEILPVSMTKTSVDCTMYICGDSTECSNLLLQYGSFCTQLNRALTGIAVEQDKNTQEVFAQVKQIYKTPPIKDFGGFNFSQILPDPSKPSKRSFIEDLLFNKVTLADAGFIKQYGDCLGDIAARDLICAQKFNGLTVLPPLLTDEMIAQYTSALLAGTITSGWTFGAGAALQIPFAMQMAYRFNGCGVTQNVLYENQKLIANQFNSAIGKIQDSLSSTATALGKLQDVVNQNAQALNTLVKQLSSNFGAISSVLNDILSRLDKVEAEVQIDRLITGRLQSLQTYVTQQLIRAAEIRASANLAATKMSECVLGQSKRVDFCGKGCHLMSFPQSAPHGVVFLHVTYVPAQEKNFTTAPAICHDGKAHFPREGVFVSNGTHWFVTQRNFYEPQIITTDNTFVSGNCDVVIGIVNNTVYDPLQPELDSFKEELDKYFKNHTSPDVDLGDISGINASVVNIQKEIDRLNEVAKNLNESLIDLQELGKYEQYIKGGGGSDIIKLLNEQVNKEMQSSNLYMSMSSWCYTHSLDGAGLFLFDHAAEEYEHAKKLIIFLNENNVPVQLTSISAPEHKFEGLTQIFQKAYEHEQHISESINNIVDHAIKSKDHATFNFLQWYVAEQHEEEVLFKDILDKIELIGNENHGLYLADQYVKGIAKSRKS

SEQ ID NO: 5258 - protein, 1379 aa, Artificial Sequence
  SARS-CoV-2/Belgium/BC-03016/2020__EPI_ISL_415157 spike protein (1-1211)(I909C_Y1047C) Ferritin construct
MFVFLVLLPLVSSQCVNLTTRTQLPPAYTNSFTRGVYYPDKVFRSSVLHSTQDLFLPFFSNVTWFHAIHVSGTNGTKRFDNPVLPFNDGVYFASTEKSNIIRGWIFGTTLDSKTQSLLIVNNATNVVIKVCEFQFCNDPFLGVYYHKNNKSWMESEFRVYSSANNCTFEYVSQPFLMDLEGKQGNFKNLREFVFKNIDGYFKIYSKHTPINLVRDLPQGFSALEPLVDLPIGINITRFQTLLALHRSYLTPGDSSSGWTAGAAAYYVGYLQPRTFLLKYNENGTITDAVDCALDPLSETKCTLKSFTVEKGIYQTSNFRVQPTESIVRFPNITNLCPFGEVFNATRFASVYAWNRKRISNCVADYSVLYNSASFSTFKCYGVSPTKLNDLCFTNVYADSFVIRGDEVRQIAPGQTGKIADYNYKLPDDFTGCVIAWNSNNLDSKVGGNYNYLYRLFRKSNLKPFERDISTEIYQAGSTPCNGVEGFNCYFPLQSYGFQPTNGVGYQPYRVVVLSFELLHAPATVCGPKKSTNLVKNKCVNFNFNGLTGTGVLTESNKKFLPFQQFGRDIADTTDAVRDPQTLEILDITPCSFGGVSVITPGTNTSNQVAVLYQGVNCTEVPVAIHADQLTPTWRVYSTGSNVFQTRAGCLIGAEHVNNSYECDIPIGAGICASYQTQTNSPRRARSVASQSIIAYTMSLGAENSVAYSNNSIAIPTNFTISVTTEILPVSMTKTSVDCTMYICGDSTECSNLLLQYGSFCTQLNRALTGIAVEQDKNTQEVFAQVKQIYKTPPIKDFGGFNFSQILPDPSKPSKRSFIEDLLFNKVTLADAGFIKQYGDCLGDIAARDLICAQKFNGLTVLPPLLTDEMIAQYTSALLAGTITSGWTFGAGAALQIPFAMQMAYRFNGCGVTQNVLYENQKLIANQFNSAIGKIQDSLSSTAPALGKLQDVVNQNAQALNTLVKQLSSNFGAISSVLNDILSRLDKVEAEVQIDRLITGRLQSLQTYVTQQLIRAAEIRASANLAATKMSECVLGQSKRVDFCGKGCHLMSFPQSAPHGVVFLHVTYVPAQEKNFTTAPAICHDGKAHFPREGVFVSNGTHWFVTQRNFYEPQIITTDNTFVSGNCDVVIGIVNNTVYDPLQPELDSFKEELDKYFKNHTSPDVDLGDISGINASVVNIQKEIDRLNEVAKNLNESLIDLQELGKYEQYIKGGGGSDIIKLLNEQVNKEMQSSNLYMSMSSWCYTHSLDGAGLFLFDHAAEEYEHAKKLIIFLNENNVPVQLTSISAPEHKFEGLTQIFQKAYEHEQHISESINNIVDHAIKSKDHATFNFLQWYVAEQHEEEVLFKDILDKIELIGNENHGLYLADQYVKGIAKSRKS

SEQ ID NO: 5259 - protein, 1379 aa, Artificial Sequence
  SARS-CoV-2/Germany/BavPat3/2020__EPI_ISL_414521 spike protein (1-1211)(I909C_Y1047C) Ferritin construct
MFVFLVLLPLVSSQCVNLTTRTQLPPAYTNSFTRGVYYPDKVFRSSVLHSTQDLFLPFFSNVTWFHAIHVSGTNGTKRFDNPVLPFNDGVYFASTEKSNIIRGWIFGTTLDSKTQSLLIVNNATNVVIKVCEFQFCNDPFLGVYYHKNNKSWMESEFRVYSSANNCTFEYVSQPFLMDLEGKQGNFKNLREFVFKNIDGYFKIYSKHTPINLVRDLPQGFSALEPLVDLPIGINITRFQTLLALHRSYLTPGDSSSGWTAGAAAYYVGYLQPRTFLLKYNENGTITDAVDCALDPLSETKCTLKSFTVEKGIYQTSNFRVQPTESIVRFPNITNLCPFGEVFNATRFASVYAWNRKRISNCVADYSVLYNSASFSTFKCYGVSPTKLNDLCFTNVYADSFVIRGDEVRQIAPGQTGKIADYNYKLPDDFTGCVIAWNSNNLDSKVGGNYNYLYRLFRKSNLKPFERDISTEIYQAGSTPCNGVEGFNCYFPLQSYGFQPTNGVGYQPYRVVVLSFELLHAPATVCGPKKSTNLVKNKCVNFNFNGLTGTGVLTESNKKFLPFQQFGRDIADTTDAVRDPQTLEILDITPCSFGGVSVITPGTNTSNQVAVLYQDVNCTEVPVAIHADQLTPTWRVYSTGSNVFQTRAGCLIGAEHVNNSYECDIPIGAGICASYQTQTNSPRRARSVASQSIIAYTMSLGAENSVAYSNNSIAIPTNFTISVTTEILPVSMTKTSVDCTMYICGDSTECSNLLLQYGSFCTQLNRALTGIAVEQDKNTQQVFAQVKQIYKTPPIKDFGGFNFSQILPDPSKPSKRSFIEDLLFNKVTLADAGFIKQYGDCLGDIAARDLICAQKFNGLTVLPPLLTDEMIAQYTSALLAGTITSGWTFGAGAALQIPFAMQMAYRFNGCGVTQNVLYENQKLIANQFNSAIGKIQDSLSSTASALGKLQDVVNQNAQALNTLVKQLSSNFGAISSVLNDILSRLDKVEAEVQIDRLITGRLQSLQTYVTQQLIRAAEIRASANLAATKMSECVLGQSKRVDFCGKGCHLMSFPQSAPHGVVFLHVTYVPAQEKNFTTAPAICHDGKAHFPREGVFVSNGTHWFVTQRNFYEPQIITTDNTFVSGNCDVVIGIVNNTVYDPLQPELDSFKEELDKYFKNHTSPDVDLGDISGINASVVNIQKEIDRLNEVAKNLNESLIDLQELGKYEQYIKGGGGSDIIKLLNEQVNKEMQSSNLYMSMSSWCYTHSLDGAGLFLFDHAAEEYEHAKKLIIFLNENNVPVQLTSISAPEHKFEGLTQIFQKAYEHEQHISESINNIVDHAIKSKDHATFNFLQWYVAEQHEEEVLFKDILDKIELIGNENHGLYLADQYVKGIAKSRKS

SEQ ID NO: 5260 - protein, 1379 aa, Artificial Sequence
  SARS-CoV-2/France/HF1805/2020__EPI_ISL_414628 spike protein (1-1211)(I909C_Y1047C) Ferritin construct
MFVFLVLLPLVSSQCVNLTTRTQLPPAYTNSFTRGVYYPDKVFRSSVLHSTQDLFLPFFSNVTWFHAIHVSGTNGTKRFDNPVLPFNDGVYFASTEKSNIIRGWIFGTTLDSKTQSLLIVNNATNVVIKVCEFQFCNDPFLGVYYHKNNKSWMESEFRVYSSANNCTFEYVSQPFLMDLEGKQGNFKNLREFVFKNIDGYFKIYSKHTPINLVRDLPQGFSALEPLVDLPIGINITRFQTLLALHRSYLTPGDSSSGWTAGAAAYYVGYLQPRTFLLKYNENGTITDAVDCALDPLSETKCTLKSFTVEKGIYQTSNFRVQPTESIVRFPNITNLCPFGEVFNATRFASVYAWNRKRISNCVADYSVLYNSASFSTFKCYGVSPTKLNDLCFTNVYADSFVIRGDEVRQIAPGQTGKIADYNYKLPDDFTGCVIAWNSNNLDSKVGGNYNYLYRLFRKSNLKPFERDISTEIYQAGSTPCNGVEGFNCYFPLQSYGFQPTNGVGYQPYRVVVLSFELLHAPATVCGPKKSTNLVKNKCVNFNFNGLTGTGVLTESNKKFLPFQQFGRDIADTTDAVRDPQTLEILDITPCSFGGVSVITPGTNTSNQVAVLYQGVNCTEVPVAIHADQLTPTWRVYSTGSNVFQTRAGCLIGAEHVNNSYECDIPIGAGICASYQTQTNSPRRARSVASQSIIAYTMSLGAENSVAYSNNSIAIPTNFTISVTTEILPVSMTKTSVDCTMYICGDSTECSNLLLQYGSFCTQLNRALTGIAVEQDKNTQEVFAQVKQIYKTPPIKDFGGFNFSQILPDPSKPSKRSFIEDLLFNKVTLADAGFIKQYGDCLGDIAARDLICAQKFNGLTVLPPLLTDEMIAQYTSALLAGTITSGWTFGAGAALQIPFAMQMAYRFNGCGVTQNVLYENQKLIANQFNSAIGKIQDSLSSTASALGKLQDVVNQNAQALNTLVKQLSSNFGAISSVLNDILSRLDKVEAEVQIDRLITGRLQSLQTYVTQQLIRAAEIRASANLAATKMSECVLGQSKRVDFCGKGCHLMSFPQSAPHGVVFLHVTYVPAQEKNFTTAPAICHDGKAHFPREGVFVSNGTHWFVTQRNFYEPQIITTDNTFVSGNCDVVIGVVNNTVYDPLQPELDSFKEELDKYFKNHTSPDVDLGDISGINASVVNIQKEIDRLNEVAKNLNESLIDLQELGKYEQYIKGGGGSDIIKLLNEQVNKEMQSSNLYMSMSSWCYTHSLDGAGLFLFDHAAEEYEHAKKLIIFLNENNVPVQLTSISAPEHKFEGLTQIFQKAYEHEQHISESINNIVDHAIKSKDHATFNFLQWYVAEQHEEEVLFKDILDKIELIGNENHGLYLADQYVKGIAKSRKS

SEQ ID NO: 5261 - protein, 1379 aa, Artificial Sequence
  SARS-CoV-2/Netherlands/ZuidHolland_9/2020__EPI_ISL_414445 spike protein (1-1211)(I909C_Y1047C) Ferritin construct
MFVFLVLLPLVSSQCVNLTTRTQLPPAYTNSFTRGVYYPDKVFRSSVLHSTQDLFLPFFSNVTWFHAIHVSGTNGTKRFDNPVLPFNDGVYFASTEKSNIIRGWIFGTTLDSKTQSLLIVNNATNVVIKVCEFQFCNDPFLGVYYHKNNKSWMESEFRVYSSANNCTFEYVSQPFLMDLEGKQGNFKNLREFVFKNIDGYFKIYSKHTPINLVRDLPQGFSALEPLVDLPIGINITRFQTLLALHRSYLTPGDSSSGWTAGAAAYYVGYLQPRTFLLKYNENGTITDAVDCALDPLSETKCTLKSFTVEKGIYQTSNFRVQPTESIVRFPNITNLCPFGEVFNATRFASVYAWNRKRISNCVADYSVLYNSASFSTFKCYGVSPTKLNDLCFTNVYADSFVIRGDEVRQIAPGQTGKIADYNYKLPDDFTGCVIAWNSNNLDSKVGGNYNYLYRLFRKSNLKPFERDISTEIYQAGSTPCNGVEGFNCYFPLQSYGFQPTNGVGYQPYRVVVLSFELLHAPATVCGPKKSTNLVKNKCVNFNFNGLTGTGVLTESNKKFLPFQQFGRDIADTTDAVRDPQTLEILDITPCSFGGVSVITPGTNTSNQVAVLYQGVNCTEVPVAIHADQLTPTWRVYSTGSNVFQTRAGCLIGAEHVNNSYECDIPIGAGICASYQTQTNSPRRARSVASQSIIAYTMSLGAENSVAYSNNSIAIPTNFTISVTTEILPVSMTKTSVDCTMYICGDSTECSNLLLQYGSFCTQLNRALTGIAVEQDKNTQEVFAQVKQIYKTPPIKDFGGFNFSQILPDPSKPSKRSFIEDLLFNKVTLADAGFIKQYGDCLGDIAARDLICVQKFNGLTVLPPLLTDEMIAQYTSALLAGTITSGWTFGAGAALQIPFAMQMAYRFNGCGVTQNVLYENQKLIANQFNSAIGKIQDSLSSTASALGKLQDVVNQNAQALNTLVKQLSSNFGAISSVLNDILSRLDKVEAEVQIDRLITGRLQSLQTYVTQQLIRAAEIRASANLAATKMSECVLGQSKRVDFCGKGCHLMSFPQSAPHGVVFLHVTYVPAQEKNFTTAPAICHDGKAHFPREGVFVSNGTHWFVTQRNFYEPQIITTDNTFVSGNCDVVIGIVNNTVYDPLQPELDSFKEELDKYFKNHTSPDVDLGDISGINASVVNIQKEIDRLNEVAKNLNESLIDLQELGKYEQYIKGGGGSDIIKLLNEQVNKEMQSSNLYMSMSSWCYTHSLDGAGLFLFDHAAEEYEHAKKLIIFLNENNVPVQLTSISAPEHKFEGLTQIFQKAYEHEQHISESINNIVDHAIKSKDHATFNFLQWYVAEQHEEEVLFKDILDKIELIGNENHGLYLADQYVKGIAKSRKS

SEQ ID NO: 5262 - protein, 1379 aa, Artificial Sequence
  SARS-CoV-2/Finland/FIN03032020A/2020__EPI_ISL_413602 spike protein (1-1211)(I909C_Y1047C) Ferritin construct
MFVFLVLLPLVSSQCVNLTTRTQLPPAYTNSFTRGVYYPDKVFRSSVLHSTQDLFLPFFSNVTWFHAIHVSGTNGTKRFDNPVLPFNDGVYFASTEKSNIIRGWIFGTTLDSKTQSLLIVNNATNVVIKVCEFQFCNDPFLGVYYHKNNKSWMESEFRVYSSANNCTFEYVSQPFLMDLEGKQGNFKNLREFVFKNIDGYFKIYSKHTPINLVRDLPQGFSALEPLVDLPIGINITRFQTLLALHRSYLTPGDSSSGWTAGAAAYYVGYLQPRTFLLKYNENGTITDAVDCALDPLSETKCTLKSFTVEKGIYQTSNFRVQPTESIVRFPNITNLCPFGEVFNATRFASVYAWNRKRISNCVADYSVLYNSASFSTFKCYGVSPTKLNDLCFTNVYADSFVIRGDEVRQIAPGQTGKIADYNYKLPDDFTGCVISWNSNNLDSKVGGNYNYLYRLFRKSNLKPFERDISTEIYQAGSTPCNGVEGFNCYFPLQSYGFQPTNGVGYQPYRVVVLSFELLHAPATVCGPKKSTNLVKNKCVNFNFNGLTGTGVLTESNKKFLPFQQFGRDIADTTDAVRDPQTLEILDITPCSFGGVSVITPGTNTSNQVAVLYQGVNCTEVPVAIHADQLTPTWRVYSTGSNVFQTRAGCLIGAEHVNNSYECDIPIGAGICASYQTQTNSPRRARSVASQSIIAYTMSLGAENSVAYSNNSIAIPTNFTISVTTEILPVSMTKTSVDCTMYICGDSTECSNLLLQYGSFCTQLNRALTGIAVEQDKNTQEVFAQVKQIYKTPPIKDFGGFNFSQILPDPSKPSKRSFIEDLLFNKVTLADAGFIKQYGDCLGDIAARDLICAQKFNGLTVLPPLLTDEMIAQYTSALLAGTITSGWTFGAGAALQIPFAMQMAYRFNGCGVTQNVLYENQKLIANQFNSAIGKIQDSLSSTASALGKLQDVVNQNAQALNTLVKQLSSNFGAISSVLNDILSRLDKVEAEVQIDRLITGRLQSLQTYVTQQLIRAAEIRASANLAATKMSECVLGQSKRVDFCGKGCHLMSFPQSAPHGVVFLHVTYVPAQEKNFTTAPAICHDGKAHFPREGVFVSNGTHWFVTQRNFYEPQIITTDNTFVSGNCDVVIGIVNNTVYDPLQPELDSFKEELDKYFKNHTSPDVDLGDISGINASVVNIQKEIDRLNEVAKNLNESLIDLQELGKYEQYIKGGGGSDIIKLLNEQVNKEMQSSNLYMSMSSWCYTHSLDGAGLFLFDHAAEEYEHAKKLIIFLNENNVPVQLTSISAPEHKFEGLTQIFQKAYEHEQHISESINNIVDHAIKSKDHATFNFLQWYVAEQHEEEVLFKDILDKIELIGNENHGLYLADQYVKGIAKSRKS

SEQ ID NO: 5263 - protein, 1379 aa, Artificial Sequence
  SARS-CoV-2/France/GE1977/2020__EPI_ISL_414632 spike protein (1-1211)(I909C_Y1047C) Ferritin construct
MFVFLVLLPLVSSQCVNLTTRTQLPPAYTNSFTRGVYYPDKVFRSSVLHSTQDLFLPFFSNVTWFHAIHVSGTNGTKRFDNPVLPFNDGVYFASTEKSNIIRGWIFGTTLDSKTQSLLIVNNATNVVIKVCEFQFCNDPFLGVYYHKNNKSWMESEFRVYSSANNCTFEYVSQPFLMDLEGKQGNFKNLREFVFKNIDGYFKIYSKHTPINLVRDLPQGFSALEPLVDLPIGINITRFQTLLALHRSYLTPGDSSSGWTAGAAAYYVGYLQPRTFLLKYNENGTITDAVDCALDPLSETKCTLKSFTVEKGIYQTSNFRVQPTESIVRFPNITNLCPFGEVFNATRFASVYAWNRKRISNCVADYSVLYNSASFSTFKCYGVSPTKLNDLCFTNVYADSFVIRGDEVRQIAPGQTGKIADYNYKLPDDFTGCVIAWNSNNLDSKVGGNYNYLYRLFRKSNLKPFERDISTEIYQAGSTPCNGVEGFNCYFPLQSYGFQPTNGVGYQPYRVVVLSFELLHAPATVCGPKKSTNLVKNKCVNFNFNGLTGTGVLTESNKKFLPFQQFGRDIADTTDAVRDPQTLEILDITPCSFGGVSVITPGTNTSNQVAVLYQGVNCTEVPVAIHADQLTPTWRVYSTGSNVFQTRAGCLIGAEHVNNSYECDIPIGAGICASYQTQTNSPRRARSVASQSIIAYTMSLGAENSVAYSNNSIAIPTNFTISVTTEILPVSMTKTSVDCTMYICGDSTECSNLLLQYGSFCTQLNRALTGIAVEQDKNTQEVFAQVKQIYKTPPIKDFGGFNFSQILPDPSKPSKRSFIEDLLFNKVTLADAGFIKQYGDCLGDIAARDLICAQKFNGLTVLPPLLTDEMIAQYTSALLAGTITSGWTFGAGAALQIPFAMQMAYRFNGCGVTQNVLYENQKLIANQFNSAIGKIQDSLFSTASALGKLQDVVNQNAQALNTLVKQLSSNFGAISSVLNDILSRLDKVEAEVQIDRLITGRLQSLQTYVTQQLIRAAEIRASANLAATKMSECVLGQSKRVDFCGKGCHLMSFPQSAPHGVVFLHVTYVPAQEKNFTTAPAICHDGKAHFPREGVFVSNGTHWFVTQRNFYEPQIITTDNTFVSGNCDVVIGIVNNTVYDPLQPELDSFKEELDKYFKNHTSPDVDLGDISGINASVVNIQKEIDRLNEVAKNLNESLIDLQELGKYEQYIKGGGGSDIIKLLNEQVNKEMQSSNLYMSMSSWCYTHSLDGAGLFLFDHAAEEYEHAKKLIIFLNENNVPVQLTSISAPEHKFEGLTQIFQKAYEHEQHISESINNIVDHAIKSKDHATFNFLQWYVAEQHEEEVLFKDILDKIELIGNENHGLYLADQYVKGIAKSRKS

SEQ ID NO: 5264 - protein, 1379 aa, Artificial Sequence
  SARS-CoV-2/Finland/FIN-313/2020__EPI_ISL_414641 spike protein (1-1211)(I909C_Y1047C) Ferritin construct
MFVFLVLLPLVSSQCVNLTTRTQLPPAYTNSFTRGVYYPDKVFRSSVLHSTQDLFLPFFSNVTWFHAIHVSGTNGTKRFDNPVLPFNDGVYFASTEKSNIIRGWIFGTTLDSKTQSLLIVNNATNVVIKVCEFQFCNDPFLGVYYHKNNKSWMESEFRVYSSANNCTFEYVSQPFLMDLEGKQGNFKNLREFVFKNIDGYFKIYSKHTPINLVRDLPQGFSALEPLVDLPIGINITRFKTLLALHRSYLTPGDSSSGWTAGAAAYYVGYLQPRTFLLKYNENGTITDAVDCALDPLSETKCTLKSFTVEKGIYQTSNFRVQPTESIVRFPNITNLCPFGEVFNATRFASVYAWNRKRISNCVADYSVLYNSASFSTFKCYGVSPTKLNDLCFTNVYADSFVIRGDEVRQIAPGQTGKIADYNYKLPDDFTGCVIAWNSNNLDSKVGGNYNYLYRLFRKSNLKPFERDISTEIYQAGSTPCNGVEGFNCYFPLQSYGFQPTNGVGYQPYRVVVLSFELLHAPATVCGPKKSTNLVKNKCVNFNFNGLTGTGVLTESNKKFLPFQQFGRDIADTTDAVRDPQTLEILDITPCSFGGVSVITPGTNTSNQVAVLYQGVNCTEVPVAIHADQLTPTWRVYSTGSNVFQTRAGCLIGAEHVNNSYECDIPIGAGICASYQTQTNSPRRARSVASQSIIAYTMSLGAENSVAYSNNSIAIPTNFTISVTTEILPVSMTKTSVDCTMYICGDSTECSNLLLQYGSFCTQLNRALTGIAVEQDKNTQEVFAQVKQIYKTPPIKDFGGFNFSQILPDPSKPSKRSFIEDLLFNKVTLADAGFIKQYGDCLGDIAARDLICAQKFNGLTVLPPLLTDEMIAQYTSALLAGTITSGWTFGAGAALQIPFAMQMAYRFNGCGVTQNVLYENQKLIANQFNSAIGKIQDSLSSTASALGKLQDVVNQNAQALNTLVKQLSSNFGAISSVLNDILSRLDKVEAEVQIDRLITGRLQSLQTYVTQQLIRAAEIRASANLAATKMSECVLGQSKRVDFCGKGCHLMSFPQSAPHGVVFLHVTYVPAQEKNFTTAPAICHDGKAHFPREGVFVSNGTHWFVTQRNFYEPQIITTDNTFVSGNCDVVIGIVNNTVYDPLQPELDSFKEELDKYFKNHTSPDVDLGDISGINASVVNIQKEIDRLNEVAKNLNESLIDLQELGKYEQYIKGGGGSDIIKLLNEQVNKEMQSSNLYMSMSSWCYTHSLDGAGLFLFDHAAEEYEHAKKLIIFLNENNVPVQLTSISAPEHKFEGLTQIFQKAYEHEQHISESINNIVDHAIKSKDHATFNFLQWYVAEQHEEEVLFKDILDKIELIGNENHGLYLADQYVKGIAKSRKS

SEQ ID NO: 5265 - protein, 1379 aa, Artificial Sequence
  SARS-CoV-2/Netherlands/ZuidHolland_2/2020__EPI_ISL_414556 spike protein (1-1211)(I909C_Y1047C) Ferritin construct
MFVFLVLLPLVSSQCVNLTTRTQLPPAYTNSFTRGVYYPDKVFRSSVLHSTQDLFLPFFSNVTWFHAIHVSGTNGTKRFDNPVLPFNDGVYFASTEKSNIIRGWIFGTTLDSKTQSLLIVNNATNVVIKVCEFQFCNDPFLGVYYHKNNKSWMESEFRVYSSANNCTFEYVSQPFLMDLEGKQGNFKNLREFVFKNIDGYFKIYSKHTPINLVRDLPQGFSALEPLVDLPIGINITRFQTLLALHRSYLTPGDSSSGWTAGAAAYYVGYLQPRTFLLKYNENGTITDAVDCALDPLSETKCTLKSFTVEKGIYQTSNFRVQPTESIVRFPNITNLCPFGEVFNATRFASVYAWNRKRISNCVADYSVLYNSASFSTFKCYGVSPTKLNDLCFTNVYADSFVIRGDEVRQIAPGQTGKIADYNYKLPDDFTGCVIAWNSNNLDSKVGGNYNYLYRLFRKSNLKPFERDISTEIYQAGSTPCNGVEGFNCYFPLQSYGFQPTNGVGYQPYRVVVLSFELLHAPATVCGPKKSTNLVKNKCVNFNFNGLTGTGVLTESNKKFLPFQQFGRDIADTTDAVRDPQTLEILDITPCSFGGVSVITPGTNTSNQVAVLYQGVNCTEVPVAIHADQLTPTWRVYSTGSNVFQTRAGCLIGAEHVNNSYECDIPIGAGICASYQTQTNSPRRARSVASQSIIAYTMSLGAENSVAYSNNSIAIPTNFTISVTTEILPVSMTKTSVDCTMYICGDSTECSNLLLQYGSFCTQLNRALTGIALEQDKNTQEVFAQVKQIYKTPPIKDFGGFNFSQILPDPSKPSKRSFIEDLLFNKVTLADAGFIKQYGDCLGDIAARDLICAQKFNGLTVLPPLLTDEMIAQYTSALLAGTITSGWTFGAGAALQIPFAMQMAYRFNGCGVTQNVLYENQKLIANQFNSAIGKIQDSLSSTASALGKLQDVVNQNAQALNTLVKQLSSNFGAISSVLNDILSRLDKVEAEVQIDRLITGRLQSLQTYVTQQLIRAAEIRASANLAATKMSECVLGQSKRVDFCGKGCHLMSFPQSAPHGVVFLHVTYVPAQEKNFTTAPAICHDGKAHFPREGVFVSNGTHWFVTQRNFYEPQIITTDNTFVSGNCDVVIGIVNNTVYDPLQPELDSFKEELDKYFKNHTSPDVDLGDISGINASVVNIQKEIDRLNEVAKNLNESLIDLQELGKYEQYIKGGGGSDIIKLLNEQVNKEMQSSNLYMSMSSWCYTHSLDGAGLFLFDHAAEEYEHAKKLIIFLNENNVPVQLTSISAPEHKFEGLTQIFQKAYEHEQHISESINNIVDHAIKSKDHATFNFLQWYVAEQHEEEVLFKDILDKIELIGNENHGLYLADQYVKGIAKSRKS

SEQ ID NO: 5266 - protein, 1379 aa, Artificial Sequence
  SARS-CoV-2/USA/WA-UW31/2020__EPI_ISL_414618 spike protein (1-1211)(I909C_Y1047C) Ferritin construct
MFVFLVLLPLVSSQCVNLTTRTQLPPAYTNSFTRGVYYPDKVFRSSVLHSTQDLFLPFFSNVTWFHAIHVSGTNGTKRFDNPVLPFNDGVYFASTEKSNIIRGWIFGTTLDSKTQSLLIVNNATNVVIKVCEFQFCNDPFLGVYYHKNNKSWMESEFRVYSSANNCTFEYVSQPFLMDLEGKQGNFKNLREFVFKNIDGYFKIYSKHTPINLVRDLPQGFSALEPLVDLPIGINITRFQTLLALHRSYLTPGDSSSGWTAGAAAYYVGYLQPRTFLLKYNENGTITDAVDCALDPLSETKCTLKSFTVEKGIYQTSNFRVQPTESIVRFPNITNLCPFGEVFNATRFASVYAWNRKRISNCVADYSVLYNSASFSTFKCYGVSPTKLNDLCFTNVYADSFVIRGDEVRQIAPGQTGKIADYNYKLPDDFTGCVIAWNSNNLDSKVGGNYNYLYRLFRKSNLKPFERDISTEIYQAGSTPCNGAEGFNCYFPLQSYGFQPTNGVGYQPYRVVVLSFELLHAPATVCGPKKSTNLVKNKCVNFNFNGLTGTGVLTESNKKFLPFQQFGRDIADTTDAVRDPQTLEILDITPCSFGGVSVITPGTNTSNQVAVLYQDVNCTEVPVAIHADQLTPTWRVYSTGSNVFQTRAGCLIGAEHVNNSYECDIPIGAGICASYQTQTNSPRRARSVASQSIIAYTMSLGAENSVAYSNNSIAIPTNFTISVTTEILPVSMTKTSVDCTMYICGDSTECSNLLLQYGSFCTQLNRALTGIAVEQDKNTQEVFAQVKQIYKTPPIKDFGGFNFSQILPDPSKPSKRSFIEDLLFNKVTLADAGFIKQYGDCLGDIAARDLICAQKFNGLTVLPPLLTDEMIAQYTSALLAGTITSGWTFGAGAALQIPFAMQMAYRFNGCGVTQNVLYENQKLIANQFNSAIGKIQDSLSSTASALGKLQDVVNQNAQALNTLVKQLSSNFGAISSVLNDILSRLDKVEAEVQIDRLITGRLQSLQTYVTQQLIRAAEIRASANLAATKMSECVLGQSKRVDFCGKGCHLMSFPQSAPHGVVFLHVTYVPAQEKNFTTAPAICHDGKAHFPREGVFVSNGTHWFVTQRNFYEPQIITTDNTFVSGNCDVVIGIVNNTVYDPLQPELDSFKEELDKYFKNHTSPDVDLGDISGINASVVNIQKEIDRLNEVAKNLNESLIDLQELGKYEQYIKGGGGSDIIKLLNEQVNKEMQSSNLYMSMSSWCYTHSLDGAGLFLFDHAAEEYEHAKKLIIFLNENNVPVQLTSISAPEHKFEGLTQIFQKAYEHEQHISESINNIVDHAIKSKDHATFNFLQWYVAEQHEEEVLFKDILDKIELIGNENHGLYLADQYVKGIAKSRKS

SEQ ID NO: 5267 - protein, 1379 aa, Artificial Sequence
  SARS-CoV-2/South Korea/SNU01/2020__EPI_ISL_411929 spike protein (1-1211)(I909C_Y1047C) Ferritin construct
MFVFLVLLPLVSSQCVNLTTRTQLPPAYTNSFTRGVYYPDKVFRSSVLHSTQDLFLPFFSNVTWFHAIHVSGTNGTKRFDNPVLPFNDGVYFASTEKSNIIRGWIFGTTLDSKTQSLLIVNNATNVVIKVCEFQFCNDPFLGVYYHKNNKSWMESEFRVYSSANNCTFEYVSQPFLMDLEGKQGNFKNLREFVFKNIDGYFKIYSKHTPINLVRDLPQGFWALEPLVDLPIGINITRFQTLLALHRSYLTPGDSSSGWTAGAAAYYVGYLQPRTFLLKYNENGTITDAVDCALDPLSETKCTLKSFTVEKGIYQTSNFRVQPTESIVRFPNITNLCPFGEVFNATRFASVYAWNRKRISNCVADYSVLYNSASFSTFKCYGVSPTKLNDLCFTNVYADSFVIRGDEVRQIAPGQTGKIADYNYKLPDDFTGCVIAWNSNNLDSKVGGNYNYLYRLFRKSNLKPFERDISTEIYQAGSTPCNGVEGFNCYFPLQSYGFQPTNGVGYQPYRVVVLSFELLHAPATVCGPKKSTNLVKNKCVNFNFNGLTGTGVLTESNKKFLPFQQFGRDIADTTDAVRDPQTLEILDITPCSFGGVSVITPGTNTSNQVAVLYQDVNCTEVPVAIHADQLTPTWRVYSTGSNVFQTRAGCLIGAEHVNNSYECDIPIGAGICASYQTQTNSPRRARSVASQSIIAYTMSLGAENSVAYSNNSIAIPTNFTISVTTEILPVSMTKTSVDCTMYICGDSTECSNLLLQYGSFCTQLNRALTGIAVEQDKNTQEVFAQVKQIYKTPPIKDFGGFNFSQILPDPSKPSKRSFIEDLLFNKVTLADAGFIKQYGDCLGDIAARDLICAQKFNGLTVLPPLLTDEMIAQYTSALLAGTITSGWTFGAGAALQIPFAMQMAYRFNGCGVTQNVLYENQKLIANQFNSAIGKIQDSLSSTASALGKLQDVVNQNAQALNTLVKQLSSNFGAISSVLNDILSRLDKVEAEVQIDRLITGRLQSLQTYVTQQLIRAAEIRASANLAATKMSECVLGQSKRVDFCGKGCHLMSFPQSAPHGVVFLHVTYVPAQEKNFTTAPAICHDGKAHFPREGVFVSNGTHWFVTQRNFYEPQIITTDNTFVSGNCDVVIGIVNNTVYDPLQPELDSFKEELDKYFKNHTSPDVDLGDISGINASVVNIQKEIDRLNEVAKNLNESLIDLQELGKYEQYIKGGGGSDIIKLLNEQVNKEMQSSNLYMSMSSWCYTHSLDGAGLFLFDHAAEEYEHAKKLIIFLNENNVPVQLTSISAPEHKFEGLTQIFQKAYEHEQHISESINNIVDHAIKSKDHATFNFLQWYVAEQHEEEVLFKDILDKIELIGNENHGLYLADQYVKGIAKSRKS

SEQ ID NO: 5268 - protein, 1379 aa, Artificial Sequence
  SARS-CoV-2/China/WF0004/2020__EPI_ISL_413694 spike protein (1-1211)(I909C_Y1047C) Ferritin construct
MFVFLVLLPLVSSQCVNLTTRTQLPPAYTNSFTRGVYYPDKVFRSSVLHSTQDLFLPFFSNVTWFHAIHVSGTNGTKRFDNPVLPFNDGVYFASTEKSNIIRGWIFGTTLDSKTQSLLIVNNATNVVIKVCEFQFCNDPFLGVYYHKNNKSWTESEFRVYSSANNCTFEYVSQPFLMDLEGKQGNFKNLREFVFKNIDGYFKIYSKHTPINLVRDLPQGFSALEPLVDLPIGINITRFQTLLALHRSYLTPGDSSSGWTAGAAAYYVGYLQPRTFLLKYNENGTITDAVDCALDPLSETKCTLKSFTVEKGIYQTSNFRVQPTESIVRFPNITNLCPFGEVFNATRFASVYAWNRKRISNCVADYSVLYNSASFSTFKCYGVSPTKLNDLCFTNVYADSFVIRGDEVRQIAPGQTGKIADYNYKLPDDFTGCVIAWNSNNLDSKVGGNYNYLYRLFRKSNLKPFERDISTEIYQAGSTPCNGVEGFNCYFPLQSYGFQPTNGVGYQPYRVVVLSFELLHAPATVCGPKKSTNLVKNKCVNFNFNGLTGTGVLTESNKKFLPFQQFGRDIADTTDAVRDPQTLEILDITPCSFGGVSVITPGTNTSNQVAVLYQDVNCTEVPVAIHADQLTPTWRVYSTGSNVFQTRAGCLIGAEHVNNSYECDIPIGAGICASYQTQTNSPRRARSVASQSIIAYTMSLGAENSVAYSNNSIAIPTNFTISVTTEILPVSMTKTSVDCTMYICGDSTECSNLLLQYGSFCTQLNRALTGIAVEQDKNTQEVFAQVKQIYKTPPIKDFGGFNFSQILPDPSKPSKRSFIEDLLFNKVTLADAGFIKQYGDCLGDIAARDLICAQKFNGLTVLPPLLTDEMIAQYTSALLAGTITSGWTFGAGAALQIPFAMQMAYRFNGCGVTQNVLYENQKLIANQFNSAIGKIQDSLSSTASALGKLQDVVNQNAQALNTLVKQLSSNFGAISSVLNDILSRLDKVEAEVQIDRLITGRLQSLQTYVTQQLIRAAEIRASANLAATKMSECVLGQSKRFDFCGKGCHLMSFPQSAPHGVVFLHVTYVPAQEKNFTTAPAICHDGKAHFPREGVFVSNGTHWFVTQRNFYEPQIITTDNTFVSGNCDVVIGIVNNTVYDPLQPELDSFKEELDKYFKNHTSPDVDLGDISGINASVVNIQKEIDRLNEVAKNLNESLIDLQELGKYEQYIKGGGGSDIIKLLNEQVNKEMQSSNLYMSMSSWCYTHSLDGAGLFLFDHAAEEYEHAKKLIIFLNENNVPVQLTSISAPEHKFEGLTQIFQKAYEHEQHISESINNIVDHAIKSKDHATFNFLQWYVAEQHEEEVLFKDILDKIELIGNENHGLYLADQYVKGIAKSRKS

SEQ ID NO: 5269 - protein, 1379 aa, Artificial Sequence
  SARS-CoV-2/China/WF0028/2020__EPI_ISL_413791 spike protein (1-1211)(I909C_Y1047C) Ferritin construct
MFVFLVLLPLVSSQCVNLTTRTQLPPAYTNSFTRGVYYPDKVFRSSVLHSTQDLFLPFFSNVTWFHAIHVSGTNGTKRFDNPVLPFNDGVYFASTEKSNIIRGWIFGTTLDSKTQSLLIVNNATNVVIKVCEFQFCNDPFLGVYYHKNNKSWMESEFRVYSSANNCTFEYVSQPFLMDLEGKQGNFKNLREFVFKNIDGYFKIYSKHTPINLVRDLPQGFSALEPLVDLPIGINITRFQTLLALHRSYLTPGDSSSGWTAGAAAYYVGYLQPRTFLLKYNENGTITDAVDCALDPLSETKCTLKSFTVEKGIYQTSNFRVQPTESIVRFPNITNLCPFGEVFNATRFASVYAWNRKRISNCVADYSVLYNSASFSTFKCYGVSPTKLNDLCFTNVYADSFVIRGDEVRQIAPGQTGKIADYNYKLPDDFTGCVIAWNSNNLDSKVGGNYNYLYRLFRKSNLKPFERDISTEIYQAGSTPCNGVEGFNCYFPLQSYGFQPTNGVGYQPYRVVVLSFELLHAPATVCGPKKSTNLVKNKCVNFNFNGLTGTGVLTESNKKFLPFQQFGRDIADTTDAVRDPQTLEILDITPCSFGGVSVITPGTNTSNQVAVLYQDVNCTEVPVAIHADQLTPTWRVYSTGSNVFQTRAGCLIGAEHVNNSYECDIPIGAGICASYQTQTNSPRRARSVASQSIIAYTMSLGAENSVAYSNNSIAIPTNFTISVTTEILPVSMTKTSVDCTMYICGDSTECSNLLLQYGSFCTQLNRALTGIAVEQDKNTQEVFAQVKQIYKTPPIKDFGGFNFSQILPDPSKPSKRSFIEDLLFNKVTLADAGFIKQYGDCLGDIAARDLICAQKFNGLTVLPPLLTDEMIAQYTSALLAGTITSGWTFGAGAALQIPFAMQMAYRFNGCGVTQNVLYENQKLIANQFNSAIGKIQDSLSSTASALGKLQDVVNQNAQALNTLVKQLSSNFGAISSVLNDILSRLDKVEAEVQIDRLITGRLQSLQTYVTQQLIRAAEIRASANLAATKMSECVLGQSKRVDFCGKGCHLMSFPQSAPHGVVFLHVTYVPAQEKNFTTAPAICHDGKAHFPREGVFVSNGTHWFVTQRNFYEPQIITTDNTFVSGNCDVVIGIVNNTVYDPLQPELESFKEELDKYFKNHTSPDVDLGDISGINASVVNIQKEIDRLNEVAKNLNESLIDLQELGKYEQYIKGGGGSDIIKLLNEQVNKEMQSSNLYMSMSSWCYTHSLDGAGLFLFDHAAEEYEHAKKLIIFLNENNVPVQLTSISAPEHKFEGLTQIFQKAYEHEQHISESINNIVDHAIKSKDHATFNFLQWYVAEQHEEEVLFKDILDKIELIGNENHGLYLADQYVKGIAKSRKS

SEQ ID NO: 5270 - protein, 1379 aa, Artificial Sequence
  SARS-CoV-2/2019-nCoV/USA-CruiseA-18/2020__MT159716.1 spike protein (1-1211)(I909C_Y1047C) Ferritin construct
MFVFLVLLPLVSSQCVNLTTRTQLPPAYTNSFTRGVYYPDKVFRSSVLHSTQDLFLPFFSNVTWFHAIHVSGTNGTKRFDNPVLPFNDGVYFASTEKSNIIRGWIFGTTLDSKTQSLLIVNNATNVVIKVCEFQFCNDPFLGVYYHKNNKSWMESELRVYSSANNCTFEYVSQPFLMDLEGKQGNFKNLREFVFKNIDGYFKIYSKHTPINLVRDLPQGFSALEPLVDLPIGINITRFQTLLALHRSYLTPGDSSSGWTAGAAAYYVGYLQPRTFLLKYNENGTITDAVDCALDPLSETKCTLKSFTVEKGIYQTSNFRVQPTESIVRFPNITNLCPFGEVFNATRFASVYAWNRKRISNCVADYSVLYNSASFSTFKCYGVSPTKLNDLCFTNVYADSFVIRGDEVRQIAPGQTGKIADYNYKLPDDFTGCVIAWNSNNLDSKVGGNYNYLYRLFRKSNLKPFERDISTEIYQAGSTPCNGVEGFNCYFPLQSYGFQPTNGVGYQPYRVVVLSFELLHAPATVCGPKKSTNLVKNKCVNFNFNGLTGTGVLTESNKKFLPFQQFGRDIADTTDAVRDPQTLEILDITPCSFGGVSVITPGTNTSNQVAVLYQDVNCTEVPVAIHADQLTPTWRVYSTGSNVFQTRAGCLIGAEHVNNSYECDIPIGAGICASYQTQTNSPRRARSVASQSIIAYTMSLGAENSVAYSNNSIAIPTNFTISVTTEILPVSMTKTSVDCTMYICGDSTECSNLLLQYGSFCTQLNRALTGIAVEQDKNTQEVFAQVKQIYKTPPIKDFGGFNFSQILPDPSKPSKRSFIEDLLFNKVTLADAGFIKQYGDCLGDIAARDLICAQKFNGLTVLPPLLTDEMIAQYTSALLAGTITSGWTFGAGAALQIPFAMQMAYRFNGCGVTQNVLYENQKLIANQFNSAIGKIQDSLSSTASALGKLQDVVNQNAQALNTLVKQLSSNFGAISSVLNDILSRLDKVEAEVQIDRLITGRLQSLQTYVTQQLIRAAEIRASANLAATKMSECVLGQSKRVDFCGKGCHLMSFPQSAPHGVVFLHVTYVPAQEKNFTTAPAICHDGKAHFPREGVFVSNGTHWFVTQRNFYEPQIITTDNTFVSGNCDVVIGIVNNTVYDPLQPELDSFKEELDKYFKNHTSPDVDLGDISGINASVVNIQKEIDRLNEVAKNLNESLIDLQELGKYEQYIKGGGGSDIIKLLNEQVNKEMQSSNLYMSMSSWCYTHSLDGAGLFLFDHAAEEYEHAKKLIIFLNENNVPVQLTSISAPEHKFEGLTQIFQKAYEHEQHISESINNIVDHAIKSKDHATFNFLQWYVAEQHEEEVLFKDILDKIELIGNENHGLYLADQYVKGIAKSRKS

SEQ ID NO: 5271 - protein, 1379 aa, Artificial Sequence
  SARS-CoV-2/SARS-CoV-2/Yunnan-01/human/2020/CHN__MT049951.1 spike protein (1-1211)(I909C_Y1047C) Ferritin construct
MFVFLVLLPLVSSQCVNLTTRTQLPPANTNSFTRGVYYPDKVFRSSVLHSTQDLFLPFFSNVTWFHAIHVSGTNGTKRFDNPVLPFNDGVYFASTEKSNIIRGWIFGTTLDSKTQSLLIVNNATNVVIKVCEFQFCNDPFLGVYYHKNNKSWMESEFRVYSSANNCTFEYVSQPFLMDLEGKQGNFKNLREFVFKNIDGYFKIYSKHTPINLVRDLPQGFSALEPLVDLPIGINITRFQTLLALHRSYLTPGDSSSGWTAGAAAYYVGYLQPRTFLLKYNENGTITDAVDCALDPLSETKCTLKSFTVEKGIYQTSNFRVQPTESIVRFPNITNLCPFGEVFNATRFASVYAWNRKRISNCVADYSVLYNSASFSTFKCYGVSPTKLNDLCFTNVYADSFVIRGDEVRQIAPGQTGKIADYNYKLPDDFTGCVIAWNSNNLDSKVGGNYNYLYRLFRKSNLKPFERDISTEIYQAGSTPCNGVEGFNCYFPLQSYGFQPTNGVGYQPYRVVVLSFELLHAPATVCGPKKSTNLVKNKCVNFNFNGLTGTGVLTESNKKFLPFQQFGRDIADTTDAVRDPQTLEILDITPCSFGGVSVITPGTNTSNQVAVLYQDVNCTEVPVAIHADQLTPTWRVYSTGSNVFQTRAGCLIGAEHVNNSYECDIPIGAGICASYQTQTNSPRRARSVASQSIIAYTMSLGAENSVAYSNNSIAIPTNFTISVTTEILPVSMTKTSVDCTMYICGDSTECSNLLLQYGSFCTQLNRALTGIAVEQDKNTQEVFAQVKQIYKTPPIKDFGGFNFSQILPDPSKPSKRSFIEDLLFNKVTLADAGFIKQYGDCLGDIAARDLICAQKFNGLTVLPPLLTDEMIAQYTSALLAGTITSGWTFGAGAALQIPFAMQMAYRFNGCGVTQNVLYENQKLIANQFNSAIGKIQDSLSSTASALGKLQDVVNQNAQALNTLVKQLSSNFGAISSVLNDILSRLDKVEAEVQIDRLITGRLQSLQTYVTQQLIRAAEIRASANLAATKMSECVLGQSKRVDFCGKGCHLMSFPQSAPHGVVFLHVTYVPAQEKNFTTAPAICHDGKAHFPREGVFVSNGTHWFVTQRNFYEPQIITTDNTFVSGNCDVVIGIVNNTVYDPLQPELDSFKEELDKYFKNHTSPDVDLGDISGINASVVNIQKEIDRLNEVAKNLNESLIDLQELGKYEQYIKGGGGSDIIKLLNEQVNKEMQSSNLYMSMSSWCYTHSLDGAGLFLFDHAAEEYEHAKKLIIFLNENNVPVQLTSISAPEHKFEGLTQIFQKAYEHEQHISESINNIVDHAIKSKDHATFNFLQWYVAEQHEEEVLFKDILDKIELIGNENHGLYLADQYVKGIAKSRKS

SEQ ID NO: 5272 - protein, 1379 aa, Artificial Sequence
  SARS-CoV-2/USA/WA-UW292/2020__EPI_ISL_418077 spike protein (1-1211)(I909C_Y1047C) Ferritin construct
MFVFLVLLPLVSSQCVNLTTRTQLPPAYTNSFTRGVYYPDKVFRSSVLHSTQDLFLPFFSNVTWFHAIHVSGTNGTKRFDNPVLPFNDGVYFASTEKSNIIRGWIFGTTLDSKTQSLLIVNNATNVVIKVCEFQFCNDPFLGVYYHKNNKSWMESEFRVYSSANNCTFEYVSQPFLMDLEGKQGNFKNLREFVFKNIDGYFKIYSKHTPINLVRDLPQGFSALEPLVDLPIGINITRFQTLLALHRSYLTPGDSSSGWTAGAAAYYVGYLQPRTFLLKYNENGTITDAVDCALDPLSETKCTLKSFTVEKGIYQTSNFRVQPTESIVRFPNITNLCPFGEVFNATRFASVYAWNRKRISNCVADYSVLYNSASFSTFKCYGVSPTKLNDLCFTNVYADSFVIRGDEVRQIAPGQTGKIADYNYKLPDDFTGCVIAWNSNNLDSKVGGNYNYLYRLFRKSNLKPFERDISTEIYQASSTPCNGVEGFNCYFPLQSYGFQPTNGVGYQPYRVVVLSFELLHAPATVCGPKKSTNLVKNKCVNFNFNGLTGTGVLTESNKKFLPFQQFGRDIADTTDAVRDPQTLEILDITPCSFGGVSVITPGTNTSNQVAVLYQDVNCTEVPVAIHADQLTPTWRVYSTGSNVFQTRAGCLIGAEHVNNSYECDIPIGAGICASYQTQTNSPRRARSVASQSIIAYTMSLGAENSVAYSNNSIAIPTNFTISVTTEILPVSMTKTSVDCTMYICGDSTECSNLLLQYGSFCTQLNRALTGIAVEQDKNTQEVFAQVKQIYKTPPIKDFGGFNFSQILPDPSKPSKRSFIEDLLFNKVTLADAGFIKQYGDCLGDIAARDLICAQKFNGLTVLPPLLTDEMIAQYTSALLAGTITSGWTFGAGAALQIPFAMQMAYRFNGCGVTQNVLYENQKLIANQFNSAIGKIQDSLSSTASALGKLQDVVNQNAQALNTLVKQLSSNFGAISSVLNDILSRLDKVEAEVQIDRLITGRLQSLQTYVTQQLIRAAEIRASANLAATKMSECVLGQSKRVDFCGKGCHLMSFPQSAPHGVVFLHVTYVPAQEKNFTTAPAICHDGKAHFPREGVFVSNGTHWFVTQRNFYEPQIITTDNTFVSGNCDVVIGIVNNTVYDPLQPELDSFKEELDKYFKNHTSPDVDLGDISGINASVVNIQKEIDRLNEVAKNLNESLIDLQELGKYEQYIKGGGGSDIIKLLNEQVNKEMQSSNLYMSMSSWCYTHSLDGAGLFLFDHAAEEYEHAKKLIIFLNENNVPVQLTSISAPEHKFEGLTQIFQKAYEHEQHISESINNIVDHAIKSKDHATFNFLQWYVAEQHEEEVLFKDILDKIELIGNENHGLYLADQYVKGIAKSRKS

SEQ ID NO: 5273 - protein, 1379 aa, Artificial Sequence
  SARS-CoV-2/Iceland/192/2020__EPI_ISL_417819 spike protein (1-1211)(I909C_Y1047C) Ferritin construct
MFVFFVLLPLVSSQCVNLTTRTQLPPAYTNSFTRGVYYPDKVFRSSVLHSTQDLFLPFFSNVTWFHAIHVSGTNGTKRFDNPVLPFNDGVYFASTEKSNIIRGWIFGTTLDSKTQSLLIVNNATNVVIKVCEFQFCNDPFLGVYYHKNNKSWMESEFRVYSSANNCTFEYVSQPFLMDLEGKQGNFKNLREFVFKNIDGYFKIYSKHTPINLVRDLPQGFSALEPLVDLPIGINITRFQTLLALHRSYLTPGDSSSGWTAGAAAYYVGYLQPRTFLLKYNENGTITDAVDCALDPLSETKCTLKSFTVEKGIYQTSNFRVQPTESIVRFPNITNLCPFGEVFNATRFASVYAWNRKRISNCVADYSVLYNSASFSTFKCYGVSPTKLNDLCFTNVYADSFVIRGDEVRQIAPGQTGKIADYNYKLPDDFTGCVIAWNSNNLDSKVGGNYNYLYRLFRKSNLKPFERDISTEIYQAGSTPCNGVEGFNCYFPLQSYGFQPTNGVGYQPYRVVVLSFELLHAPATVCGPKKSTNLVKNKCVNFNFNGLTGTGVLTESNKKFLPFQQFGRDIADTTDAVRDPQTLEILDITPCSFGGVSVITPGTNTSNQVAVLYQGVNCTEVPVAIHADQLTPTWRVYSTGSNVFQTRAGCLIGAEHVNNSYECDIPIGAGICASYQTQTNSPRRARSVASQSIIAYTMSLGAENSVAYSNNSIAIPTNFTISVTTEILPVSMTKTSVDCTMYICGDSTECSNLLLQYGSFCTQLNRALTGIAVEQDKNTQEVFAQVKQIYKTPPIKDFGGFNFSQILPDPSKPSKRSFIEDLLFNKVTLADAGFIKQYGDCLGDIAARDLICAQKFNGLTVLPPLLTDEMIAQYTSALLAGTITSGWTFGAGAALQIPFAMQMAYRFNGCGVTQNVLYENQKLIANQFNSAIGKIQDSLSSTASALGKLQDVVNQNAQALNTLVKQLSSNFGAISSVLNDILSRLDKVEAEVQIDRLITGRLQSLQTYVTQQLIRAAEIRASANLAATKMSECVLGQSKRVDFCGKGCHLMSFPQSAPHGVVFLHVTYVPAQEKNFTTAPAICHDGKAHFPREGVFVSNGTHWFVTQRNFYEPQIITTDNTFVSGNCDVVIGIVNNTVYDPLQPELDSFKEELDKYFKNHTSPDVDLGDISGINASVVNIQKEIDRLNEVAKNLNESLIDLQELGKYEQYIKGGGGSDIIKLLNEQVNKEMQSSNLYMSMSSWCYTHSLDGAGLFLFDHAAEEYEHAKKLIIFLNENNVPVQLTSISAPEHKFEGLTQIFQKAYEHEQHISESINNIVDHAIKSKDHATFNFLQWYVAEQHEEEVLFKDILDKIELIGNENHGLYLADQYVKGIAKSRKS

SEQ ID NO: 5274 - protein, 1379 aa, Artificial Sequence
  SARS-CoV-2/Belgium/ULG-6939/2020__EPI_ISL_417020 spike protein (1-1211)(I909C_Y1047C) Ferritin construct
MFVFLVLLPLVSSQCVNLTTRTQLPPAYTNSFTRGVYYPDKVFRSSVLHSTQDLFLPFFSNVTWFHAIHVSGTNGTKRFDNPVLPFNDGVYFASTEKSNIIRGWIFGTTLDSKTQSLLIVNNATNVVIKVCEFQFCNDPFLGVYYHKNNKSWMESEFRVYSSANNCTFEYVSQPFLMDLEGKQGNFKNLREFVFKNIDGYFKIYSKHTPINLVRDLPQGFSALEPLVDLPIGINITRFQTLLALHRSYLTPGDSSSGWTAGAAAYYVGYLQPRTFLLKYNENGTITDAVDCALDPLSETKCTLKSFTVEKGIYQTSNFRVQPTESIVRFPNITNLCPFGEVFNATRFASVYAWNRKRISNCVADYSVLYNSASFSTFKCYGVSPTKLNDLCFTNVYADSFVIRGDEVRQIAPGQTGKIADYNYKLPDDFTGCVIAWNSNNLDSKVGGNYNYLYRLFRKSNLKPFERDISTEIYQAGSTPCNGVEGFNCYFPLQSYGFQPTNGVGYQPYRVVVLSFELLHAPATVCGPKKSTNLVKNKCVNFNFNGLTGTGVLTESNKKFLPFQQFGRDIADTTDAVRDPQTLEILDITPCSFGGVSVITPGTNTSNQVAVLYQGVNCTEVPVAIHADQLTPTWRVYSTGSNVFQTRAGCLIGAEHVNNSYECDIPIGAGICASYQTQTNSPRRARSVASQSIIAYTMSLGAENSVVYSNNSIAIPTNFTISVTTEILPVSMTKTSVDCTMYICGDSTECSNLLLQYGSFCTQLNRALTGIAVEQDKNTQEVFAQVKQIYKTPPIKDFGGFNFSQILPDPSKPSKRSFIEDLLFNKVTLADAGFIKQYGDCLGDIAARDLICAQKFNGLTVLPPLLTDEMIAQYTSALLAGTITSGWTFGAGAALQIPFAMQMAYRFNGCGVTQNVLYENQKLIANQFNSAIGKIQDSLSSTASALGKLQDVVNQNAQALNTLVKQLSSNFGAISSVLNDILSRLDKVEAEVQIDRLITGRLQSLQTYVTQQLIRAAEIRASANLAATKMSECVLGQSKRVDFCGKGCHLMSFPQSAPHGVVFLHVTYVPAQEKNFTTAPAICHDGKAHFPREGVFVSNGTHWFVTQRNFYEPQIITTDNTFVSGNCDVVIGIVNNTVYDPLQPELDSFKEELDKYFKNHTSPDVDLGDISGINASVVNIQKEIDRLNEVAKNLNESLIDLQELGKYEQYIKGGGGSDIIKLLNEQVNKEMQSSNLYMSMSSWCYTHSLDGAGLFLFDHAAEEYEHAKKLIIFLNENNVPVQLTSISAPEHKFEGLTQIFQKAYEHEQHISESINNIVDHAIKSKDHATFNFLQWYVAEQHEEEVLFKDILDKIELIGNENHGLYLADQYVKGIAKSRKS

SEQ ID NO: 5275 - protein, 1379 aa, Artificial Sequence
  SARS-CoV-2/France/HF2496/2020__EPI_ISL_418231 spike protein (1-1211)(I909C_Y1047C) Ferritin construct
MFVFLVLLPLVSSQCVNLTTRTQLPPAYTNSFTRGVYYPDKVFRSSVLHSTQDLFLPFFSNVTWFHAIHVSGTNGTKRFDNPVLPFNDGVYFASTEKSNIIRGWIFGTTLDSKTQSLLIVNNATNVVIKVCEFQFCNDPFLGVYYHKNNKSWMESEFRVYSSANNCTFEYVSQPFLMDLEGKQGNFKNLREFVFKNIDGYFKIYSKHTPINLVRDLPQGFSALEPLVDLPIGINITRFQTLLALHRSYLTPGDSSSGWTAGAAAYYVGYLQPRTFLLKYNENGTITDAVDCALDPLSETKCTLKSFTVEKGIYQTSNFRVQPTESIVRFPNITNLCPFGEVFNATRFASVYAWNRKRISNCVADYSVLYNSASFSTFKCYGVSPTKLNDLCFTNVYADSFVIRGDEVRQIAPGQTGKIADYNYKLPDDFTGCVIAWNSNNLDSKVGGNYNYLYRLFRKSNLKPFERDISTEIYQAGSTPCNGVEGFNCYFPLQSYGFQPTNGVGYQPYRVVVLSFELLHAPATVCGPKKSTNLVKNKCVNFNFNGLTGTGVLTESNKKFLPFQQFGRDIADTTDAVRDPQTLEILDITPCSFGGVSVITPGTNTSNQVAVLYQGVNCTEVPVAIHADQLTPTWRVYSTGSNVFQTRAGCLIGAEHVNNSYECDIPIGAGICASYQTQTNSPRRARSVASQSIIAYTMSLGAENSVAYSNNSIAIPTNFTISVTTEILPVSMTKTSVDCTMYICGDSTECSNLLLQYGSFCTQLNRALTGIAVEQDKNTQEVFAQVKQIYKTPPIKDFGGFNFSQILPDPSKPSKRSFIEDLLFNKVTLADAGFIKQYGDCLGDIVARDLICAQKFNGLTVLPPLLTDEMIAQYTSALLAGTITSGWTFGAGAALQIPFAMQMAYRFNGCGVTQNVLYENQKLIANQFNSAIGKIQDSLSSTASALGKLQDVVNQNAQALNTLVKQLSSNFGAISSVLNDILSRLDKVEAEVQIDRLITGRLQSLQTYVTQQLIRAAEIRASANLAATKMSECVLGQSKRVDFCGKGCHLMSFPQSAPHGVVFLHVTYVPAQEKNFTTAPAICHDGKAHFPREGVFVSNGTHWFVTQRNFYEPQIITTDNTFVSGNCDVVIGIVNNTVYDPLQPELDSFKEELDKYFKNHTSPDVDLGDISGINASVVNIQKEIDRLNEVAKNLNESLIDLQELGKYEQYIKGGGGSDIIKLLNEQVNKEMQSSNLYMSMSSWCYTHSLDGAGLFLFDHAAEEYEHAKKLIIFLNENNVPVQLTSISAPEHKFEGLTQIFQKAYEHEQHISESINNIVDHAIKSKDHATFNFLQWYVAEQHEEEVLFKDILDKIELIGNENHGLYLADQYVKGIAKSRKS

SEQ ID NO: 5276 - protein, 1379 aa, Artificial Sequence
  SARS-CoV-2/USA/WA-UW291/2020__EPI_ISL_418076 spike protein (1-1211)(I909C_Y1047C) Ferritin construct
MFVFLVLLPLVSSQCVNLTTRTQLPPAYTNSFTRGVYYPDKVFRSSVLHSTQDLFLPFFSNVTWFHAIHVSGTNGTKRFDNPVLPFNDGVYFASTEKSNIIRGWIFGTTLDSKTQSLLIVNNATNVVIKVCEFQFCNDPFLGVYYHKNNKSWMESEFRVYSSANNCTFEYVSQPFLMDLEGKQGNFKNLREFVFKNIDGYFKIYSKHTPINLVRDLPQGFSALEPLVDLPIGINITRFQTLLALHRSYLTPGDSSSGWTAGAAAYYVGYLQPRTFLLKYNENGTITDAVDCALDPLSETKCTLKSFTVEKGIYQTSNFRVQPTESIVRFPNITNLCPFGEVFNATRFASVYAWNRKRISNCVADYSVLYNSASFSTFKCYGVSPTKLNDLCFTNVYADSFVIRGDEVRQIAPGQTGKIADYNYKLPDDFTGCVIAWNSNNLDSKVGGNYNYLYRLFRKSNLKPFERDISTEIYQAGSTPCNGVEGFNCYFPLQSYGFQPTNGVGYQPYRVVVLSFELLHAPATVCGPKKSTNLVKNKCVNFNFNGLTGTGVLTESNKKFLPFQQFGRDIADTTDAVRDPQTLEILDITPCSFGGVSVITPGTNTSNQVAVLYQGVNCTEVPVAIHADQLTPTWRVYSTGSNVFQTRAGCLIGAEHVNNSYECDIPIGAGICASYQTQTNSPRRARSVASQSIIAYTMSLGAENSVAYSNNSIAIPTNFTISVTTEILPVSMTKTSVDCTMYICGDSTECSNLLLQYGSFCTQLNRALTGIAVEQDKNTQEVFAQVKQIYKTPPIKDFGGFNFSQILPDPSKPSKRSFIEDLLFNKVTLADAGFIKQYGDCLGDIAARDLICAQKFNGLTVLPPLLTDEMIAQYTSALLAGTITSGWTFGAGAALQIPFAMQMAYRFNGCGVTQNVLYENQKLIANQFNSAIGKIQYSLSSTASALGKLQDVVNQNAQALNTLVKQLSSNFGAISSVLNDILSRLDKVEAEVQIDRLITGRLQSLQTYVTQQLIRAAEIRASANLAATKMSECVLGQSKRVDFCGKGCHLMSFPQSAPHGVVFLHVTYVPAQEKNFTTAPAICHDGKAHFPREGVFVSNGTHWFVTQRNFYEPQIITTDNTFVSGNCDVVIGIVNNTVYDPLQPELDSFKEELDKYFKNHTSPDVDLGDISGINASVVNIQKEIDRLNEVAKNLNESLIDLQELGKYEQYIKGGGGSDIIKLLNEQVNKEMQSSNLYMSMSSWCYTHSLDGAGLFLFDHAAEEYEHAKKLIIFLNENNVPVQLTSISAPEHKFEGLTQIFQKAYEHEQHISESINNIVDHAIKSKDHATFNFLQWYVAEQHEEEVLFKDILDKIELIGNENHGLYLADQYVKGIAKSRKS

SEQ ID NO: 5277 - protein, 1379 aa, Artificial Sequence; identical to SEQ ID NO: 5240
  SARS-CoV-2/Portugal/PT0034/2020__EPI_ISL_418019 spike protein (1-1211)(I909C_Y1047C) Ferritin construct

SEQ ID NO: 5278 - protein, 1379 aa, Artificial Sequence
  SARS-CoV-2/Iceland/202/2020__EPI_ISL_417750 spike protein (1-1211)(I909C_Y1047C) Ferritin construct
MFVFLVLLPLVSSQCVNLTTRTQLPPAYTNSFTRGVYYPDKVFRSSVLHSTQDLFLPFFSNVTWFHAIHVSGTNGTKRFDNPVLPFNDGVYFASTEKSNIIRGWIFGTTLDSKTQSLLIVNNATNVVIKVCEFQFCNDPFLGVYYHKNNKSWMESEFRVYSSANNCTFEYVSQPFLMDLEGKQGNFKNLREFVFKNIDGYFKIYSKHTPINLVRDLPQGFSALEPLVDLPIGINITRFQTLLALHRSYLTPGDSSSGWTAGAAAYYVGYLQPRTFLLKYNENGTITDAVDCALDPLSETKCTLKSFTVEKGIYQTSNFRVQPTESIVRFPNITNLCPFGEVFNATRFASVYAWNRKRISNCVADYSVLYNSASFSTFKCYGVSPTKLNDLCFTNVYADSFVIRGDEVRQIAPGQTGKIADYNYKLPDDFTGCVIAWNSNNLDSKVGGNYNYLYRLFRKSNLKPFERDISTEIYQAGSTPCNGVEGFNCYFPLQSYGFQPTNGVGYQPYRVVVLSFELLHAPATVCGPKKSTNLVKNKCVNFNFNGLTGTGVLTESNKKFLPFQQFGRDIADTTDAVRDPQTLEILDITPCSFGGVSVITPGTNTSNQVAVLYQDVNCTEVPVAIHADQLTPTWRVYSTGSNVFQTRAGCLIGAEHVNNSYECDIPIGAGICASYQTQTNSPRRARSVASQSIIAYTMSLGAENSVAYSNNSIAIPTNFTISVTTEILPVSMTKTSVDCTMYICGDSTECSNLLLQYGSFCTQLNRALTGIAVEQDKNTQEVFAQVKQIYKTPPIKDFGGFNFSQILPDPSKPSKRSFIEDLLFNKVTLADAGFIKQYGDCLGDIAARDLICAQKFNGLTVLPPLLTDEMIAQYTSALLAGTITSGWTFGAGAALQIPFAMQMAYRFNGCGVTQNVLYENQKLIANQFNSAIGKIQDSLSSTASALGKLQDVVNQNAQALNTLVKQLSSNFGAISSVLNDILSRLDKVEAEVQIDRLITGRLQSLQTYVTQQLIRAAEIRASANLAATKMSECVLGQSKRVDFCGKGCHLMSFPQSAPHGVVFLHVTYVPAQEKNFTTAPAICHDGKAHFPREGVFVSNGTHWFVTQRNFYEPQIITTDNTFVSGNCDVVIGIVNNTVYDPLQPELDSFKEELDKYFKNHTSPDVDLGDIPGINASVVNIQKEIDRLNEVAKNLNESLIDLQELGKYEQYIKGGGGSDIIKLLNEQVNKEMQSSNLYMSMSSWCYTHSLDGAGLFLFDHAAEEYEHAKKLIIFLNENNVPVQLTSISAPEHKFEGLTQIFQKAYEHEQHISESINNIVDHAIKSKDHATFNFLQWYVAEQHEEEVLFKDILDKIELIGNENHGLYLADQYVKGIAKSRKS

SEQ ID NO: 5279 - protein, 1379 aa, Artificial Sequence
  SARS-CoV-2/USA/WA-UW261/2020__EPI_ISL_418046 spike protein (1-1211)(I909C_Y1047C) Ferritin construct
MFVFLVLLPLVSSQCVNLTTRTQLPPAYTNSFTRGVYYPDKVFRSSVLHSTQDLFLPFFSNVTWFHAIHVSGTNGTKRFDNPVLPFNDGVYFASTEKSNIIRGWIFGTTLDSKTQSLLIVNNATNVVIKVCEFQFCNDPFLGVYYHKNNKSWMESEFRVYSSANNCTFEYVSQPFLMDLEGKQGNFKNLREFVFKNIDGYFKIYSKHTPINLVRDLPQGFSALEPLVDLPIGINITRFQTLLALHRSYLTPGDSSSGWTAGAAAYYVGYLQPRTFLLKYNENGTITDAVDCALDPLSETKCTLKSFTVEKGIYQTSNFRVQPTESIVRFPNITNLCPFGEVFNATRFTSVYAWNRKRISNCVADYSVLYNSASFSTFKCYGVSPTKLNDLCFTNVYADSFVIRGDEVRQIAPGQTGKIADYNYKLPDDFTGCVIAWNSNNLDSKVGGNYNYLYRLFRKSNLKPFERDISTEIYQAGSTPCNGVEGFNCYFPLQSYGFQPTNGVGYQPYRVVVLSFELLHAPATVCGPKKSTNLVKNKCVNFNFNGLTGTGVLTESNKKFLPFQQFGRDIADTTDAVRDPQTLEILDITPCSFGGVSVITPGTNTSNQVAVLYQDVNCTEVPVAIHADQLTPTWRVYSTGSNVFQTRAGCLIGAEHVNNSYECDIPIGAGICASYQTQTNSPRRARSVASQSIIAYTMSLGAENSVAYSNNSIAIPTNFTISVTTEILPVSMTKTSVDCTMYICGDSTECSNLLLQYGSFCTQLNRALTGIAVEQDKNTQEVFAQVKQIYKTPPIKDFGGFNFSQILPDPSKPSKRSFIEDLLFNKVTLADAGFIKQYGDCLGDIAARDLICAQKFNGLTVLPPLLTDEMIAQYTSALLAGTITSGWTFGAGAALQIPFAMQMAYRFNGCGVTQNVLYENQKLIANQFNSAIGKIQDSLSSTASALGKLQDVVNQNAQALNTLVKQLSSNFGAISSVLNDILSRLDKVEAEVQIDRLITGRLQSLQTYVTQQLIRAAEIRASANLAATKMSECVLGQSKRVDFCGKGCHLMSFPQSAPHGVVFLHVTYVPAQEKNFTTAPAICHDGKAHFPREGVFVSNGTHWFVTQRNFYEPQIITTDNTFVSGNCDVVIGIVNNTVYDPLQPELDSFKEELDKYFKNHTSPDVDLGDISGINASVVNIQKEIDRLNEVAKNLNESLIDLQELGKYEQYIKGGGGSDIIKLLNEQVNKEMQSSNLYMSMSSWCYTHSLDGAGLFLFDHAAEEYEHAKKLIIFLNENNVPVQLTSISAPEHKFEGLTQIFQKAYEHEQHISESINNIVDHAIKSKDHATFNFLQWYVAEQHEEEVLFKDILDKIELIGNENHGLYLADQYVKGIAKSRKS

SEQ ID NO: 5280 - protein, 1379 aa, Artificial Sequence
  SARS-CoV-2/Portugal/PT0035/2020__EPI_ISL_418020 spike protein (1-1211)(I909C_Y1047C) Ferritin construct
MFVFLVLLPLVSSQCVNLTTRTQLPPAYTNSFTRGVYYPDKVFRSSVLHSTQDLFLPFFSNVTWFHAIHVSGTNGTKRFDNPVLPFNDGVYFASTEKSNIIRGWIFGTTLDSKTQSLLIVNNATNVVIKVCEFQFCNDPFLGVYYHKNNKSWMESEFRVYSSANNCTFEYVSQPFLMDLEGKQGNFKNLREFVFKNIDGYFKIYSKHTPINLVRDLPQGFSALEPLVDLPIGINITRFQTLLALHRSYLTPGDSSSGWTAGAAAYYVGYLQPRTFLLKYNENGTITDAVDCALDPLSETKCTLKSFTVEKGIYQTSNFRVQPTESIVRFPNITNLCPFGEVFNATRFASVYAWNRKRISNCVADYSVLYNSASFSTFKCYGVSPTKLNDLCFTNVYADSFVIRGDEVRQIAPGQTGKIADYNYKLPDDFTGCVIAWNSNNLDSKVGGNYNYLYRLFRKSNLKPFERDISTEIYQAGSTPCNGVEGFNCYFPLQSYGFQPTNGVGYQPYRVVVLSFELLHAPATVCGPKKSTNLVKNKCVNFNFNGLTGTGVLTESNKKFLPFQQFGRDIADTTDAVRDPQTLEILDITPCSFGGVSVITPGTNTSNQVAVLYQDVNCTEVPVAIHADQLTPTWRVYSTGSNVFQTRAGCLIGAEHVNNSYECDIPIGAGICASYQTQTNSPRRARSVASQSIIAYTMSLGAENSVAYSNNSIAIPTNFTISVTTEILPVSMTKTSVDCTMYICGDSTECSNLLLQYGSFCTQLNRALTGIAVEQDKNTQEVFAQVKQIYKTPPIKDFGGFNFSQILPDPSKPSKRSFIEDLLFNKVTLADAGFIKQYGDCLGDISARDLICAQKFNGLTVLPPLLTDEMIAQYTSALLAGTITSGWTFGAGAALQIPFAMQMAYRFNGCGVTQNVLYENQKLIANQFNSAIGKIQDSLSSTASALGKLQDVVNQNAQALNTLVKQLSSNFGAISSVLNDILSRLDKVEAEVQIDRLITGRLQSLQTYVTQQLIRAAEIRASANLAATKMSECVLGQSKRVDFCGKGCHLMSFPQSAPHGVVFLHVTYVPAQEKNFTTAPAICHDGKAHFPREGVFVSNGTHWFVTQRNFYEPQIITTDNTFVSGNCDVVIGIVNNTVYDPLQPELDSFKEELDKYFKNHTSPDVDLGDISGINASVVNIQKEIDRLNEVAKNLNESLIDLQELGKYEQYIKGGGGSDIIKLLNEQVNKEMQSSNLYMSMSSWCYTHSLDGAGLFLFDHAAEEYEHAKKLIIFLNENNVPVQLTSISAPEHKFEGLTQIFQKAYEHEQHISESINNIVDHAIKSKDHATFNFLQWYVAEQHEEEVLFKDILDKIELIGNENHGLYLADQYVKGIAKSRKS

SEQ ID NO: 5281 - protein, 1379 aa, Artificial Sequence
  SARS-CoV-2/USA/NY-NYUMC7/2020__EPI_ISL_418192 spike protein (1-1211)(I909C_Y1047C) Ferritin construct
MFVFLVLLPLVSSQCVNLTTRTQLPPAYTNSFTRGVYYPDKVFRSSVLHSTQDLFLPFFSNVTWFHAIHVSGTNGTKRFDNPVLPFNDGVYFASTEKSNIIRGWIFGTTLDSKTQSLLIVNNATNVVIKVCEFQFCNDPFLGVYHHKNNKSWMESEFRVYSSANNCTFEYVSQPFLMDLEGKQGNFKNLREFVFKNIDGYFKIYSKHTPINLVRDLPQGFSALEPLVDLPIGINITRFQTLLALHRSYLTPGDSSSGWTAGAAAYYVGYLQPRTFLLKYNENGTITDAVDCALDPLSETKCTLKSFTVEKGIYQTSNFRVQPTESIVRFPNITNLCPFGEVFNATRFASVYAWNRKRISNCVADYSVLYNSASFSTFKCYGVSPTKLNDLCFTNVYADSFVIRGDEVRQIAPGQTGKIADYNYKLPDDFTGCVIAWNSNNLDSKVGGNYNYLYRLFRKSNLKPFERDISTEIYQAGSTPCNGVEGFNCYFPLQSYGFQPTNGVGYQPYRVVVLSFELLHAPATVCGPKKSTNLVKNKCVNFNFNGLTGTGVLTESNKKFLPFQQFGRDIADTTDAVRDPQTLEILDITPCSFGGVSVITPGTNTSNQVAVLYQGVNCTEVPVAIHADQLTPTWRVYSTGSNVFQTRAGCLIGAEHVNNSYECDIPIGAGICASYQTQTNSPRRARSVASQSIIAYTMSLGAENSVAYSNNSIAIPTNFTISVTTEILPVSMTKTSVDCTMYICGDSTECSNLLLQYGSFCTQLNRALTGIAVEQDKNTQEVFAQVKQIYKTPPIKDFGGFNFSQILPDPSKPSKRSFIEDLLFNKVTLADAGFIKQYGDCLGDIAARDLICAQKFNGLTVLPPLLTDEMIAQYTSALLAGTITSGWTFGAGAALQIPFAMQMAYRFNGCGVTQNVLYENQKLIANQFNSAIGKIQDSLSSTASALGKLQDVVNQNAQALNTLVKQLSSNFGAISSVLNDILSRLDKVEAEVQIDRLITGRLQSLQTYVTQQLIRAAEIRASANLAATKMSECVLGQSKRVDFCGKGCHLMSFPQSAPHGVVFLHVTYVPAQEKNFTTAPAICHDGKAHFPREGVFVSNGTHWFVTQRNFYEPQIITTDNTFVSGNCDVVIGIVNNTVYDPLQPELDSFKEELDKYFKNHTSPDVDLGDISGINASVVNIQKEIDRLNEVAKNLNESLIDLQELGKYEQYIKGGGGSDIIKLLNEQVNKEMQSSNLYMSMSSWCYTHSLDGAGLFLFDHAAEEYEHAKKLIIFLNENNVPVQLTSISAPEHKFEGLTQIFQKAYEHEQHISESINNIVDHAIKSKDHATFNFLQWYVAEQHEEEVLFKDILDKIELIGNENHGLYLADQYVKGIAKSRKS

SEQ ID NO: 5282 - protein, 1379 aa, Artificial Sequence
  SARS-CoV-2/Iceland/189/2020__EPI_ISL_417709 spike protein (1-1211)(I909C_Y1047C) Ferritin construct
MFVFLVLLPLVSSQCVNLTTRTQLPPAYTNSFTRGVYYPDKVFRSSVLHSTQDLFLPFFSNVTWFHAIHVSGTNGTKRFDNPVLPFNDGVYFASTEKSNIIRGWIFGTTLDSKTQSLLIVNNATNVVIKVCEFQFCNDPFLGVYYHKNNKSWMESEFRVYSSANNCTFEYVSQPFLMDLEGKQGNFKNLREFVFKNIDGYFKIYSKHTPINLVRDLPQGFSALEPLVDLPIGINITRFQTLLALHRSYLTPGDSSSGWTAGAAAYYVGYLQPRTFLLKYNENGTITDAVDCALDPLSETKCTLKSFTVEKGIYQTSNFRVQPTESIVRFPNITNLCPFGEVFNATRFASVYAWNRKRISNCVADYSVLYNSASFSTFKCYGVSPTKLNDLCFTNVYADSFVIRGDEVRQIAPGQTGKIADYNYKLPDDFTGCVIAWNSNNLDSKVGGNYNYLYRLFRKSNLKPFERDISTEIYQAGSTPCNGVEGFNCYFPLQSYGFQPTNGVGYQPYRVVVLSFELLHAPATVCGPKKSTNLVKNKCVNFNFNGLTGTGVLTESNKKFLPFQQFGRDIADTTDAVRDPQTLEILDITPCSFGGVSVITPGTNTSNQVAVLYQGVNCTEVPVAIHADQLTPTWRVYSTGSNVFQTRAGCLIGAEHVNNSYECDIPIGAGICASYQTQTNSPRRARSVASQSIIAYTMSLGAENSVAYSNNSIAIPTNFTISVTTEILPVSMTKTSVDCTMYICGDSTECSNLLLQYGSFCTQLNRALTGIAVEQDKNTQEVFAQVKQIYKTPPIKDFGGFNFSQILPDPSKPSKRSFIEDLLFNKVTLADAGFTKQYGDCLGDIAARDLICAQKFNGLTVLPPLLTDEMIAQYTSALLAGTITSGWTFGAGAALQIPFAMQMAYRFNGCGVTQNVLYENQKLIANQFNSAIGKIQDSLSSTASALGKLQDVVNQNAQALNTLVKQLSSNFGAISSVLNDILSRLDKVEAEVQIDRLITGRLQSLQTYVTQQLIRAAEIRASANLAATKMSECVLGQSKRVDFCGKGCHLMSFPQSAPHGVVFLHVTYVPAQEKNFTTAPAICHDGKAHFPREGVFVSNGTHWFVTQRNFYEPQIITTDNTFVSGNCDVVIGIVNNTVYDPLQPELDSFKEELDKYFKNHTSPDVDLGDISGINASVVNIQKEIDRLNEVAKNLNESLIDLQELGKYEQYIKGGGGSDIIKLLNEQVNKEMQSSNLYMSMSSWCYTHSLDGAGLFLFDHAAEEYEHAKKLIIFLNENNVPVQLTSISAPEHKFEGLTQIFQKAYEHEQHISESINNIVDHAIKSKDHATFNFLQWYVAEQHEEEVLFKDILDKIELIGNENHGLYLADQYVKGIAKSRKS

SEQ ID NO: 5283 - protein, 1379 aa, Artificial Sequence
  SARS-CoV-2/Australia/NSW56/2020__EPI_ISL_417408 spike protein (1-1211)(I909C_Y1047C) Ferritin construct
MFVFLVLLPLVSSQCVNLTTRTQLPPAYTNSFTRGVYYPDKVFRSSVLHSTQDLFLPFFSNVTWFHAIHVSGTNGTKRFDNPVLPFNDGVYFASTEKSNIIRGWIFGTTLDSKTQSLLIVNNATNVVIKVCEFQFCNDPFLGVYYHKNNKSWMESEFRVYSSANNCTFEYVSQPFLMDLEGKQGNFKNLREFVFKNIDGYFKIYSKHTPINLVRDLPQGFSALEPLVDLPIGINITRFQTLLALHRSYLTPGDSSSGWTAGAAAYYVGYLQPRTFLLKYNENGTITDAVDCALDPLSETKCTLKSFTVEKGIYQTSNFRVQPTESIVRFPNITNLCPFGEVFNATRFASVYAWNRKRISNCVADYSVLYNSASFSTFKCYGVSPTKLNDLCFTNVYADSFVIRGDEVRQIAPGQTGKIADYNYKLPDDFTGCVIAWNSNNLDSKVGGNYNYLYRLFRKSNLKPFERDISTEIYQAGSTPCNGVEGFNCYFPLQSYGFQPTNGVGYQPYRVVVLSFELLHAPATVCGPKKSTNLVKNKCVNFNFNGLTGTGVLTESNKKFLPFQQFGRDIADTTDAVRDPQTLEILDITPCSFGGVSVITPGTNTSNQVAVLYQDVNCTEVPVAIHADQLTPTWRVYSTGSNVFQTRAGCLIGAEHVNNSYECDIPIGAGICASYQTQTNSPRRARSVASQSIIAYTMSLGAENSVAYSNNSIAIPTNFTISVTTEILPVSMTKTSVDCTMYICGDSTECSNLLLQYGSFCTQLNRALTGIAVEQDKNTQEVFAQVKQIYKTPPIKDFGGFNFSQILPDSSKPSKRSFIEDLLFNKVTLADAGFIKQYGDCLGDIAARDLICAQKFNGLTVLPPLLTDEMIAQYTSALLAGTITSGWTFGAGAALQIPFAMQMAYRFNGCGVTQNVLYENQKLIANQFNSAIGKIQDSLSSTASALGKLQDVVNQNAQALNTLVKQLSSNFGAISSVLNDILSRLDKVEAEVQIDRLITGRLQSLQTYVTQQLIRAAEIRASANLAATKMSECVLGQSKRVDFCGKGCHLMSFPQSAPHGVVFLHVTYVPAQEKNFTTAPAICHDGKAHFPREGVFVSNGTHWFVTQRNFYEPQIITTDNTFVSGNCDVVIGIVNNTVYDPLQPELDSFKEELDKYFKNHTSPDVDLGDISGINASVVNIQKEIDRLNEVAKNLNESLIDLQELGKYEQYIKGGGGSDIIKLLNEQVNKEMQSSNLYMSMSSWCYTHSLDGAGLFLFDHAAEEYEHAKKLIIFLNENNVPVQLTSISAPEHKFEGLTQIFQKAYEHEQHISESINNIVDHAIKSKDHATFNFLQWYVAEQHEEEVLFKDILDKIELIGNENHGLYLADQYVKGIAKSRKS

SEQ ID NO: 5284 - protein, 1379 aa, Artificial Sequence
  SARS-CoV-2/Iceland/280/2020__EPI_ISL_417608 spike protein (1-1211)(I909C_Y1047C) Ferritin construct
MFVFLVLLPLVSSQCVNLTTRTQLPPAYTNSFTRGVYYPDKVFRSSVLHSTQDLFLPFFSNVTWFHAIHVSGTNGTKRFDNPVLPFNDGVYFASTEKSNIIRGWIFGTTLDSKTQSLLIVNNATNVVIKVCEFQFCNDPFLGVYYHKNNKSWMESEFRVYSSANNCTFEYVSQPFLMDLEGKQGNFKNLREFVFKNIDGYFKIYSKHTPINLVRDLPQGFSALEPLVDLPIGINITRFQTLLALHRSYLTPGDSSSGWTAGAAAYYVGYLQPRTFLLKYNENGTITDAVDCALDPLSETKCTLKSFTVEKGIYQTSNFRVQPTESIVRFPNITNLCPFGEVFNATRFASVYAWNRKRISNCVADYSVLYNSASFSTFKCYGVSPTKLNDLCFTNVYADSFVIRGDEVRQIAPGQTGKIADYNYKLPDDFTGCVIAWNSNNLDSKVGGNYNYLYRLFRKSNLKPFERDISTEIYQAGSTPCNGVEGFNCYFPLQSYGFQPTNGVGYQPYRVVVLSFELLHAPATVCGPKKSTNLVKNKCVNFNFNGLTGTGVLTESNKKFLPFQQFGRDIADTTDAVRDPQTLEILDITPCSFGGVSVITPGTNTSNQVAVLYQGVNCTEVPVAIHADQLTPTWRVYSTGSNVFQTRAGCLIGAEHVNNSYECDIPIGAGICASYHTQTNSPRRARSVASQSIIAYTMSLGAENSVAYSNNSIAIPTNFTISVTTEILPVSMTKTSVDCTMYICGDSTECSNLLLQYGSFCTQLNRALTGIAVEQDKNTQEVFAQVKQIYKTPPIKDFGGFNFSQILPDPSKPSKRSFIEDLLFNKVTLADAGFIKQYGDCLGDIAARDLICAQKFNGLTVLPPLLTDEMIAQYTSALLAGTITSGWTFGAGAALQIPFAMQMAYRFNGCGVTQNVLYENQKLIANQFNSAIGKIQDSLSSTASALGKLQDVVNQNAQALNTLVKQLSSNFGAISSVLNDILSRLDKVEAEVQIDRLITGRLQSLQTYVTQQLIRAAEIRASANLAATKMSECVLGQSKRVDFCGKGCHLMSFPQSAPHGVVFLHVTYVPAQEKNFTTAPAICHDGKAHFPREGVFVSNGTHWFVTQRNFYEPQIITTDNTFVSGNCDVVIGIVNNTVYDPLQPELDSFKEELDKYFKNHTSPDVDLGDISGINASVVNIQKEIDRLNEVAKNLNESLIDLQELGKYEQYIKGGGGSDIIKLLNEQVNKEMQSSNLYMSMSSWCYTHSLDGAGLFLFDHAAEEYEHAKKLIIFLNENNVPVQLTSISAPEHKFEGLTQIFQKAYEHEQHISESINNIVDHAIKSKDHATFNFLQWYVAEQHEEEVLFKDILDKIELIGNENHGLYLADQYVKGIAKSRKS

SEQ ID NO: 5285 - protein, 1379 aa, Artificial Sequence; identical to SEQ ID NO: 5240
  SARS-CoV-2/Iceland/247/2020__EPI_ISL_417575 spike protein (1-1211)(I909C_Y1047C) Ferritin construct

SEQ ID NO: 5286 - protein, 1379 aa, Artificial Sequence
  SARS-CoV-2/Iceland/238/2020__EPI_ISL_417566 spike protein (1-1211)(I909C_Y1047C) Ferritin construct
MFVFLVLLPLVSSQCVNLTTRTQLPPAYTNSFTRGVYYPDKVFRSSVLHSTQDLFLPFFSNVTWFHAIHVSGTNGTKRFDNPVLPFNDGVYFASTEKSNIIRGWIFGTTLDSKTQSLLIVNNATNVVIKVCEFQFCNDPFLGVYYHKNNKSWMESEFRVYSSANNCTFEYVSQPFLMDLEGKQGNFKNLREFVFKNIDGYFKIYSKHTPINLVRDLPQGFSALEPLVDLPIGINITRFQTLLALHRSYLTPGDSSSGWTAGAAAYYVGYLQPRTFLLKYNENGTITDAVDCALDPLSETKCTLKSFTVEKGIYQTSNFRVQPTESIVRFPNITNLCPFGEVFNATRFASVYAWNRKRISNCVADYSVLYNSASFSTFKCYGVSPTKLNDLCFTNVYADSFVIRGDEVRQIAPGQTGKIADYNYKLPDDFTGCVIAWNSNNLDSKVGGNYNYLYRLFRKSNLKPFERDISTEIYQAGSTPCNGVEGFNCYFPLQSYGFQPTNGVGYQPYRVVVLSFELLHAPATVCGPKKSTNLVKNKCVNFNFNGLTGTGVLTESNKKFLPFQQFGRDIADTTDAVRDPQTLEILDITPCSFGGVSVITPGTNTSNQVAVLYQGVNCTEVPVAIHADQLTPTWRVYSTGSNVFQTRAGCLIGAEHVNNSYECDIPIGAGICASYQTQTNSPRRARSVASQSIIAYTMSLGAENSVAYSNNSIAIPTNFTISVTTEILPVSMTKTSVDCTMYICGDSTECSNLLLQYGSFCTQLNRALTGIAVEQDKNTQEVFAQVKQIYKTPPIKDFGGFNFSQILPDPSKPSKRSFIEDLLFNKVTLADVGFIKQYGDCLGDIAARDLICAQKFNGLTVLPPLLTDEMIAQYTSALLAGTITSGWTFGAGAALQIPFAMQMAYRFNGCGVTQNVLYENQKLIANQFNSAIGKIQDSLSSTASALGKLQDVVNQNAQALNTLVKQLSSNFGAISSVLNDILSRLDKVEAEVQIDRLITGRLQSLQTYVTQQLIRAAEIRASANLAATKMSECVLGQSKRVDFCGKGCHLMSFPQSAPHGVVFLHVTYVPAQEKNFTTAPAICHDGKAHFPREGVFVSNGTHWFVTQRNFYEPQIITTDNTFVSGNCDVVIGIVNNTVYDPLQPELDSFKEELDKYFKNHTSPDVDLGDISGINASVVNIQKEIDRLNEVAKNLNESLIDLQELGKYEQYIKGGGGSDIIKLLNEQVNKEMQSSNLYMSMSSWCYTHSLDGAGLFLFDHAAEEYEHAKKLIIFLNENNVPVQLTSISAPEHKFEGLTQIFQKAYEHEQHISESINNIVDHAIKSKDHATFNFLQWYVAEQHEEEVLFKDILDKIELIGNENHGLYLADQYVKGIAKSRKS

SEQ ID NO: 5287 - protein, 1379 aa, Artificial Sequence
  SARS-CoV-2/Greece/16/2020__EPI_ISL_418265 spike protein (1-1211)(I909C_Y1047C) Ferritin construct
MFVFLVLLPLVSSQCVNLTTRTQLPPAYTNSFTRGVYYPDKVFRSSVLHSTQDLFLPFFSNVTWFHAIHVSGTNGTKRFDNPVLPFNDGVYFASTEKSNIIRGWIFGTTLDSKTQSLLIVNNATNVVIKVCEFQFCNDPFLGVYYHKNNKSWMESEFRVYSSANNCTFEYVSQPFLMDLEGKQGNFKNLREFVFKNVDGYFKIYSKHTPINLVRDLPQGFSALEPLVDLPIGINITRFQTLLALHRSYLTPGDSSSGWTAGAAAYYVGYLQPRTFLLKYNENGTITDAVDCALDPLSETKCTLKSFTVEKGIYQTSNFRVQPTESIVRFPNITNLCPFGEVFNATRFASVYAWNRKRISNCVADYSVLYNSASFSTFKCYGVSPTKLNDLCFTNVYADSFVIRGDEVRQIAPGQTGKIADYNYKLPDDFTGCVIAWNSNNLDSKVGGNYNYLYRLFRKSNLKPFERDISTEIYQAGSTPCNGVEGFNCYFPLQSYGFQPTNGVGYQPYRVVVLSFELLHAPATVCGPKKSTNLVKNKCVNFNFNGLTGTGVLTESNKKFLPFQQFGRDIADTTDAVRDPQTLEILDITPCSFGGVSVITPGTNTSNQVAVLYQDVNCTEVPVAIHADQLTPTWRVYSTGSNVFQTRAGCLIGAEHVNNSYECDIPIGAGICASYQTQTNSPRRARSVASQSIIAYTMSLGAENSVAYSNNSIAIPTNFTISVTTEILPVSMTKTSVDCTMYICGDSTECSNLLLQYGSFCTQLNRALTGIAVEQDKNTQEVFAQVKQIYKTPPIKDFGGFNFSQILPDPSKPSKRSFIEDLLFNKVTLADAGFIKQYGDCLGDIAARDLICAQKFNGLTVLPPLLTDEMIAQYTSALLAGTITSGWTFGAGAALQIPFAMQMAYRFNGCGVTQNVLYENQKLIANQFNSAIGKIQDSLSSTASALGKLQDVVNQNAQALNTLVKQLSSNFGAISSVLNDILSRLDKVEAEVQIDRLITGRLQSLQTYVTQQLIRAAEIRASANLAATKMSECVLGQSKRVDFCGKGCHLMSFPQSAPHGVVFLHVTYVPAQEKNFTTAPAICHDGKAHFPREGVFVSNGTHWFVTQRNFYEPQIITTDNTFVSGNCDVVIGIVNNTVYDPLQPELDSFKEELDKYFKNHTSPDVDLGDISGINASVVNIQKEIDRLNEVAKNLNESLIDLQELGKYEQYIKGGGGSDIIKLLNEQVNKEMQSSNLYMSMSSWCYTHSLDGAGLFLFDHAAEEYEHAKKLIIFLNENNVPVQLTSISAPEHKFEGLTQIFQKAYEHEQHISESINNIVDHAIKSKDHATFNFLQWYVAEQHEEEVLFKDILDKIELIGNENHGLYLADQYVKGIAKSRKS

SEQ ID NO: 5288 - protein, 1379 aa, Artificial Sequence
  SARS-CoV-2/Iceland/319/2020__EPI_ISL_417648 spike protein (1-1211)(I909C_Y1047C) Ferritin construct
MFVFLVLLPLVSSQCVNLTTRTQLPPAYTNSFTRGVYYPDKVFRSSVLHSTQDLFLPFFSNVTWFHAIHVSGTNGTKRFDNPVLPFNDGVYFASTEKSNIIRGWIFGTTLDSKTQSLLIVNNATNVVIKVCEFQFCNDPFLGVYYHKNNKSWMESEFRVYSSANNCTFEYVSQPFLIDLEGKQGNFKNLREFVFKNIDGYFKIYSKHTPINLVRDLPQGFSALEPLVDLPIGINITRFQTLLALHRSYLTPGDSSSGWTAGAAAYYVGYLQPRTFLLKYNENGTITDAVDCALDPLSETKCTLKSFTVEKGIYQTSNFRVQPTESIVRFPNITNLCPFGEVFNATRFASVYAWNRKRISNCVADYSVLYNSASFSTFKCYGVSPTKLNDLCFTNVYADSFVIRGDEVRQIAPGQTGKIADYNYKLPDDFTGCVIAWNSNNLDSKVGGNYNYLYRLFRKSNLKPFERDISTEIYQAGSTPCNGVEGFNCYFPLQSYGFQPTNGVGYQPYRVVVLSFELLHAPATVCGPKKSTNLVKNKCVNFNFNGLTGTGVLTESNKKFLPFQQFGRDIADTTDAVRDPQTLEILDITPCSFGGVSVITPGTNTSNQVAVLYQGVNCTEVPVAIHADQLTPTWRVYSTGSNVFQTRAGCLIGAEHVNNSYECDIPIGAGICASYQTQTNSPRRARSVASQSIIAYTMSLGAENSVAYSNNSIAIPTNFTISVTTEILPVSMTKTSVDCTMYICGDSTECSNLLLQYGSFCTQLNRALTGIAVEQDKNTQEVFAQVKQIYKTPPIKDFGGFNFSQILPDPSKPSKRSFIEDLLFNKVTLADAGFIKQYGDCLGDIAARDLICAQKFNGLTVLPPLLTDEMIAQYTSALLAGTITSGWTFGAGAALQIPFAMQMAYRFNGCGVTQNVLYENQKLIANQFNSAIGKIQDSLSSTASALGKLQDVVNQNAQALNTLVKQLSSNFGAISSVLNDILSRLDKVEAEVQIDRLITGRLQSLQTYVTQQLIRAAEIRASANLAATKMSECVLGQSKRVDFCGKGCHLMSFPQSAPHGVVFLHVTYVPAQEKNFTTAPAICHDGKAHFPREGVFVSNGTHWFVTQRNFYEPQIITTDNTFVSGNCDVVIGIVNNTVYDPLQPELDSFKEELDKYFKNHTSPDVDLGDISGINASVVNIQKEIDRLNEVAKNLNESLIDLQELGKYEQYIKGGGGSDIIKLLNEQVNKEMQSSNLYMSMSSWCYTHSLDGAGLFLFDHAAEEYEHAKKLIIFLNENNVPVQLTSISAPEHKFEGLTQIFQKAYEHEQHISESINNIVDHAIKSKDHATFNFLQWYVAEQHEEEVLFKDILDKIELIGNENHGLYLADQYVKGIAKSRKS

SEQ ID NO: 5289 - protein, 1379 aa, Artificial Sequence
  SARS-CoV-2/Congo/94/2020__EPI_ISL_417947 spike protein (1-1211)(I909C_Y1047C) Ferritin construct
MFVFLVLLPLVSSQCVNLTTRTQLPPAYTNSFTRGVYYPDKVFRSSVLHSTQDLFLPFFSNVTWFHAIHVSGTNGTKRFDNPVLPFNDGVYFASTEKSNIIRGWIFGTTLDSKTQSLLIVNNATNVVIKVCEFQFCNDPFLGVYYHKNNKSWMESEFRVYSSANNCTFEYVSQPFLMDLEGKQGNFKNLREFVFKNIDGYFKIYSKHTPINLVRDLPQGFSALEPLVDLPIGINITRFQTLLALHRSYLTPGDSSSGWTAGAAAYYVGYLQPRTFLLKYNENGTITDAVDCALDPLSETKCTLKSFTVEKGIYQTSNFRVQPTESIVRFPNITNLCPFGEVFNATRFASVYAWNRKRISNCVADYSVLYNSASFSTFKCYGVSPTKLNDLCFTNVYADSFVIRGDEVRQIAPGQTGKIADYNYKLPDDFTGCVIAWNSNNLDSKVGGNYNYLYRLFRKSNLKPFERDISTEIYQAGSTPCNGVEGFNCYFPLQSYGFQPTNGVGYQPYRVVVLSFELLHAPATVCGPKKSTNLVKNKCVNFNFNGLTGTGVLTESNKKFLPFQQFGRDIADTTDAVRDPQTLEILDITPCSFGGVSVITPGTNTSNQVAVLYQGVNCTEVPVAIHADQLTPTWRVYSTGSNVFQTRAGCLIGAEHVNNSYECDIPIGAGICASYQTQTNSPRRARSVASQSIIAYTMSLGAENSVAYSNNSIAIPTNFTISVTTEILPVSMTKTSVDCTMYICGDSTECSNLLLQYGSFCTQLNRALTGIAVEQDKNTQEVFAQVKQIYKTPPIKDFGGFNFSQILPDPSKPSKRSFIEDILFNKVTLADAGFIKQYGDCLGDIAARDLICAQKFNGLTVLPPLLTDEMIAQYTSALLAGTITSGWTFGAGAALQIPFAMQMAYRFNGCGVTQNVLYENQKLIANQFNSAIGKIQDSLSSTASALGKLQDVVNQNAQALNTLVKQLSSNFGAISSVLNDILSRLDKVEAEVQIDRLITGRLQSLQTYVTQQLIRAAEIRASANLAATKMSECVLGQSKRVDFCGKGCHLMSFPQSAPHGVVFLHVTYVPAQEKNFTTAPAICHDGKAHFPREGVFVSNGTHWFVTQRNFYEPQIITTDNTFVSGNCDVVIGIVNNTVYDPLQPELDSFKEELDKYFKNHTSPDVDLGDISGINASVVNIQKEIDRLNEVAKNLNESLIDLQELGKYEQYIKGGGGSDIIKLLNEQVNKEMQSSNLYMSMSSWCYTHSLDGAGLFLFDHAAEEYEHAKKLIIFLNENNVPVQLTSISAPEHKFEGLTQIFQKAYEHEQHISESINNIVDHAIKSKDHATFNFLQWYVAEQHEEEVLFKDILDKIELIGNENHGLYLADQYVKGIAKSRKS

SEQ ID NO: 5290 - protein, 1379 aa, Artificial Sequence
  SARS-CoV-2/Congo/158/2020__EPI_ISL_417950 spike protein (1-1211)(I909C_Y1047C) Ferritin construct
MFVFLVLLPLVSSQCVNLTTRTQLPPAYTNSFTRGVYYPDKVFRSSVLHSTQDLFLPFFSNVTWFHAIHVSGTNGTKRFDNPVLPFNDGVYFASTEKSNIIRGWIFGTTLDSKTQSLLIVNNATNVVIKVCEFQFCNDPFLGVYYHKNNKSWMESEFRVYSSANNCTFEYVSQPFLMDLEGKQGNFKNLREFVFKNIDGYFKIYSKHTPINLVRDLPQGFSALEPLVDLPIGINITRFQTLLALHRSYLTPGDSSSGWTAGAAAYYVGYLQPRTFLLKYNENGTITDAVDCALDPLSETKCTLKSFTVEKGIYQTSNFRVQPTESIVRFPNITNLCPFGEVFNATRFASVYAWNRKRISNCVADYSVLYNSASFSTFKCYGVSPTKLNDLCFTNVYADSFVIRGDEVRQIAPGQTGKIADYNYKLPDDFTGCVIAWNSNNLDSKVGGNYNYLYRLFRKSNLKPFERDISTEIYQAGSTPCNGVEGFNCYFPLQSYGFQPTNGVGYQPYRVVVLSFELLHAPATVCGPKKSTNLVKNKCVNFNFNGLTGTGVLTESNKKFLPFQQFGRDIADTTDAVRDPQTLEILDITPCSFGGVSVITPGTNTSNQVAVLYQDVNCTEVPVAIHADQLTPTWRVYSTGSNVFQTRAGCLIGAEHVNNSYECDIPIGAGICASYQTQTNSPRRARSVASQSIIAYTMSLGAENSVAYSNNSIAIPTNFTISVTTEILPVSMTKTSVDCTMYICGDSTECSNLLLQYGSFCTQLNRALTGIAVEQDKNTQEVFAQVKQIYKTPPIKDFGGFNFSQILPDPSKPSKRSFIEDLLFNKVTLADAGFIKQYGDCLGDIAARDLICAQKFNGLTVLPPLLTDEMIAQYTSALLAGTITSGWTFGAGAALQIPFAMQMAYRFNGCGVTQNVLYENQKLIANQFNSAIGKIQDSLSSTASALGKLQDVVNQNAQALNTLVKQLSSNFGAISSVLNDILSRLDKVEAEVQIDRLITGRLQSLQTYVTQQLIRAAEIRASANLAATKMSECVLGQSKRVDFCGKGCHLMSFPQSAPHGVVFLHVTYVPAQEKNFTTAPAICHDGKAHFPREGVFVSNGTHWFVTQRNFYEPQIITTDNTFLSGNCDVVIGIVNNTVYDPLQPELDSFKEELDKYFKNHTSPDVDLGDISGINASVVNIQKEIDRLNEVAKNLNESLIDLQELGKYEQYIKGGGGSDIIKLLNEQVNKEMQSSNLYMSMSSWCYTHSLDGAGLFLFDHAAEEYEHAKKLIIFLNENNVPVQLTSISAPEHKFEGLTQIFQKAYEHEQHISESINNIVDHAIKSKDHATFNFLQWYVAEQHEEEVLFKDILDKIELIGNENHGLYLADQYVKGIAKSRKS

SEQ ID NO: 5291 - protein, 1379 aa, Artificial Sequence
  SARS-CoV-2/USA/UT-00034/2020__EPI_ISL_417977 spike protein (1-1211)(I909C_Y1047C) Ferritin construct
MFVFLVLLPLVSSQCVNLTTRTQLPPAYTNSFTRGVYYPDKVFRSSVLHSTQDLFLPFFSNVTWFHAIHVSGTNGTKRFDNPVLPFNDGVYFASTEKSNIIRGWIFGTTLDSKTQSLLIVNNATNVVIKVCEFQFCNDPFLGVYYYKNNKSWMESEFRVYSSANNCTFEYVSQPFLMDLEGKQGNFKNLREFVFKNIDGYFKIYSKHTPINLVRDLPQGFSALEPLVDLPIGINITRFQTLLALHRSYLTPGDSSSGWTAGAAAYYVGYLQPRTFLLKYNENGTITDAVDCALDPLSETKCTLKSFTVEKGIYQTSNFRVQPTESIVRFPNITNLCPFGEVFNATRFASVYAWNRKRISNCVADYSVLYNSASFSTFKCYGVSPTKLNDLCFTNVYADSFVIRGDEVRQIAPGQTGKIADYNYKLPDDFTGCVIAWNSNNLDSKVGGNYNYLYRLFRKSNLKPFERDISTEIYQAGSTPCNGVEGFNCYFPLQSYGFQPTNGVGYQPYRVVVLSFELLHAPATVCGPKKSTNLVKNKCVNFNFNGLTGTGVLTESNKKFLPFQQFGRDIADTTDAVRDPQTLEILDITPCSFGGVSVITPGTNTSNQVAVLYQGVNCTEVPVAIHADQLTPTWRVYSTGSNVFQTRAGCLIGAEHVNNSYECDIPIGAGICASYQTQTNSPRRARSVASQSIIAYTMSLGAENSVAYSNNSIAIPTNFTISVTTEILPVSMTKTSVDCTMYICGDSTECSNLLLQYGSFCTQLNRALTGIAVEQDKNTQEVFAQVKQIYKTPPIKDFGGFNFSQILPDPSKPSKRSFIEDLLFNKVTLADAGFIKQYGDCLGDIAARDLICAQKFNGLTVLPPLLTDEMIAQYTSALLAGTITSGWTFGAGAALQIPFAMQMAYRFNGCGVTQNVLYENQKLIANQFNSAIGKIQDSLSSTASALGKLQDVVNQNAQALNTLVKQLSSNFGAISSVLNDILSRLDKVEAEVQIDRLITGRLQSLQTYVTQQLIRAAEIRASANLAATKMSECVLGQSKRVDFCGKGCHLMSFPQSAPHGVVFLHVTYVPAQEKNFTTAPAICHDGKAHFPREGVFVSNGTHWFVTQRNFYEPQIITTDNTFVSGNCDVVIGIVNNTVYDPLQPELDSFKEELDKYFKNHTSPDVDLGDISGINASVVNIQKEIDRLNEVAKNLNESLIDLQELGKYEQYIKGGGGSDIIKLLNEQVNKEMQSSNLYMSMSSWCYTHSLDGAGLFLFDHAAEEYEHAKKLIIFLNENNVPVQLTSISAPEHKFEGLTQIFQKAYEHEQHISESINNIVDHAIKSKDHATFNFLQWYVAEQHEEEVLFKDILDKIELIGNENHGLYLADQYVKGIAKSRKS

SEQ ID NO: 5292 - protein, 1379 aa, Artificial Sequence
  SARS-CoV-2/USA/UT-00033/2020__EPI_ISL_417976 spike protein (1-1211)(I909C_Y1047C) Ferritin construct
MFVFLVLLPLVSSQCVNLTTRTQLPPAYTNSFTRGVYYPDKVFRSSVLHSTQDLFLPFFSNVTWFHAIHVSGTNGTKRFDNPVLPFNDGVYFASTEKSNIIRGWIFGTTLDSKTQSLLIVNNATNVVIKVCEFQFCNDPFLGVYYHKNNKSWMESEFRVYSSANNCTFEYVSQPFLMDLEGKQGNFKNLREFVFKNIDGYFKIYSKHTPINLVRDLPQGFSALEPLVDLPIGINITRFQTLLALHRSYLTPGDSSSGLTAGAAAYYVGYLQPRTFLLKYNENGTITDAVDCALDPLSETKCTLKSFTVEKGIYQTSNFRVQPTESIVRFPNITNLCPFGEVFNATRFASVYAWNRKRISNCVADYSVLYNSASFSTFKCYGVSPTKLNDLCFTNVYADSFVIRGDEVRQIAPGQTGKIADYNYKLPDDFTGCVIAWNSNNLDSKVGGNYNYLYRLFRKSNLKPFERDISTEIYQAGSTPCNGVEGFNCYFPLQSYGFQPTNGVGYQPYRVVVLSFELLHAPATVCGPKKSTNLVKNKCVNFNFNGLTGTGVLTESNKKFLPFQQFGRDIADTTDAVRDPQTLEILDITPCSFGGVSVITPGTNTSNQVAVLYQGVNCTEVPVAIHADQLTPTWRVYSTGSNVFQTRAGCLIGAEHVNNSYECDIPIGAGICASYQTQTNSPRRARSVASQSIIAYTMSLGAENSVAYSNNSIAIPTNFTISVTTEILPVSMTKTSVDCTMYICGDSTECSNLLLQYGSFCTQLNRALTGIAVEQDKNTQEVFAQVKQIYKTPPIKDFGGFNFSQILPDPSKPSKRSFIEDLLFNKVTLADAGFIKQYGDCLGDIAARDLICAQKFNGLTVLPPLLTDEMIAQYTSALLAGTITSGWTFGAGAALQIPFAMQMAYRFNGCGVTQNVLYENQKLIANQFNSAIGKIQDSLSSTASALGKLQDVVNQNAQALNTLVKQLSSNFGAISSVLNDILSRLDKVEAEVQIDRLITGRLQSLQTYVTQQLIRAAEIRASANLAATKMSECVLGQSKRVDFCGKGCHLMSFPQSAPHGVVFLHVTYVPAQEKNFTTAPAICHDGKAHFPREGVFVSNGTHWFVTQRNFYEPQIITTDNTFVSGNCDVVIGIVNNTVYDPLQPELDSFKEELDKYFKNHTSPDVDLGDISGINASVVNIQKEIDRLNEVAKNLNESLIDLQELGKYEQYIKGGGGSDIIKLLNEQVNKEMQSSNLYMSMSSWCYTHSLDGAGLFLFDHAAEEYEHAKKLIIFLNENNVPVQLTSISAPEHKFEGLTQIFQKAYEHEQHISESINNIVDHAIKSKDHATFNFLQWYVAEQHEEEVLFKDILDKIELIGNENHGLYLADQYVKGIAKSRKS

SEQ ID NO: 5293 - protein, 1379 aa, Artificial Sequence
  SARS-CoV-2/USA/WI-13/2020__EPI_ISL_417516 spike protein (1-1211)(I909C_Y1047C) Ferritin construct
MFVFLVLLPLVSSQCVNLTTRTQLPPAYTNSFTRGVYYPDKVFRSSVLHSTQDLFLPFFSNVTWFHAIHVSGTNGTKRFDNPVLPFNDGVYFASTEKSNIIRGWIFGTTLDSKTQSLLIVNNATNVVIKVCEFQFCNDPFLGVYYHKNNKSWMESEFRVYSSANNCTFEYVSQPFLMDLEGKQGNFKNLREFVFKNIDGYFKIYSKHTPINLVRDLPQGFSALEPLVDLPIGINITRFQTLLALHRSYLTPGDSSSGWTAGAAAYYVGYLQPRTFLLKYNENGTITDAVDCALDPLSETKCTLKSFTVEKGIYQTSNFRVLPTESIVRFPNITNLCPFGEVFNATRFASVYAWNRKRISNCVADYSVLYNSASFSTFKCYGVSPTKLNDLCFTNVYADSFVIRGDEVRQIAPGQTGKIADYNYKLPDDFTGCVIAWNSNNLDSKVGGNYNYLYRLFRKSNLKPFERDISTEIYQAGSTPCNGVEGFNCYFPLQSYGFQPTNGVGYQPYRVVVLSFELLHAPATVCGPKKSTNLVKNKCVNFNFNGLTGTGVLTESNKKFLPFQQFGRDIADTTDAVRDPQTLEILDITPCSFGGVSVITPGTNTSNQVAVLYQGVNCTEVPVAIHADQLTPTWRVYSTGSNVFQTRAGCLIGAEHVNNSYECDIPIGAGICASYQTQTNSPRRARSVASQSIIAYTMSLGAENSVAYSNNSIAIPTNFTISVTTEILPVSMTKTSVDCTMYICGDSTECSNLLLQYGSFCTQLNRALTGIAVEQDKNTQEVFAQVKQIYKTPPIKDFGGFNFSQILPDPSKPSKRSFIEDLLFNKVTLADAGFIKQYGDCLGDIAARDLICAQKFNGLTVLPPLLTDEMIAQYTSALLAGTITSGWTFGAGAALQIPFAMQMAYRFNGCGVTQNVLYENQKLIANQFNSAIGKIQDSLSSTASALGKLQDVVNQNAQALNTLVKQLSSNFGAISSVLNDILSRLDKVEAEVQIDRLITGRLQSLQTYVTQQLIRAAEIRASANLAATKMSECVLGQSKRVDFCGKGCHLMSFPQSAPHGVVFLHVTYVPAQEKNFTTAPAICHDGKAHFPREGVFVSNGTHWFVTQRNFYEPQIITTDNTFVSGNCDVVIGIVNNTVYDPLQPELDSFKEELDKYFKNHTSPDVDLGDISGINASVVNIQKEIDRLNEVAKNLNESLIDLQELGKYEQYIKGGGGSDIIKLLNEQVNKEMQSSNLYMSMSSWCYTHSLDGAGLFLFDHAAEEYEHAKKLIIFLNENNVPVQLTSISAPEHKFEGLTQIFQKAYEHEQHISESINNIVDHAIKSKDHATFNFLQWYVAEQHEEEVLFKDILDKIELIGNENHGLYLADQYVKGIAKSRKS

SEQ ID NO: 5294 - protein, 1378 aa, Artificial Sequence
  SARS-CoV-2/India/1-27/2020__EPI_ISL_413522 spike protein (1-1210)(I908C_Y1046C) Ferritin construct
MFVFLVLLPLVSSQCVNLTTRTQLPPAYTNSFTRGVYYPDKVFRSSVLHSTQDLFLPFFSNVTWFHAIHVSGTNGTKRFDNPVLPFNDGVYFASTEKSNIIRGWIFGTTLDSKTQSLLIVNNATNVVIKVCEFQFCNDPFLGVYHKNNKSWMESEFRVYSSANNCTFEYVSQPFLMDLEGKQGNFKNLREFVFKNIDGYFKIYSKHTPINLVRDLPQGFSALEPLVDLPIGINITRFQTLLALHRSYLTPGDSSSGWTAGAAAYYVGYLQPRTFLLKYNENGTITDAVDCALDPLSETKCTLKSFTVEKGIYQTSNFRVQPTESIVRFPNITNLCPFGEVFNATRFASVYAWNRKRISNCVADYSVLYNSASFSTFKCYGVSPTKLNDLCFTNVYADSFVIRGDEVIQIAPGQTGKIADYNYKLPDDFTGCVIAWNSNNLDSKVGGNYNYLYRLFRKSNLKPFERDISTEIYQAGSTPCNGVEGFNCYFPLQSYGFQPTNGVGYQPYRVVVLSFELLHAPATVCGPKKSTNLVKNKCVNFNFNGLTGTGVLTESNKKFLPFQQFGRDIADTTDAVRDPQTLEILDITPCSFGGVSVITPGTNTSNQVAVLYQDVNCTEVPVAIHADQLTPTWRVYSTGSNVFQTRAGCLIGAEHVNNSYECDIPIGAGICASYQTQTNSPRRARSVASQSIIAYTMSLGAENSVAYSNNSIAIPTNFTISVTTEILPVSMTKTSVDCTMYICGDSTECSNLLLQYGSFCTQLNRALTGIAVEQDKNTQEVFAQVKQIYKTPPIKDFGGFNFSQILPDPSKPSKRSFIEDLLFNKVTLADAGFIKQYGDCLGDIAARDLICAQKFNGLTVLPPLLTDEMIAQYTSALLAGTITSGWTFGAGAALQIPFAMQMAYRFNGCGVTQNVLYENQKLIANQFNSAIGKIQDSLSSTASALGKLQDVVNQNAQALNTLVKQLSSNFGAISSVLNDILSRLDKVEAEVQIDRLITGRLQSLQTYVTQQLIRAAEIRASANLAATKMSECVLGQSKRVDFCGKGCHLMSFPQSAPHGVVFLHVTYVPAQEKNFTTAPAICHDGKAHFPREGVFVSNGTHWFVTQRNFYEPQIITTDNTFVSGNCDVVIGIVNNTVYDPLQPELDSFKEELDKYFKNHTSPDVDLGDISGINASVVNIQKEIDRLNEVAKNLNESLIDLQELGKYEQYIKGGGGSDIIKLLNEQVNKEMQSSNLYMSMSSWCYTHSLDGAGLFLFDHAAEEYEHAKKLIIFLNENNVPVQLTSISAPEHKFEGLTQIFQKAYEHEQHISESINNIVDHAIKSKDHATFNFLQWYVAEQHEEEVLFKDILDKIELIGNENHGLYLADQYVKGIAKSRKS

SEQ ID NO: 5295 - protein, 1373 aa, Artificial Sequence
  SARS-CoV-2/pangolin/Guangxi/P4L/2017__EPI_ISL_410538 spike protein (1-1205)(I903C_Y1041C) Ferritin construct
MFVFLFVLPLVSSQCVNLTTRTGIPPGYTNSSTRGVYYPDKVFRSSILHLTQDLFLPFFSNVTWFNTINYQGGFKKFDNPVLPFNDGVYFASTEKSNIIRGWIFGTTLDARTQSLLIVNNATNVVIKVCEFQFCTDPFLGVYYHNNNKTWVENEFRVYSSANNCTFEYISQPFLMDLEGKQGNFKNLREFVFKNVDGYFKIYSKHTPIDLVRDLPRGFAALEPLVDLPIGINITRFQTLLALHRSYLTPGNLESGWTTGAAAYYVGYLQQRTFLLSYNQNGTITDAVDCSLDPLSETKCTLKSLTVEKGIYQTSNFRVQPTISIVRFPNITNLCPFGEVFNASKFASVYAWNRKRISNCVADYSVLYNSTSFSTFKCYGVSPTKLNDLCFTNVYADSFVVKGDEVRQIAPGQTGVIADYNYKLPDDFTGCVIAWNSVKQDALTGGNYGYLYRLFRKSKLKPFERDISTEIYQAGSTPCNGQVGLNCYYPLERYGFHPTTGVNYQPFRVVVLSFELLNGPATVCGPKLSTTLVKDKCVNFNFNGLTGTGVLTTSKKQFLPFQQFGRDISDTTDAVRDPQTLEILDITPCSFGGVSVITPGTNTSNQVAVLYQDVNCTEVPMAIHAEQLTPAWRVYSAGANVFQTRAGCLVGAEHVNNSYECDIPVGAGICASYHSMSSLRSVNQRSIIAYTMSLGAENSVAYSNNSIAIPTNFTISVTTEILPVSMTKTSVDCTMYICGDSIECSNLLLQYGSFCTQLNRALTGIAVEQDKNTQEVFAQVKQIYKTPPIKDFGGFNFSQILPDPSKPSKRSFIEDLLFNKVTLADAGFIKQYGDCLGDIAARDLICAQKFNGLTVLPPLLTDEMIAQYTSALLAGTITSGWTFGAGAALQIPFAMQMAYRFNGCGVTQNVLYENQKLIANQFNSAIGKIQDSLSSTASALGKLQDVVNQNAQALNTLVKQLSSNFGAISSVLNDILSRLDKVEAEVQIDRLITGRLQSLQTYVTQQLIRAAEIRASANLAATKMSECVLGQSKRVDFCGKGCHLMSFPQSAPHGVVFLHVTYVPAQEKNFTTAPAICHEGKAHFPREGVFVSNGTHWFITQRNFYEPQIITTDNTFVSGSCDVVIGIVNNTVYDPLQPELDSFKEELDKYFKNHTSPDVDLGDISGINASVVNIQKEIDRLNEVAKNLNESPIDLQELGKYEQYIKGGGGSDIIKLLNEQVNKEMQSSNLYMSMSSWCYTHSLDGAGLFLFDHAAEEYEHAKKLIIFLNENNVPVQLTSISAPEHKFEGLTQIFQKAYEHEQHISESINNIVDHAIKSKDHATFNFLQWYVAEQHEEEVLFKDILDKIELIGNENHGLYLADQYVKGIAKSRKS

SEQ ID NO: 5296 - protein, 1373 aa, Artificial Sequence
  SARS-CoV-2/pangolin/Guangxi/P5L/2017__EPI_ISL_410540 spike protein (1-1205)(I903C_Y1041C) Ferritin construct
MFVFLFVLPLVSSQCVNLTTRTGIPPGYTNSSTRGVYYPDKVFRSSILHLTQDLFLPFFSNVTWFNTINYQGGFKKFDNPVLPFNDGVYFASTEKSNIIRGWIFGTTLDARTQSLLIVNNATNVVIKVCEFQFCTDPFLGVYYHNNNKTWVENEFRVYSSANNCTFEYISQPFLMDLEGKQGNFKNLREFVFKNVDGYFKIYSKHTPIDLVRDLPRGFAALEPLVDLPIGINITRFQTLLALHRSYLTPGKLESGWTTGAAAYYVGYLQQRTFLLSYNQNGTITDAVDCSLDPLSETKCTLKSLTVEKGIYQTSNFRVQPTISIVRFPNITNLCPFGEVFNASKFASVYAWNRKRISNCVADYSVLYNSTSFSTFKCYGVSPTKLNDLCFTNVYADSFVVKGDEVRQIAPGQTGVIADYNYKLPDDFTGCVIAWNSVKQDALTGGNYGYLYRLFRKSKLKPFERDISTEIYQAGSTPCNGQVGLNCYYPLERYGFHPTTGVNYQPFRVVVLSFELLNGPATVCGPKLSTTLVKDKCVNFNFNGLTGTGVLTTSKKQFLPFQQFGRDISDTTDAVRDPQTLEILDITPCSFGGVSVITPGTNTSNQVAVLYQDVNCTEVPMAIHAEQLTPAWRVYSAGANVFQTRAGCLVGAEHVNNSYECDIPVGAGICASYHSMSSFRSVNQRSIIAYTMSLGAENSVAYSNNSIAIPTNFTISVTTEILPVSMTKTSVDCTMYICGDSIECSNLLLQYGSFCTQLNRALTGIAVEQDKNTQEVFAQVKQIYKTPPIKDFGGFNFSQILPDPSKPSKRSFIEDLLFNKVTLADAGFIKQYGDCLGDIAARDLICAQKFNGLTVLPPLLTDEMIAQYTSALLAGTITSGWTFGAGAALQIPFAMQMAYRFNGCGVTQNVLYENQKLIANQFNSAIGKIQDSLSSTASALGKLQDVVNQNAQALNTLVKQLSSNFGAISSVLNDILSRLDKVEAEVQIDRLITGRLQSLQTYVTQQLIRAAEIRASANLAATKMSECVLGQSKRVDFCGKGCHLMSFPQSAPHGVVFLHVTYVPAQEKNFTTAPAICHEGKAHFPREGVFVSNGTHWFITQRNFYEPQIITTDNTFVSGSCDVVIGIVNNTVYDPLQPELDSFKEELDKYFKNHTSPDVDLGDISGINASVVNIQKEIDRLNEVAKNLNESLIDLQELGKYEQYIKGGGGSDIIKLLNEQVNKEMQSSNLYMSMSSWCYTHSLDGAGLFLFDHAAEEYEHAKKLIIFLNENNVPVQLTSISAPEHKFEGLTQIFQKAYEHEQHISESINNIVDHAIKSKDHATFNFLQWYVAEQHEEEVLFKDILDKIELIGNENHGLYLADQYVKGIAKSRKS

SEQ ID NO: 5297 - protein, 1373 aa, Artificial Sequence
  SARS-CoV-2/pangolin/Guangxi/P5E/2017__EPI_ISL_410541 spike protein (1-1205)(I903C_Y1041C) Ferritin construct
MFVFLFVLPLVSSQCVNLTTRTGIPPGYTNSSTRGVYYPDKVFRSSILHLTQDLFLPFFSNVTWFNTITYQGGSKKFDNPVLPFNDGVYFASTEKSNIIRGWIFGTTLDARTQSLLIVNNATNVVIKVCEFQFCTDPFLGVYYHNNNKTWVENEFRVYSSANNCTFEYISQPFLMDLEGKQGNFKNLREFVFKNVDGYFKIYSKHTPIDLVRDLPRGFAALEPLVDLPIGINITRFQTLLALHRSYLTPGKLESGWTTGAAAYYVGYLQQRTFLLSYNQNGTITDAVDCSLDPLSETKCTLKSLTVEKGIYQTSNFRVQPTISIVRFPNITNLCPFGEVFNASKFASVYAWNRKRISNCVADYSVLYNSTSFSTFKCYGVSPTKLNDLCFTNVYADSFVVKGDEVRQIAPGQTGVIADYNYKLPDDFTGCVIAWNSVKQDALTGDNYGYLYRLFRKSKLKPFERDISTEIYQAGSTPCNGQVGLNCYYPLERYGFHPTTGVNYQPFRVVVLSFELLNGPATVCGPKLSTTLVKDKCVNFNFNGLTGTGVLTTSKKQFLPFQQFGRDISDTTDAVRDPQTLEILDITPCSFGGVSVITPGTNTSNQVAVLYQDVNCTEVPMAIHAEQLTPAWRVYSAGANVFQTRAGCLVGAEHVNNSYECDIPVGAGICASYHSMSSFRSVNQRSIIAYTMSLGAENSVAYSNNSIAIPTNFTISVTTEILPVSMTKTSVDCTMYICGDSIECSNLLLQYGSFCTQLNRALTGIAVEQDKNTQEVFAQVKQIYKTPPIKDFGGFNFSQILPDPSKPSKRSFIEDLLFNKVTLADAGFIKQYGDCLGDIAARDLICAQKFNGLTVLPPLLTDEMIAQYTSALLAGTITSGWTFGAGAALQIPFAMQMAYRFNGCGVTQNVLYENQKLIANQFNSAIGKIQDSLSSTASALGKLQDVVNQNAQALNTLVKQLSSNFGAISSVLNDILSRLDKVEAEVQIDRLITGRLQSLQTYVTQQLIRAAEIRASANLAATKMSECVLGQSKRVDFCGKGCHLMSFPQSAPHGVVFLHVTYVPAQEKNFTTAPAICHEGKAHFPREGVFVSNGTHWFITQRNFYEPQIITTDNTFVSGSCDVVIGIVNNTVYDPLQPELDSFKEELDKYFKNHTSPDVDLGDISGINASVVNIQKEIDRLNEVAKNLNESLIDLQELGKYEQYIKGGGGSDIIKLLNEQVNKEMQSSNLYMSMSSWCYTHSLDGAGLFLFDHAAEEYEHAKKLIIFLNENNVPVQLTSISAPEHKFEGLTQIFQKAYEHEQHISESINNIVDHAIKSKDHATFNFLQWYVAEQHEEEVLFKDILDKIELIGNENHGLYLADQYVKGIAKSRKS

SEQ ID NO: 5298 - protein, 1371 aa, Artificial Sequence
  SARS-CoV-2/pangolin/Guangxi/P1E/2017__EPI_ISL_410539 spike protein (1-1203)(I901C_Y1039C) Ferritin construct
MFVFLFVLPLVSSQCVNLTTRTGIQPGYTNSSTRGVYYPDKVFRSSILHLTQDLFLPFFSNVTWFNTINYQGGFKKFDNPVLPFNDGVYFASTEKSNIIRGWIFGTTLDARTQSLLIVNNATNVVIKVCEFQFCTDPFLGVYYHNNNKTWVENEFRVYSSANNCTFEYISQPFLMDLEGKQGNFKNLREFVFKNVDGYFKIYSKHTPIDLVRDLPRGFAALEPLVDLPIGINITRFQTLLALHRSYLTPGKLESGWTTGAAAYYVGYLQQRTFLLSYNQNGTITDAVDCSLDPLSETKCTLKSLTVEKGIYQTSNFRVQPTISIVRFPNITNLCPFGEVFNASKFASVYAWNRKRISNCVADYSVLYNSTSFSTFKCYGVSPTKLNDLCFTNVYADSFVVKGDEVRQIAPGQTGVIADYNYKLPDDFTGCVIAWNSVKQDALTGGNYLYRLFRKSKLKPFERDISTEIYQAGSTPCNGQVGLNCYYPLERYGFHPTTGVNYQPFRVVVLSFELLNGPATVCGPKLSTTLVKDKCVNFNFNGLTGTGVLTTSKKQFLPFQQFGRDISDTTDAVRDPQTLEILDITPCSFGGVSVITPGTNTSNQVAVLYQDVNCTEVPMAIHAEQLTPAWRVYSAGANVFQTRAGCLVGAEHVNNSYECDIPVGAGICASYHSMSSLRSVNQRSIIAYTMSLGAENSVAYSNNSIAIPTNFTISVTTEILPVSMTKTSVDCTMYICGDSIECSNLLLQYGSFCTQLNRALTGIAVEQDKNTQEVFAQVKQIYKTPPIKDFGGFNFSQILPDPSKPSKRSFIEDLLFNKVTLADAGFIKQYGDCLGDIAARDLICAQKFNGLTVLPPLLTDEMIAQYTSALLAGTITSGWTFGAGAALQIPFAMQMAYRFNGCGVTQNVLYENQKLIANQFNSAIGKIQDSLSSTASALGKLQDVVNQNAQALNTLVKQLSSNFGAISSVLNDILSRLDKVEAEVQIDRLITGRLQSLQTYVTQQLIRAAEIRASANLAATKMSECVLGQSKRVDFCGKGCHLMSFPQSAPHGVVFLHVTYVPAQEKNFTTAPAICHEGKAHFPREGVFVSNGTHWFITQRNFYEPQIITTDNTFVSGSCDVVIGIVNNTVYDPLQPELDSFKEELDKYFKNHTSPDVDLGDISGINASVVNIQKEIDRLNEVAKNLNESLIDLQELGKYEQYIKGGGGSDIIKLLNEQVNKEMQSSNLYMSMSSWCYTHSLDGAGLFLFDHAAEEYEHAKKLIIFLNENNVPVQLTSISAPEHKFEGLTQIFQKAYEHEQHISESINNIVDHAIKSKDHATFNFLQWYVAEQHEEEVLFKDILDKIELIGNENHGLYLADQYVKGIAKSRKS

SEQ ID NO: 5299 - protein, 1379 aa, Artificial Sequence
  SARS-CoV-2/Wuhan/WIV05/2019__EPI_ISL_402128 spike protein (1-1211)(Q965C_S1003C) Ferritin construct
MFVFLVLLPLVSSQCVNLTTRTQLPPAYTNSFTRGVYYPDKVFRSSVLHSTQDLFLPFFSNVTWFHAIHVSGTNGTKRFDNPVLPFNDGVYFASTEKSNIIRGWIFGTTLDSKTQSLLIVNNATNVVIKVCEFQFCNDPFLGVYYHKNNKSWMESEFRVYSSANNCTFEYVSQPFLMDLEGKQGNFKNLREFVFKNIDGYFKIYSKHTPINLVRDLPQGFSALEPLVDLPIGINITRFQTLLALHRSYLTPGDSSSGWTAGAAAYYVGYLQPRTFLLKYNENGTITDAVDCALDPLSETKCTLKSFTVEKGIYQTSNFRVQPTESIVRFPNITNLCPFGEVFNATRFASVYAWNRKRISNCVADYSVLYNSASFSTFKCYGVSPTKLNDLCFTNVYADSFVIRGDEVRQIAPGQTGKIADYNYKLPDDFTGCVIAWNSNNLDSKVGGNYNYLYRLFRKSNLKPFERDISTEIYQAGSTPCNGVEGFNCYFPLQSYGFQPTNGVGYQPYRVVVLSFELLHAPATVCGPKKSTNLVKNKCVNFNFNGLTGTGVLTESNKKFLPFQQFGRDIADTTDAVRDPQTLEILDITPCSFGGVSVITPGTNTSNQVAVLYQDVNCTEVPVAIHADQLTPTWRVYSTGSNVFQTRAGCLIGAEHVNNSYECDIPIGAGICASYQTQTNSPRRARSVASQSIIAYTMSLGAENSVAYSNNSIAIPTNFTISVTTEILPVSMTKTSVDCTMYICGDSTECSNLLLQYGSFCTQLNRALTGIAVEQDKNTQEVFAQVKQIYKTPPIKDFGGFNFSQILPDPSKPSKRSFIEDLLFNKVTLADAGFIKQYGDCLGDIAARDLICAQKFNGLTVLPPLLTDEMIAQYTSALLAGTITSGWTFGAGAALQIPFAMQMAYRFNGIGVTQNVLYENQKLIANQFNSAIGKIQDSLSSTASALGKLQDVVNQNAQALNTLVKCLSSNFGAISSVLNDILSRLDKVEAEVQIDRLITGRLQCLQTYVTQQLIRAAEIRASANLAATKMSECVLGQSKRVDFCGKGYHLMSFPQSAPHGVVFLHVTYVPAQEKNFTTAPAICHDGKAHFPREGVFVSNGTHWFVTQRNFYEPQIITTDNTFVSGNCDVVIGIVNNTVYDPLQPELDSFKEELDKYFKNHTSPDVDLGDISGINASVVNIQKEIDRLNEVAKNLNESLIDLQELGKYEQYIKGGGGSDIIKLLNEQVNKEMQSSNLYMSMSSWCYTHSLDGAGLFLFDHAAEEYEHAKKLIIFLNENNVPVQLTSISAPEHKFEGLTQIFQKAYEHEQHISESINNIVDHAIKSKDHATFNFLQWYVAEQHEEEVLFKDILDKIELIGNENHGLYLADQYVKGIAKSRKS

SEQ ID NO: 5300 - protein, 1375 aa, Artificial Sequence
  SARS-CoV-2/bat/Yunnan/RaTG13/2013__EPI_ISL_402131 spike protein (1-1207)(Q961C_S999C) Ferritin construct
MFVFLVLLPLVSSQCVNLTTRTQLPPAYTNSSTRGVYYPDKVFRSSVLHLTQDLFLPFFSNVTWFHAIHVSGTNGIKRFDNPVLPFNDGVYFASTEKSNIIRGWIFGTTLDSKTQSLLIVNNATNVVIKVCEFQFCNDPFLGVYYHKNNKSWMESEFRVYSSANNCTFEYVSQPFLMDLEGKQGNFKNLREFVFKNIDGYFKIYSKHTPINLVRDLPPGFSALEPLVDLPIGINITRFQTLLALHRSYLTPGDSSSGWTAGAAAYYVGYLQPRTFLLKYNENGTITDAVDCALDPLSETKCTLKSFTVEKGIYQTSNFRVQPTDSIVRFPNITNLCPFGEVFNATTFASVYAWNRKRISNCVADYSVLYNSTSFSTFKCYGVSPTKLNDLCFTNVYADSFVITGDEVRQIAPGQTGKIADYNYKLPDDFTGCVIAWNSKHIDAKEGGNFNYLYRLFRKANLKPFERDISTEIYQAGSKPCNGQTGLNCYYPLYRYGFYPTDGVGHQPYRVVVLSFELLNAPATVCGPKKSTNLVKNKCVNFNFNGLTGTGVLTESNKKFLPFQQFGRDIADTTDAVRDPQTLEILDITPCSFGGVSVITPGTNASNQVAVLYQDVNCTEVPVAIHADQLTPTWRVYSTGSNVFQTRAGCLIGAEHVNNSYECDIPIGAGICASYQTQTNSRSVASQSIIAYTMSLGAENSVAYSNNSIAIPTNFTISVTTEILPVSMTKTSVDCTMYICGDSTECSNLLLQYGSFCTQLNRALTGIAVEQDKNTQEVFAQVKQIYKTPPIKDFGGFNFSQILPDPSKPSKRSFIEDLLFNKVTLADAGFIKQYGDCLGDIAARDLICAQKFNGLTVLPPLLTDEMIAQYTSALLAGTITSGWTFGAGAALQIPFAMQMAYRFNGIGVTQNVLYENQKLIANQFNSAIGKIQDSLSSTASALGKLQDVVNQNAQALNTLVKCLSSNFGAISSVLNDILSRLDKVEAEVQIDRLITGRLQCLQTYVTQQLIRAAEIRASANLAATKMSECVLGQSKRVDFCGKGYHLMSFPQSAPHGVVFLHVTYVPAQEKNFTTAPAICHDGKAHFPREGVFVSNGTHWFVTQRNFYEPQIITTDNTFVSGSCDVVIGIVNNTVYDPLQPELDSFKEELDKYFKNHTSPDVDLGDISGINASVVNIQKEIDRLNEVAKNLNESLIDLQELGKYEQYIKGGGGSDIIKLLNEQVNKEMQSSNLYMSMSSWCYTHSLDGAGLFLFDHAAEEYEHAKKLIIFLNENNVPVQLTSISAPEHKFEGLTQIFQKAYEHEQHISESINNIVDHAIKSKDHATFNFLQWYVAEQHEEEVLFKDILDKIELIGNENHGLYLADQYVKGIAKSRKS

SEQ ID NO: 5301 - protein, 1379 aa, Artificial Sequence
  SARS-CoV-2/Wuhan/HBCDC-HB-01/2019__EPI_ISL_402132 spike protein (1-1211)(Q965C_S1003C) Ferritin construct
MFVFLVLLPLVSSQCVNLTTRTQLPPAYTNSITRGVYYPDKVFRSSVLHSTQDLFLPFFSNVTWFHAIHVSGTNGTKRFDNPVLPFNDGVYFASTEKSNIIRGWIFGTTLDSKTQSLLIVNNATNVVIKVCEFQFCNDPFLGVYYHKNNKSWMESEFRVYSSANNCTFEYVSQPFLMDLEGKQGNFKNLREFVFKNIDGYFKIYSKHTPINLVRDLPQGFSALEPLVDLPIGINITRFQTLLALHRSYLTPGDSSSGWTAGAAAYYVGYLQPRTFLLKYNENGTITDAVDCALDPLSETKCTLKSFTVEKGIYQTSNFRVQPTESIVRFPNITNLCPFGEVFNATRFASVYAWNRKRISNCVADYSVLYNSASFSTFKCYGVSPTKLNDLCFTNVYADSFVIRGDEVRQIAPGQTGKIADYNYKLPDDFTGCVIAWNSNNLDSKVGGNYNYLYRLFRKSNLKPFERDISTEIYQAGSTPCNGVEGFNCYFPLQSYGFQPTNGVGYQPYRVVVLSFELLHAPATVCGPKKSTNLVKNKCVNFNFNGLTGTGVLTESNKKFLPFQQFGRDIADTTDAVRDPQTLEILDITPCSFGGVSVITPGTNTSNQVAVLYQDVNCTEVPVAIHADQLTPTWRVYSTGSNVFQTRAGCLIGAEHVNNSYECDIPIGAGICASYQTQTNSPRRARSVASQSIIAYTMSLGAENSVAYSNNSIAIPTNFTISVTTEILPVSMTKTSVDCTMYICGDSTECSNLLLQYGSFCTQLNRALTGIAVEQDKNTQEVFAQVKQIYKTPPIKDFGGFNFSQILPDPSKPSKRSFIEDLLFNKVTLADAGFIKQYGDCLGDIAARDLICAQKFNGLTVLPPLLTDEMIAQYTSALLAGTITSGWTFGAGAALQIPFAMQMAYRFNGIGVTQNVLYENQKLIANQFNSAIGKIQDSLSSTASALGKLQDVVNQNAQALNTLVKCLSSNFGAISSVLNDILSRLDKVEAEVQIDRLITGRLQCLQTYVTQQLIRAAEIRASANLAATKMSECVLGQSKRVDFCGKGYHLMSFPQSAPHGVVFLHVTYVPAQEKNFTTAPAICHDGKAHFPREGVFVSNGTHWFVTQRNFYEPQIITTDNTFVSGNCDVVIGIVNNTVYDPLQPELDSFKEELDKYFKNHTSPDVDLGDISGINASVVNIQKEIDRLNEVAKNLNESLIDLQELGKYEQYIKGGGGSDIIKLLNEQVNKEMQSSNLYMSMSSWCYTHSLDGAGLFLFDHAAEEYEHAKKLIIFLNENNVPVQLTSISAPEHKFEGLTQIFQKAYEHEQHISESINNIVDHAIKSKDHATFNFLQWYVAEQHEEEVLFKDILDKIELIGNENHGLYLADQYVKGIAKSRKS

SEQ ID NO: 5302 - protein, 1379 aa, Artificial Sequence
  SARS-CoV-2/Guangdong/20SF028/2020__EPI_ISL_403936 spike protein (1-1211)(Q965C_S1003C) Ferritin construct
MFVFLVLLPLVSSQCVNLTTRTQLPPAYTNSFTRGVYYPDKVFRSSVLYSTQDLFLPFFSNVTWFHAIHVSGTNGTKRFDNPVLPFNDGVYFASTEKSNIIRGWIFGTTLDSKTQSLLIVNNATNVVIKVCEFQFCNDPFLGVYYHKNNKSWMESEFRVYSSANNCTFEYVSQPFLMDLEGKQGNFKNLREFVFKNIDGYFKIYSKHTPINLVRDLPQGFSALEPLVDLPIGINITRFQTLLALHRSYLTPGDSSSGWTAGAAAYYVGYLQPRTFLLKYNENGTITDAVDCALDPLSETKCTLKSFTVEKGIYQTSNFRVQPTESIVRFPNITNLCPFGEVFNATRFASVYAWNRKRISNCVADYSVLYNSASFSTFKCYGVSPTKLNDLCFTNVYADSFVIRGDEVRQIAPGQTGKIADYNYKLPDDFTGCVIAWNSNNLDSKVGGNYNYLYRLFRKSNLKPFERDISTEIYQAGSTPCNGVEGFNCYFPLQSYGFQPTNGVGYQPYRVVVLSFELLHAPATVCGPKKSTNLVKNKCVNFNFNGLTGTGVLTESNKKFLPFQQFGRDIADTTDAVRDPQTLEILDITPCSFGGVSVITPGTNTSNQVAVLYQDVNCTEVPVAIHADQLTPTWRVYSTGSNVFQTRAGCLIGAEHVNNSYECDIPIGAGICASYQTQTNSPRRARSVASQSIIAYTMSLGAENSVAYSNNSIAIPTNFTISVTTEILPVSMTKTSVDCTMYICGDSTECSNLLLQYGSFCTQLNRALTGIAVEQDKNTQEVFAQVKQIYKTPPIKDFGGFNFSQILPDPSKPSKRSFIEDLLFNKVTLADAGFIKQYGDCLGDIAARDLICAQKFNGLTVLPPLLTDEMIAQYTSALLAGTITSGWTFGAGAALQIPFAMQMAYRFNGIGVTQNVLYENQKLIANQFNSAIGKIQDSLSSTASALGKLQDVVNQNAQALNTLVKCLSSNFGAISSVLNDILSRLDKVEAEVQIDRLITGRLQCLQTYVTQQLIRAAEIRASANLAATKMSECVLGQSKRVDFCGKGYHLMSFPQSAPHGVVFLHVTYVPAQEKNFTTAPAICHDGKAHFPREGVFVSNGTHWFVTQRNFYEPQIITTDNTFVSGNCDVVIGIVNNTVYDPLQPELDSFKEELDKYFKNHTSPDVDLGDISGINASVVNIQKEIDRLNEVAKNLNESLIDLQELGKYEQYIKGGGGSDIIKLLNEQVNKEMQSSNLYMSMSSWCYTHSLDGAGLFLFDHAAEEYEHAKKLIIFLNENNVPVQLTSISAPEHKFEGLTQIFQKAYEHEQHISESINNIVDHAIKSKDHATFNFLQWYVAEQHEEEVLFKDILDKIELIGNENHGLYLADQYVKGIAKSRKS

SEQ ID NO: 5303 - protein, 1379 aa, Artificial Sequence
  SARS-CoV-2/Shenzhen/SZTH-001/2020__EPI_ISL_406592 spike protein (1-1211)(Q965C_S1003C) Ferritin construct
MFVFLVLLPLVSSQCVNLTTRTQLPPAYTNSFTRGVYYPDKVFRSSVLHSTQDLFLPFFSNVTWFHAIHVSGTNGTKRFDNPVLPFNDGVYFASTEKSNIIRGWIFGTTLDSKTQSLLIVNNATNVVIKVCEFQFCNDPFLGVYYHKNNKSWMESEFRVYSSANNCTFEYVSQPFLMDLEGKQGNFKNLREFVFKNIDGYFKIYSKHTPINLVRDLPQGFSALEPLVDLPIGINITRFQTLLALHRSYLTPGDSSSGWTAGAAAYYVGYLQPRTFLLKYNENGTITDAVDCALDPLSETKCTLKSFTVEKGIYQTSNFRVQPTESIVRFPNITNLCPFGEVFNATRFASVYAWNRKRISNCVADYSVLYNSASFSTFKCYGVSPTKLNDLCFTNVYADSFVIRGDEVRQIAPGQTGKIADYNYKLPDDFTGCVIAWNSNNLDSKVGGNYNYLYRLFRKSNLKPFERDISTEIYQAGSTPCNGVEGFNCYFPLQSYGFQPTNGVGYQPYRVVVLSFELLHAPATVCGPKKSTNLVKNKCVNFNFNGLTGTGVLTESNKKFLPFQQFGRDIADTTDAVRDPQTLEILDITPCSFGGVSVITPGTNTSNQVAVLYQDVNCTEVPVAIHADQLTPTWRVYSTGSNVFQTRAGCLIGAEHVNNSYECDIPIGAGICASYQTQTNSPRRARSVASQSIIAYTMSLGAENSVAYSNNSIAIPTNFTISVTTEILPVSMTKTSVDCTMYICGDSTECSNLLLQYGSFCTQLNRALTGIAVEQDKNTQEVFAQVKQIYKTPPIKDFGGFNFSQILPDPSKPSKRSFIEDLLFNKVTLADAGFIKQYGDCLGDIAARDLICAQKFNGLTVLPPLLTDEMIAQYTSALLAGTITSGWTFGAGAALQIPFAMQMAYRFNGIGVTQNVLYENQKLIANQFNSAIGKIQDSLSSTASALGKLQDVVNQNAQALNTLVKCLSSNFGAISSVLNDILSRLDKVEAEVQIDRLITGRLQCLQTYVTQQLIRAAEIRASANLAATKMSECVLGQSKRVDFCGKGYHLMSFPQSAPHGVVFLHVTYVPAQEKNFTTAPAICHDGKAHFPREGVFVSNGTHWFVTQRNFYEPQIITTDNTFVSGNCDVLIGIVNNTVYDPLQPELDSFKEELDKYFKNHTSPDVDLGDISGINASVVNIQKEIDRLNEVAKNLNESLIDLQELGKYEQYIKGGGGSDIIKLLNEQVNKEMQSSNLYMSMSSWCYTHSLDGAGLFLFDHAAEEYEHAKKLIIFLNENNVPVQLTSISAPEHKFEGLTQIFQKAYEHEQHISESINNIVDHAIKSKDHATFNFLQWYVAEQHEEEVLFKDILDKIELIGNENHGLYLADQYVKGIAKSRKS

SEQ ID NO: 5304 - protein, 1379 aa, Artificial Sequence
  SARS-CoV-2/Shenzhen/SZTH-004/2020__EPI_ISL_406595 spike protein (1-1211)(Q965C_S1003C) Ferritin construct
MFVFLVLLPLVSSQCVNLTTRTQLPPAYTNSFTRGVYYPDKVFRSSVLHSTQDLFLPFFSNVTWFHAIHVSGTNGTKRFDNPVLPFNDGVYFASTEKSNIIRGWIFGTTLDSKTQSLLIVNNATNVVIKVCEFQFCNDPFLGVYYHKNNKSWMESEFRVYSSANNCTFEYVSQPFLMDLEGKQGNFKNLREFVFKNIDGYFKIYSKHTPINLVRDLPQGFSALEPLVDLPIGINITRFQTLLALHRSYLTPGDSSSGWTAGAAAYYVGYLQPRTFLLKYNENGTITDAVDCALDPLSETKCTLKSFTVEKGIYQTSNFRVQPTESIVRFPNITNLCPFGEVFNATRFASVYAWDRKRISNCVAYYSVLYNSASFSTFKCYGVSPTKLNDLCFTNVYADSFVIRGDEVRQIAPGQTGKIADYNYKLPDDFTGCVIAWNSNNLDSKVGGNYNYLYRLFRKSNLKPFERDISTEIYQAGSTPCNGVEGFNCYFPLQSYGFQPTNGVGYQPYRVVVLSFELLHAPATVCGPKKSTNLVKNKCVNFNFNGLTGTGVLTESNKKFLPFQQFGRDIADTTDAVRDPQTLEILDITPCSFGGVSVITPGTNTSNQVAVLYQDVNCTEVPVAIHADQLTPTWRVYSTGSNVFQTRAGCLIGAEHVNNSYECDIPIGAGICASYQTQTNSPRRARSVASQSIIAYTMSLGAENSVAYSNNSIAIPTNFTISVTTEILPVSMTKTSVDCTMYICGDSTECSNLLLQYGSFCTQLNRALTGIAVEQDKNTQEVFAQVKQIYKTPPIKDFGGFNFSQILPDPSKPSKRSFIEDLLFNKVTLADAGFIKQYGDCLGDIAARDLICAQKFNGLTVLPPLLTDEMIAQYTSALLAGTITSGWTFGAGAALQIPFAMQMAYRFNGIGVTQNVLYENQKLIANQFNSAIGKIQDSLSSTASALGKLQDVVNQNAQALNTLVKCLSSNFGAISSVLNDILSRLDKVEAEVQIDRLITGRLQCLQTYVTQQLIRAAEIRASANLAATKMSECVLGQSKRVDFCGKGYHLMSFPQSAPHGVVFLHVTYVPAQEKNFTTAPAICHDGKAHFPREGVFVSNGTHWFVTQRNFYEPQIITTDNTFVSGNCDVVIGIVNNTVYDPLQPELDSFKEELDKYFKNHTSPDVDLGDISGINASVVNIQKEIDRLNEVAKNLNESLIDLQELGKYEQYIKGGGGSDIIKLLNEQVNKEMQSSNLYMSMSSWCYTHSLDGAGLFLFDHAAEEYEHAKKLIIFLNENNVPVQLTSISAPEHKFEGLTQIFQKAYEHEQHISESINNIVDHAIKSKDHATFNFLQWYVAEQHEEEVLFKDILDKIELIGNENHGLYLADQYVKGIAKSRKS

SEQ ID NO: 5305 - protein, 1379 aa, Artificial Sequence
  SARS-CoV-2/France/IDF0372/2020__EPI_ISL_406596 spike protein (1-1211)(Q965C_S1003C) Ferritin construct
MFVFLVLLPLVSSQCVNLTTRTQLPPAYTNSFTRGVYYPDKVFRSSVLHSTQDLFLPFFSNVTWFHAIHVSGTNGTKRFDNPVLPFNDGVYFASTEKSNIIRGWIFGTTLDSKTQSLLIVNNATNVVIKVCEFQFCNDPFLGVYYHKNNKSWMESEFRVYSSANNCTFEYVSQPFLMDLEGKQGNFKNLREFVFKNIDGYFKIYSKHTPINLVRDLPQGFSALEPLVDLPIGINITRFQTLLALHRSYLTPGDSSSGWTAGAAAYYVGYLQPRTFLLKYNENGTITDAVDCALDPLSETKCTLKSFTVEKGIYQTSNFRVQPTESIVRFPNITNLCPFGEVFNATRFASVYAWNRKRISNCVADYSFLYNSASFSTFKCYGVSPTKLNDLCFTNVYADSFVIRGDEVRQIAPGQTGKIADYNYKLPDDFTGCVIAWNSNNLDSKVGGNYNYLYRLFRKSNLKPFERDISTEIYQAGSTPCNGVEGFNCYFPLQSYGFQPTNGVGYQPYRVVVLSFELLHAPATVCGPKKSTNLVKNKCVNFNFNGLTGTGVLTESNKKFLPFQQFGRDIADTTDAVRDPQTLEILDITPCSFGGVSVITPGTNTSNQVAVLYQDVNCTEVPVAIHADQLTPTWRVYSTGSNVFQTRAGCLIGAEHVNNSYECDIPIGAGICASYQTQTNSPRRARSVASQSIIAYTMSLGAENSVAYSNNSIAIPTNFTISVTTEILPVSMTKTSVDCTMYICGDSTECSNLLLQYGSFCTQLNRALTGIAVEQDKNTQEVFAQVKQIYKTPPIKDFGGFNFSQILPDPSKPSKRSFIEDLLFNKVTLADAGFIKQYGDCLGDIAARDLICAQKFNGLTVLPPLLTDEMIAQYTSALLAGTITSGWTFGAGAALQIPFAMQMAYRFNGIGVTQNVLYENQKLIANQFNSAIGKIQDSLSSTASALGKLQDVVNQNAQALNTLVKCLSSNFGAISSVLNDILSRLDKVEAEVQIDRLITGRLQCLQTYVTQQLIRAAEIRASANLAATKMSECVLGQSKRVDFCGKGYHLMSFPQSAPHGVVFLHVTYVPAQEKNFTTAPAICHDGKAHFPREGVFVSNGTHWFVTQRNFYEPQIITTDNTFVSGNCDVVIGIVNNTVYDPLQPELDSFKEELDKYFKNHTSPDVDLGDISGINASVVNIQKEIDRLNEVAKNLNESLIDLQELGKYEQYIKGGGGSDIIKLLNEQVNKEMQSSNLYMSMSSWCYTHSLDGAGLFLFDHAAEEYEHAKKLIIFLNENNVPVQLTSISAPEHKFEGLTQIFQKAYEHEQHISESINNIVDHAIKSKDHATFNFLQWYVAEQHEEEVLFKDILDKIELIGNENHGLYLADQYVKGIAKSRKS

SEQ ID NO: 5306 - protein, 1379 aa, Artificial Sequence
  SARS-CoV-2/Australia/VIC01/2020__EPI_ISL_406844 spike protein (1-1211)(Q965C_S1003C) Ferritin construct
MFVFLVLLPLVSSQCVNLTTRTQLPPAYTNSFTRGVYYPDKVFRSSVLHSTQDLFLPFFSNVTWFHAIHVSGTNGTKRFDNPVLPFNDGVYFASTEKSNIIRGWIFGTTLDSKTQSLLIVNNATNVVIKVCEFQFCNDPFLGVYYHKNNKSWMESEFRVYSSANNCTFEYVSQPFLMDLEGKQGNFKNLREFVFKNIDGYFKIYSKHTPINLVRDLPQGFSALEPLVDLPIGINITRFQTLLALHRRYLTPGDSSSGWTAGAAAYYVGYLQPRTFLLKYNENGTITDAVDCALDPLSETKCTLKSFTVEKGIYQTSNFRVQPTESIVRFPNITNLCPFGEVFNATRFASVYAWNRKRISNCVADYSVLYNSASFSTFKCYGVSPTKLNDLCFTNVYADSFVIRGDEVRQIAPGQTGKIADYNYKLPDDFTGCVIAWNSNNLDSKVGGNYNYLYRLFRKSNLKPFERDISTEIYQAGSTPCNGVEGFNCYFPLQSYGFQPTNGVGYQPYRVVVLSFELLHAPATVCGPKKSTNLVKNKCVNFNFNGLTGTGVLTESNKKFLPFQQFGRDIADTTDAVRDPQTLEILDITPCSFGGVSVITPGTNTSNQVAVLYQDVNCTEVPVAIHADQLTPTWRVYSTGSNVFQTRAGCLIGAEHVNNSYECDIPIGAGICASYQTQTNSPRRARSVASQSIIAYTMSLGAENSVAYSNNSIAIPTNFTISVTTEILPVSMTKTSVDCTMYICGDSTECSNLLLQYGSFCTQLNRALTGIAVEQDKNTQEVFAQVKQIYKTPPIKDFGGFNFSQILPDPSKPSKRSFIEDLLFNKVTLADAGFIKQYGDCLGDIAARDLICAQKFNGLTVLPPLLTDEMIAQYTSALLAGTITSGWTFGAGAALQIPFAMQMAYRFNGIGVTQNVLYENQKLIANQFNSAIGKIQDSLSSTASALGKLQDVVNQNAQALNTLVKCLSSNFGAISSVLNDILSRLDKVEAEVQIDRLITGRLQCLQTYVTQQLIRAAEIRASANLAATKMSECVLGQSKRVDFCGKGYHLMSFPQSAPHGVVFLHVTYVPAQEKNFTTAPAICHDGKAHFPREGVFVSNGTHWFVTQRNFYEPQIITTDNTFVSGNCDVVIGIVNNTVYDPLQPELDSFKEELDKYFKNHTSPDVDLGDISGINASVVNIQKEIDRLNEVAKNLNESLIDLQELGKYEQYIKGGGGSDIIKLLNEQVNKEMQSSNLYMSMSSWCYTHSLDGAGLFLFDHAAEEYEHAKKLIIFLNENNVPVQLTSISAPEHKFEGLTQIFQKAYEHEQHISESINNIVDHAIKSKDHATFNFLQWYVAEQHEEEVLFKDILDKIELIGNENHGLYLADQYVKGIAKSRKS

SEQ ID NO: 5307 - protein, 1379 aa, Artificial Sequence
  SARS-CoV-2/Germany/BavPat1/2020__EPI_ISL_406862 spike protein (1-1211)(Q965C_S1003C) Ferritin construct
MFVFLVLLPLVSSQCVNLTTRTQLPPAYTNSFTRGVYYPDKVFRSSVLHSTQDLFLPFFSNVTWFHAIHVSGTNGTKRFDNPVLPFNDGVYFASTEKSNIIRGWIFGTTLDSKTQSLLIVNNATNVVIKVCEFQFCNDPFLGVYYHKNNKSWMESEFRVYSSANNCTFEYVSQPFLMDLEGKQGNFKNLREFVFKNIDGYFKIYSKHTPINLVRDLPQGFSALEPLVDLPIGINITRFQTLLALHRSYLTPGDSSSGWTAGAAAYYVGYLQPRTFLLKYNENGTITDAVDCALDPLSETKCTLKSFTVEKGIYQTSNFRVQPTESIVRFPNITNLCPFGEVFNATRFASVYAWNRKRISNCVADYSVLYNSASFSTFKCYGVSPTKLNDLCFTNVYADSFVIRGDEVRQIAPGQTGKIADYNYKLPDDFTGCVIAWNSNNLDSKVGGNYNYLYRLFRKSNLKPFERDISTEIYQAGSTPCNGVEGFNCYFPLQSYGFQPTNGVGYQPYRVVVLSFELLHAPATVCGPKKSTNLVKNKCVNFNFNGLTGTGVLTESNKKFLPFQQFGRDIADTTDAVRDPQTLEILDITPCSFGGVSVITPGTNTSNQVAVLYQGVNCTEVPVAIHADQLTPTWRVYSTGSNVFQTRAGCLIGAEHVNNSYECDIPIGAGICASYQTQTNSPRRARSVASQSIIAYTMSLGAENSVAYSNNSIAIPTNFTISVTTEILPVSMTKTSVDCTMYICGDSTECSNLLLQYGSFCTQLNRALTGIAVEQDKNTQEVFAQVKQIYKTPPIKDFGGFNFSQILPDPSKPSKRSFIEDLLFNKVTLADAGFIKQYGDCLGDIAARDLICAQKFNGLTVLPPLLTDEMIAQYTSALLAGTITSGWTFGAGAALQIPFAMQMAYRFNGIGVTQNVLYENQKLIANQFNSAIGKIQDSLSSTASALGKLQDVVNQNAQALNTLVKCLSSNFGAISSVLNDILSRLDKVEAEVQIDRLITGRLQCLQTYVTQQLIRAAEIRASANLAATKMSECVLGQSKRVDFCGKGYHLMSFPQSAPHGVVFLHVTYVPAQEKNFTTAPAICHDGKAHFPREGVFVSNGTHWFVTQRNFYEPQIITTDNTFVSGNCDVVIGIVNNTVYDPLQPELDSFKEELDKYFKNHTSPDVDLGDISGINASVVNIQKEIDRLNEVAKNLNESLIDLQELGKYEQYIKGGGGSDIIKLLNEQVNKEMQSSNLYMSMSSWCYTHSLDGAGLFLFDHAAEEYEHAKKLIIFLNENNVPVQLTSISAPEHKFEGLTQIFQKAYEHEQHISESINNIVDHAIKSKDHATFNFLQWYVAEQHEEEVLFKDILDKIELIGNENHGLYLADQYVKGIAKSRKS

SEQ ID NO: 5308 - protein, 1379 aa, Artificial Sequence
  SARS-CoV-2/Wuhan/HBCDC-HB-02/2020__EPI_ISL_412978 spike protein (1-1211)(Q965C_S1003C) Ferritin construct
MFVFLVLLPLVSSQCVNLTTRTQLPPAYTNSFTRGVYYPDKVFRSSVLHSTQDLFLPFFSNVTWFHAIHVSGTNGTKRFDNPVLPFNDGVYFASTEKSNIIRGWIFGTTLDSKTQSLLIVNNATNVVIKVCEFQFCNDPFLGVYYHKNNKSWMESEFRVYSSANNCTFEYVSQPFLMDLEGKQGNFKNLREFVFKNIDGYFKIYSKHTPINLVRDLPQGFSALEPLVDLPIGINITRFQTLLALHRSYLTPGDSSSGWTAGAAAYYVGYLQPRTFLLKYNENGTITDAVDCALDPLSETKCTLKSFTVEKGIYQTSNFRVQPTESIVRFPNITNLCPFGEVFNATRFASVYAWNRKRISNCVADYSVLYNSASFSTFKCYGVSPTKLNDLCFTNVYADSFVIRGDEVRQIAPGQTGKIADYNYKLPDDFTGCVIAWNSNNLDSKVGGNYNYLYRLFRKSNLKPFERDISTEIYQAGSTPCNGVEGFNCYFPLQSYGFQPTNGVGYQPYRVVVLSFELLHAPATVCGPKKSTNLVKNKCVNFNFNGLTGTGVLTESNKKFLPFQQFGRDIADTTDAVRDPQTLEILDITPCSFGGVSVITPGTNTSNQVAVLYQDVNCTEVPVAIHADQLTPTWRVYSTGSNVFQTRAGCLIGAEHVNNSYECDIPIGAGICASYQTQTNSPRRARSVASQSIIAYTMSLGAENSVAYSNNSIAIPTNFTISVTTEILPVSMTKTSVDCTMYICGDSTECSNFLLQYGSFCTQLNRALTGIAVEQDKNTQEVFAQVKQIYKTPPIKDFGGFNFSQILPDPSKPSKRSFIEDLLFNKVTLADAGFIKQYGDCLGDIAARDLICAQKFNGLTVLPPLLTDEMIAQYTSALLAGTITSGWTFGAGAALQIPFAMQMAYRFNGIGVTQNVLYENQKLIANQFNSAIGKIQDSLSSTASALGKLQDVVNQNAQALNTLVKCLSSNFGAISSVLNDILSRLDKVEAEVQIDRLITGRLQCLQTYVTQQLIRAAEIRASANLAATKMSECVLGQSKRVDFCGKGYHLMSFPQSAPHGVVFLHVTYVPAQEKNFTTAPAICHDGKAHFPREGVFVSNGTHWFVTQRNFYEPQIITTDNTFVSGNCDVVIGIVNNTVYDPLQPELDSFKEELDKYFKNHTSPDVDLGDISGINASVVNIQKEIDRLNEVAKNLNESLIDLQELGKYEQYIKGGGGSDIIKLLNEQVNKEMQSSNLYMSMSSWCYTHSLDGAGLFLFDHAAEEYEHAKKLIIFLNENNVPVQLTSISAPEHKFEGLTQIFQKAYEHEQHISESINNIVDHAIKSKDHATFNFLQWYVAEQHEEEVLFKDILDKIELIGNENHGLYLADQYVKGIAKSRKS

SEQ ID NO: 5309 - protein, 1379 aa, Artificial Sequence
  SARS-CoV-2/Australia/QLD02/2020__EPI_ISL_407896 spike protein (1-1211)(Q965C_S1003C) Ferritin construct
MFVFLVLLPLVSSQCVNLTTRTQLPPAYTNSFTRGVYYPDKVFRSSVLHSTQDLFLPFFSNVTWFHAIHVSGTNGTKRFDNPVLPFNDGVYFASTEKSNIIRGWIFGTTLDSKTQSLLIVNNATNVVIKVCEFQFCNDPFLGVYYHKNNKSWMESEFRVYSSANNCTFEYVSQPFLMDLEGKQGNFKNLREFVFKNIDGYFKIYSKHTPINLVRDLPQGFSALEPLVDLPIGINITRFQTLLALHRSYLTPGDSSSGWTAGAAAYYVGYLQPRTFLLKYNENGTITDAVDCALDPLSETKCTLKSFTVEKGIYQTSNFRVQPTESIVRFPNITNLCPFGEVFNATRFASVYAWNRKRISNCVADYSVLYNSASFSTFKCYGVSPTKLNDLCFTNVYADSFVIRGDEVRQIAPGQTGKIADYNYKLPDDFTGCVIAWNSNNLDSKVGGNYNYLYRLFRKSNLKPFERDISTEIYQAGSTPCNGVEGFNCYFPLQSYGFQPTNGVGYQPYRVVVLSFELLHAPATVCGPKKSTNLVKNKCVNFNFNGLTGTGVLTESNKKFLPFQQFGRDIADTTDAVRDPQTLEILDITPCSFGGVSVITPGTNTSNQVAVLYQDVNCTEVPVAIHADQLTPTWRVYSTGSNVFQTRAGCLIGAEHVNNSYECDIPIGAGICASYQTQTNSPRRARSVASQSIIAYTMSLGAENSVAYSNNSIAIPTNFTISVTTEILPVSMTKTSVDCTMYICGDSTECSNLLLQYGSFCTQLNRALTGIAVEQDKNTQEVFAQVKQIYKTPPIKDFGGFNFSQILPDPSKPSKRSFIEDLLFNKVTLADAGFIKQYGDCLGDIAARDLICAQKFNGLTVLPPLLTDEMIAQYTSALLAGTITSGWTFGAGAALQIPFAMQMAYRFNGIGVTQNVLYENQKLIANQFNSAIGKIQDSLSSTASALGKLQDVVNQNAQALNTLVKCLSSNFGAISSVLNDILSRLDKVEAEVQIDRLITGRLQCLQTYVTQQLIRAAEIRASANLAATKMSECVLGQSKRVDFCGKGYHLMSFPQSAPHGVVFLHVTYVPAQEKNFTTAPAICHDGKAHFPREGVFVSNGTHWFVTQRNFYEPQIITTDNTFVSGNCDVVIGIVNNTVYDPLQLELDSFKEELDKYFKNHTSPDVDLGDISGINASVVNIQKEIDRLNEVAKNLNESLIDLQELGKYEQYIKGGGGSDIIKLLNEQVNKEMQSSNLYMSMSSWCYTHSLDGAGLFLFDHAAEEYEHAKKLIIFLNENNVPVQLTSISAPEHKFEGLTQIFQKAYEHEQHISESINNIVDHAIKSKDHATFNFLQWYVAEQHEEEVLFKDILDKIELIGNENHGLYLADQYVKGIAKSRKS

SEQ ID NO: 5310 - protein, 1379 aa, Artificial Sequence
  SARS-CoV-2/India/1-31/2020__EPI_ISL_413523 spike protein (1-1211)(Q965C_S1003C) Ferritin construct
MFVFLVLLPLVSSQCVNLTTRTQLPPAYTNSFTRGVYYPDKVFRSSVLHSTQDLFLPFFSNVTWFHAIHVSGTNGTKRFDNPVLPFNDGVYFASTEKSNIIRGWIFGTTLDSKTQSLLIVNNATNVVIKVCEFQFCNDPFLGVYYHKNNKSWMESEFRVYSSANNCTFEYVSQPFLMDLEGKQGNFKNLREFVFKNIDGYFKIYSKHTPINLVRDLPQGFSALEPLVDLPIGINITRFQTLLALHRSYLTPGDSSSGWTAGAAAYYVGYLQPRTFLLKYNENGTITDAVDCALDPLSETKCTLKSFTVEKGIYQTSNFRVQPTESIVRFPNITNLCPFGEVFNATRFASVYAWNRKRISNCVADYSVLYNSASFSTFKCYGVSPTKLNDLCFTNVYADSFVIRGDEVRQIAPGQTGKIADYNYKLPDDFTGCVIAWNSNNLDSKVGGNYNYLYRLFRKSNLKPFERDISTEIYQAGSTPCNGVEGFNCYFPLQSYGFQPTNGVGYQPYRVVVLSFELLHAPATVCGPKKSTNLVKNKCVNFNFNGLTGTGVLTESNKKFLPFQQFGRDIADTTDAVRDPQTLEILDITPCSFGGVSVITPGTNTSNQVAVLYQDVNCTEVPVAIHADQLTPTWRVYSTGSNVFQTRAGCLIGAEHVNNSYECDIPIGAGICASYQTQTNSPRRARSVASQSIIAYTMSLGAENSVAYSNNSIAIPTNFTISVTTEILPVSMTKTSVDCTMYICGDSTECSNLLLQYGSFCTQLNRALTGIAVEQDKNTQEVFAQVKQIYKTPPIKDFGGFNFSQILPDPSKPSKRSFIEDLLFNKVTLADAGFIKQYGDCLGDIAARDLICAQKFNGLTVLPPLLTDEMIAQYTSALLAGTITSGWTFGAGAALQIPFAMQMAYRFNGIGVTQNVLYENQKLIANQFNSVIGKIQDSLSSTASALGKLQDVVNQNAQALNTLVKCLSSNFGAISSVLNDILSRLDKVEAEVQIDRLITGRLQCLQTYVTQQLIRAAEIRASANLAATKMSECVLGQSKRVDFCGKGYHLMSFPQSAPHGVVFLHVTYVPAQEKNFTTAPAICHDGKAHFPREGVFVSNGTHWFVTQRNFYEPQIITTDNTFVSGNCDVVIGIVNNTVYDPLQPELDSFKEELDKYFKNHTSPDVDLGDISGINASVVNIQKEIDRLNEVAKNLNESLIDLQELGKYEQYIKGGGGSDIIKLLNEQVNKEMQSSNLYMSMSSWCYTHSLDGAGLFLFDHAAEEYEHAKKLIIFLNENNVPVQLTSISAPEHKFEGLTQIFQKAYEHEQHISESINNIVDHAIKSKDHATFNFLQWYVAEQHEEEVLFKDILDKIELIGNENHGLYLADQYVKGIAKSRKS

SEQ ID NO: 5311 - protein, 1379 aa, Artificial Sequence
  SARS-CoV-2/Guangdong/GD2020087-P0008/2020__EPI_ISL_413863 spike protein (1-1211)(Q965C_S1003C) Ferritin construct
MFVFLVLLPLVSSQCVNLTTRTQLPPAYTNSFTRGVYYPDKVFRSSVLHSTQDLFLPFFSNVTWFHAIHVSGTNGTKRFDNPVLPFNDGVYFASTEKSNIIRGWIFGTTLDSKTQSLLIVNNATNVVIKVCEFQFCNDPFLGVYYHKNNKSWMESEFRVYSSANNCTFEYVSQPFLMDLEGKQGNFKNLREFVFKNIDGYFKIYSKHTPINLVRDLPQGFSALEPLVDLPIGINITRFQTLLALHRSYLTPGDSSSGWTAGAAAYYVGYLQPRTFLLKYNENGTITDAVDCALDPLSETKCTLKSFTVEKGIYQTSNFRVQPTESIVRFPNITNLCPFGEVFNATRFASVYAWNRKRISNCVADYSVLYNSASFSTFKCYGVSPTKLNDLCFTNVYADSFVIRGDEVREIAPGQTGKIADYNYKLPDDFTGCVIAWNSNNLDSKVGGNYNYLYRLFRKSNLKPFERDISTEIYQAGSTPCNGVEGFNCYFPLQSYGFQPTNGVGYQPYRVVVLSFELLHAPATVCGPKKSTNLVKNKCVNFNFNGLTGTGVLTESNKKFLPFQQFGRDIADTTDAVRDPQTLEILDITPCSFGGVSVITPGTNTSNQVAVLYQDVNCTEVPVAIHADQLTPTWRVYSTGSNVFQTRAGCLIGAEHVNNSYECDIPIGAGICASYQTQTNSPRRARSVASQSIIAYTMSLGAENSVAYSNNSIAIPTNFTISVTTEILPVSMTKTSVDCTMYICGDSTECSNLLLQYGSFCTQLNRALTGIAVEQDKNTQEVFAQVKQIYKTPPIKDFGGFNFSQILPDPSKPSKRSFIEDLLFNKVTLADAGFIKQYGDCLGDIAARDLICAQKFNGLTVLPPLLTDEMIAQYTSALLAGTITSGWTFGAGAALQIPFAMQMAYRFNGIGVTQNVLYENQKLIANQFNSAIGKIQDSLSSTASALGKLQDVVNQNAQALNTLVKCLSSNFGAISSVLNDILSRLDKVEAEVQIDRLITGRLQCLQTYVTQQLIRAAEIRASANLAATKMSECVLGQSKRVDFCGKGYHLMSFPQSAPHGVVFLHVTYVPAQEKNFTTAPAICHDGKAHFPREGVFVSNGTHWFVTQRNFYEPQIITTDNTFVSGNCDVVIGIVNNTVYDPLQPELDSFKEELDKYFKNHTSPDVDLGDISGINASVVNIQKEIDRLNEVAKNLNESLIDLQELGKYEQYIKGGGGSDIIKLLNEQVNKEMQSSNLYMSMSSWCYTHSLDGAGLFLFDHAAEEYEHAKKLIIFLNENNVPVQLTSISAPEHKFEGLTQIFQKAYEHEQHISESINNIVDHAIKSKDHATFNFLQWYVAEQHEEEVLFKDILDKIELIGNENHGLYLADQYVKGIAKSRKS

SEQ ID NO: 5312 - protein, 1379 aa, Artificial Sequence
  SARS-CoV-2/Sweden/01/2020__EPI_ISL_411951 spike protein (1-1211)(Q965C_S1003C) Ferritin construct
MFVFLVLLPLVSSQCVNLTTRTQLPPAYTNSFTRGVYYPDKVFRSSVLHSTQDLFLPFFSNVTWFHAIHVSGTNGTKRFDNPVLPFNDGVYFASTEKSNIIRGWIFGTTLDSKTQSLLIVNNATNVVIKVCEFQFCNDPFLGVYYHKNNKSWMESEFRVYSSANNCTFEYVSQPFLMDLEGKQGNFKNLREFVFKNIDGYFKIYSKHTPINLVRDLPQGFSALEPLVDLPIGINITRFQTLLALHRSYLTPGDSSSGWTAGAAAYYVGYLQPRTFLLKYNENGTITDAVDCALDPLSETKCTLKSFTVEKGIYQTSNFRVQPTESIVRFPNITNLCPFGEVFNATRFASVYAWNRKRISNCVADYSVLYNSASFSTFKCYGVSPTKLNDLCFTNVYADSFVIRGDEVRQIAPGQTGKIADYNYKLPDDFTGCVIAWNSNNLDSKVGGNYNYLYRLFRKSNLKPFERDISTEIYQAGSTPCNGVEGFNCYFPLQSYGFQPTNGVGYQPYRVVVLSFELLHAPATVCGPKKSTNLVKNKCVNFNFNGLTGTGVLTESNKKFLPFQQFGRDIADTTDAVRDPQTLEILDITPCSFGGVSVITPGTNTSNQVAVLYQDVNCTEVPVAIHADQLTPTWRVYSTGSNVFQTRAGCLIGAEHVNNSYECDIPIGAGICASYQTQTNSPRRARSVASQSIIAYTMSLGAENSVAYSNNSIAIPTNFTISVTTEILPVSMTKTSVDCTMYICGDSTECSNLLLQYGSFCTQLNRALTGIAVEQDKNTQEVFAQVKQIYKTPPIKDCGGFNFSQILPDPSKPSKRSFIEDLLFNKVTLADAGFIKQYGDCLGDIAARDLICAQKFNGLTVLPPLLTDEMIAQYTSALLAGTITSGWTFGAGAALQIPFAMQMAYRFNGIGVTQNVLYENQKLIANQFNSAIGKIQDSLSSTASALGKLQDVVNQNAQALNTLVKCLSSNFGAISSVLNDILSRLDKVEAEVQIDRLITGRLQCLQTYVTQQLIRAAEIRASANLAATKMSECVLGQSKRVDFCGKGYHLMSFPQSAPHGVVFLHVTYVPAQEKNFTTAPAICHDGKAHFPREGVFVSNGTHWFVTQRNFYEPQIITTDNTFVSGNCDVVIGIVNNTVYDPLQPELDSFKEELDKYFKNHTSPDVDLGDISGINASVVNIQKEIDRLNEVAKNLNESLIDLQELGKYEQYIKGGGGSDIIKLLNEQVNKEMQSSNLYMSMSSWCYTHSLDGAGLFLFDHAAEEYEHAKKLIIFLNENNVPVQLTSISAPEHKFEGLTQIFQKAYEHEQHISESINNIVDHAIKSKDHATFNFLQWYVAEQHEEEVLFKDILDKIELIGNENHGLYLADQYVKGIAKSRKS

SEQ ID NO: 5313 - protein, 1379 aa, Artificial Sequence
  SARS-CoV-2/Tianmen/HBCDC-HB-07/2020__EPI_ISL_412983 spike protein (1-1211)(Q965C_S1003C) Ferritin construct
MFVFLVLLPLVSSQCVNLTTRTQLPPAYTNSFTRGVYYPDKVFRSSVLHSTQDLFLPFFSNVTWFHAIHVSGTNGTKRFDNPVLPFNDGVYFASTEKSNIIRGWIFGTTLDSKTQSLLIVNNATNVVIKVCEFQFCNDPFLGVYYHKNNKSWMESEFRVYSSANNCTFEYVSQPFLMDLEGKQGNFKNLREFVFKNIDGYFKIYSKHTPINLVRDLPQGFSALEPLVDLPIGINITRFQTLLALHRSYLTPGDSSSGWTAGAAAYYVGYLQPRTFLLKYNENGTITDAVDCALDPLSETKCTLKSFTVEKGIYQTSNFRVQPTESIVRFPNITNLCPFGEVFNATRFASVYAWNRKRISNCVADYSVLYNSASFSTFKCYGVSPTKLNDLCFTNVYADSFVIRGDEVRQIAPGQTGKIADYNYKLPDDFTGCVIAWNSNNLDSKVGGNYNYLYRLFRKSNLKPFERDISTEIYQAGSTPCNGVEGFNCYFPLQSYGFQPTNGVGYQPYRVVVLSFELLHAPATVCGPKKSTNLVKNKCVNFNFNGLTGTGVLTESNKKFLPFQQFGRDIADTTDAVRDPQTLEILDITPCSFGGVSVITPGTNTSNQVAVLYQDLNCTEVPVAIHADQLTPTWRVYSTGSNVFQTRAGCLIGAEHVNNSYECDIPIGAGICASYQTQTNSPRRARSVASQSIIAYTMSLGAENSVAYSNNSIAIPTNFTISVTTEILPVSMTKTSVDCTMYICGDSTECSNLLLQYGSFCTQLNRALTGIAVEQDKNTQEVFAQVKQIYKTPPIKDFGGFNFSQILPDPSKPSKRSFIEDLLFNKVTLADAGFIKQYGDCLGDIAARDLICAQKFNGLTVLPPLLTDEMIAQYTSALLAGTITSGWTFGAGAALQIPFAMQMAYRFNGIGVTQNVLYENQKLIANQFNSAIGKIQDSLSSTASALGKLQDVVNQNAQALNTLVKCLSSNFGAISSVLNDILSRLDKVEAEVQIDRLITGRLQCLQTYVTQQLIRAAEIRASANLAATKMSECVLGQSKRVDFCGKGYHLMSFPQSAPHGVVFLHVTYVPAQEKNFTTAPAICHDGKAHFPREGVFVSNGTHWFVTQRNFYEPQIITTDNTFVSGNCDVVIGIVNNTVYDPLQPELDSFKEELDKYFKNHTSPDVDLGDISGINASVVNIQKEIDRLNEVAKNLNESLIDLQELGKYEQYIKGGGGSDIIKLLNEQVNKEMQSSNLYMSMSSWCYTHSLDGAGLFLFDHAAEEYEHAKKLIIFLNENNVPVQLTSISAPEHKFEGLTQIFQKAYEHEQHISESINNIVDHAIKSKDHATFNFLQWYVAEQHEEEVLFKDILDKIELIGNENHGLYLADQYVKGIAKSRKS

SEQ ID NO: 5314 - protein, 1379 aa, Artificial Sequence
  SARS-CoV-2/Hong Kong/case42_VM20002493/2020__EPI_ISL_414527 spike protein (1-1211)(Q965C_S1003C) Ferritin construct
MFVFLVLLPLVSSQCVNLTTRTQLPPAYTNSFTRGVYYPDKVFRSSVLHSTQDLFLPFFSNVTWFHAIHVSGTNGTKRFDNPVLPFNDGVYFASTEKSNIIRGWIFGTTLDSKTQSLLIVNNATNVVIKVCEFQFCNDPFLGVYYHKNNKSWMESEFRVYSSANNCTFEYVSQPFLMDLEGKQGNFKNLREFVFKNIDGYFKIYSKHTPINLVRDLPQGFSALEPLVDLPIGINITRFQTLLALHRSYLTPGDSSSGWTAGAAAYYVGYLQPRTFLLKYNENGTITDAVDCALDPLSETKCTLKSFTVEKGIYQTSNFRVQPTESIVRFPNITNLCPFGEVFNATRFASVYAWNRKRISNCVADYSVLYNSASFSTFKCYGVSPTKLNDLCFTNVYADSFVIRGDEVRQIAPGQTGKIADYNYKLPDDFTGCVIAWNSNNLDSKVGGNYNYLYRLFRKSNLKPFERDISTEIYQAGSTPCNGVEGFNCYFPLQSYGFQPTNGVGYQPYRVVVLSFELLHAPATVCGPKKSTNLVKNKCVNFNFNGLTGTGVLTESNKKFLPFQQFGRDIADTTDAVRDPQTLEILDITPCSFGGVSVITPGTNTSNQVAVLYQDVNCTEVPVAIHADQLTPTWRVYSTGSNVFQTRAGCLIGAEHVNNSYECDIPIGAGICASYQTQTNSPRRARSVASQSIIAYTMSLGAENSVAYSNNSIAIPTNFAISVTTEILPVSMTKTSVDCTMYICGDSTECSNLLLQYGSFCTQLNRALTGIAVEQDKNTQEVFAQVKQIYKTPPIKDFGGFNFSQILPDPSKPSKRSFIEDLLFNKVTLADAGFIKQYGDCLGDIAARDLICAQKFNGLTVLPPLLTDEMIAQYTSALLAGTITSGWTFGAGAALQIPFAMQMAYRFNGIGVTQNVLYENQKLIANQFNSAIGKIQDSLSSTASALGKLQDVVNQNAQALNTLVKCLSSNFGAISSVLNDILSRLDKVEAEVQIDRLITGRLQCLQTYVTQQLIRAAEIRASANLAATKMSECVLGQSKRVDFCGKGYHLMSFPQSAPHGVVFLHVTYVPAQEKNFTTAPAICHDGKAHFPREGVFVSNGTHWFVTQRNFYEPQIITTDNTFVSGNCDVVIGIVNNTVYDPLQPELDSFKEELDKYFKNHTSPDVDLGDISGINASVVNIQKEIDRLNEVAKNLNESLIDLQELGKYEQYIKGGGGSDIIKLLNEQVNKEMQSSNLYMSMSSWCYTHSLDGAGLFLFDHAAEEYEHAKKLIIFLNENNVPVQLTSISAPEHKFEGLTQIFQKAYEHEQHISESINNIVDHAIKSKDHATFNFLQWYVAEQHEEEVLFKDILDKIELIGNENHGLYLADQYVKGIAKSRKS

SEQ ID NO: 5315 - protein, 1379 aa, Artificial Sequence
  SARS-CoV-2/USA/CruiseA-23/2020__EPI_ISL_414482 spike protein (1-1211)(Q965C_S1003C) Ferritin construct
MFVFLVLLPLVSSQCVNLTTRTQLPPAYTNSFTRGVYYPDKVFRSSVLHSTQDLFLPFFSNVTWFHAIHVSGTNGTKRFDNPVLPFNDGVYFASTEKSNIIRGWIFGTTLDSKTQSLLIVNNATNVVIKVCEFQFCNDPFLGVYYHKNNKSWMESEFRVYSSANNCTFEYVSQPFLMDLEVKQGNFKNLREFVFKNIDGYFKIYSKHTPINLVRDLPQGFSALEPLVDLPIGINITRFQTLLALHRSYLTPGDSSSGWTAGAAAYYVGYLQPRTFLLKYNENGTITDAVDCALDPLSETKCTLKSFTVEKGIYQTSNFRVQPTESIVRFPNITNLCPFGEVFNATRFASVYAWNRKRISNCVADYSVLYNSASFSTFKCYGVSPTKLNDLCFTNVYADSFVIRGDEVRQIAPGQTGKIADYNYKLPDDFTGCVIAWNSNNLDSKVGGNYNYLYRLFRKSNLKPFERDISTEIYQAGSTPCNGVEGFNCYFPLQSYGFQPTNGVGYQPYRVVVLSFELLHAPATVCGPKKSTNLVKNKCVNFNFNGLTGTGVLTESNKKFLPFQQFGRDIADTTDAVRDPQTLEILDITPCSFGGVSVITPGTNTSNQVAVLYQDVNCTEVPVAIHADQLTPTWRVYSTGSNVFQTRAGCLIGAEHVNNSYECDIPIGAGICASYQTQTNSPRRARSVASQSIIAYTMSLGAENSVAYSNNSIAIPTNFTISVTTEILPVSMTKTSVDCTMYICGDSTECSNLLLQYGSFCTQLNRALTGIAVEQDKNTQEVFAQVKQIYKTPPIKDFGGFNFSQILPDPSKPSKRSFIEDLLFNKVTLADAGFIKQYGDCLGDIAARDLICAQKFNGLTVLPPLLTDEMIAQYTSALLAGTITSGWTFGAGAALQIPFAMQMAYRFNGIGVTQNVLYENQKLIANQFNSAIGKIQDSLSSTASALGKLQDVVNQNAQALNTLVKCLSSNFGAISSVLNDILSRLDKVEAEVQIDRLITGRLQCLQTYVTQQLIRAAEIRASANLAATKMSECVLGQSKRVDFCGKGYHLMSFPQSAPHGVVFLHVTYVPAQEKNFTTAPAICHDGKAHFPREGVFVSNGTHWFVTQRNFYEPQIITTDNTFVSGNCDVVIGIVNNTVYDPLQPELDSFKEELDKYFKNHTSPDVDLGDISGINASVVNIQKEIDRLNEVAKNLNESLIDLQELGKYEQYIKGGGGSDIIKLLNEQVNKEMQSSNLYMSMSSWCYTHSLDGAGLFLFDHAAEEYEHAKKLIIFLNENNVPVQLTSISAPEHKFEGLTQIFQKAYEHEQHISESINNIVDHAIKSKDHATFNFLQWYVAEQHEEEVLFKDILDKIELIGNENHGLYLADQYVKGIAKSRKS

SEQ ID NO: 5316 - protein, 1379 aa, Artificial Sequence
  SARS-CoV-2/Hong Kong/case85_VM20002868/2020__EPI_ISL_414519 spike protein (1-1211)(Q965C_S1003C) Ferritin construct
MFVFLVLVPLVSSQCVNLTTRTQLPPAYTNSFTRGVYYPDKVFRSSVLHSTQDLFLPFFSNVTWFHAIHVSGTNGTKRFDNPVLPFNDGVYFASTEKSNIIRGWIFGTTLDSKTQSLLIVNNATNVVIKVCEFQFCNDPFLGVYYHKNNKSWMESEFRVYSSANNCTFEYVSQPFLMDLEGKQGNFKNLREFVFKNIDGYFKIYSKHTPINLVRDLPQGFSALEPLVDLPIGINITRFQTLLALHRSYLTPGDSSSGWTAGAAAYYVGYLQPRTFLLKYNENGTITDAVDCALDPLSETKCTLKSFTVEKGIYQTSNFRVQPTESIVRFPNITNLCPFGEVFNATRFASVYAWNRKRISNCVADYSVLYNSASFSTFKCYGVSPTKLNDLCFTNVYADSFVIRGDEVRQIAPGQTGKIADYNYKLPDDFTGCVIAWNSNNLDSKVGGNYNYLYRLFRKSNLKPFERDISTEIYQAGSTPCNGVEGFNCYFPLQSYGFQPTNGVGYQPYRVVVLSFELLHAPATVCGPKKSTNLVKNKCVNFNFNGLTGTGVLTESNKKFLPFQQFGRDIADTTDAVRDPQTLEILDITPCSFGGVSVITPGTNTSNQVAVLYQDVNCTEVPVAIHADQLTPTWRVYSTGSNVFQTRAGCLIGAEHVNNSYECDIPIGAGICASYQTQTNSPRRARSVASQSIIAYTMSLGAENSVAYSNNSIAIPTNFTISVTTEILPVSMTKTSVDCTMYICGDSTECSNLLLQYGSFCTQLNRALTGIAVEQDKNTQEVFAQVKQIYKTPPIKDFGGFNFSQILPDPSKPSKRSFIEDLLFNKVTLADAGFIKQYGDCLGDIAARDLICAQKFNGLTVLPPLLTDEMIAQYTSALLAGTITSGWTFGAGAALQIPFAMQMAYRFNGIGVTQNVLYENQKLIANQFNSAIGKIQDSLSSTASALGKLQDVVNQNAQALNTLVKCLSSNFGAISSVLNDILSRLDKVEAEVQIDRLITGRLQCLQTYVTQQLIRAAEIRASANLAATKMSECVLGQSKRVDFCGKGYHLMSFPQSAPHGVVFLHVTYVPAQEKNFTTAPAICHDGKAHFPREGVFVSNGTHWFVTQRNFYEPQIITTDNTFVSGNCDVVIGIVNNTVYDPLQPELDSFKEELDKYFKNHTSPDVDLGDISGINASVVNIQKEIDRLNEVAKNLNESLIDLQELGKYEQYIKGGGGSDIIKLLNEQVNKEMQSSNLYMSMSSWCYTHSLDGAGLFLFDHAAEEYEHAKKLIIFLNENNVPVQLTSISAPEHKFEGLTQIFQKAYEHEQHISESINNIVDHAIKSKDHATFNFLQWYVAEQHEEEVLFKDILDKIELIGNENHGLYLADQYVKGIAKSRKS

SEQ ID NO: 5317 - protein, 1379 aa, Artificial Sequence; identical to SEQ ID NO: 5307
  SARS-CoV-2/England/200990660/2020__EPI_ISL_414523 spike protein (1-1211)(Q965C_S1003C) Ferritin construct

SEQ ID NO: 5318 - protein, 1379 aa, Artificial Sequence
  SARS-CoV-2/Australia/NSW09/2020__EPI_ISL_413595 spike protein (1-1211)(Q965C_S1003C) Ferritin construct
MFVFLVLLPLVSSQCVNLTTRTQLPPAYTNSFTRGVYYPDKVFRSSVLHSTQDLFLPFFSNVTWFHAIHVSGTNGTKRFDNPVLPFNDGVYFASTEKSNIIRGWIFGTTLDSKTQSLLIVNNATNVVIKVCEFQFCNDPFLGVYYHKNNKSWMESEFRVYSSANNCTFEYVSQPFLMDLEGKQGNFKNLREFVFKNIDGYFKIYSKHTPINLVRDLPQGFSALEPLVDLPIGINITRFQTLLALHRSYLTPGDSSSGWTAGAAAYYVGYLQPRTFLLKYNENGTITDAVDCALDPLSETKCTLKSFTVEKGIYQTSNFRVQPTESIVRFPNITNLCPFGEVFNATRFASVYAWNRKRISNCVADYSVLYNSASFSTFKCYGVSPTKLNDLCFTNVYADSFVIRGDEVRQIAPGQTGKIADYNYKLPDDFTGCVIAWNSNNLDSKVGGNYNYLYRLFRKSNLKPFERDISTEIYQAGSTPCNGVEGFNCYFPLQSYGFQPTNGVGYQPYRVVVLSFELLHAPATVCGPKKSTNLVKNKCVNFNFNGLTGTGVLTESNKKFLPFQQFGRDIADTTDAVRDPQTLEILDITPCSFGGVSVITPGTNTSNQVAVLYQDVNCTEVPVAIHADQLTPTWRVYSTGSNVFQTRAGCLIGAEHVNNSYECDIPIGAGICASYQTQTNSPRRARSVASQSIIAYTMSLGAENSVAYSNNSIAIPTNFTISVTTEILPVSMTKTSVDCTMYICGDSTECSNLLLQYGSFCTQLNRALTGIAVEQDKNTQEVFAQVKQIYKTPPIKDFGGFNFSQILPDPSKPSKRSFIEDLLFNKVTLADAGFIKQYGDCLGDIAARDLICAQKFNGLTVLPPLLTDEMIAQYTSALLAGTITSGWTFGAGAALQIPFAMQMAYRFNGIGVTQNVLYENQKLIANQFNSAIGKIQDSLSFTASALGKLQDVVNQNAQALNTLVKCLSSNFGAISSVLNDILSRLDKVEAEVQIDRLITGRLQCLQTYVTQQLIRAAEIRASANLAATKMSECVLGQSKRVDFCGKGYHLMSFPQSAPHGVVFLHVTYVPAQEKNFTTAPAICHDGKAHFPREGVFVSNGTHWFVTQRNFYEPQIITTDNTFVSGNCDVVIGIVNNTVYDPLQPELDSFKEELDKYFKNHTSPDVDLGDISGINASVVNIQKEIDRLNEVAKNLNESLIDLQELGKYEQYIKGGGGSDIIKLLNEQVNKEMQSSNLYMSMSSWCYTHSLDGAGLFLFDHAAEEYEHAKKLIIFLNENNVPVQLTSISAPEHKFEGLTQIFQKAYEHEQHISESINNIVDHAIKSKDHATFNFLQWYVAEQHEEEVLFKDILDKIELIGNENHGLYLADQYVKGIAKSRKS

SEQ ID NO: 5319 - protein, 1379 aa, Artificial Sequence; identical to SEQ ID NO: 5299
  SARS-CoV-2/Australia/NSW10/2020__EPI_ISL_413596 spike protein (1-1211)(Q965C_S1003C) Ferritin construct

SEQ ID NO: 5320 - protein, 1379 aa, Artificial Sequence
  SARS-CoV-2/Switzerland/1000477797/2020__EPI_ISL_413023 spike protein (1-1211)(Q965C_S1003C) Ferritin construct
MFVFLVLLPLVSSQCVNLTTRTQLPPAYTNSFTRGVYYPDKVFRSSVLHSTQDLFLPFFSNVTWFHAIHVSGTNGTKRFDNPVLPFNDGVYFASTEKSNIIRGWIFGTTLDSKTQSLLIVNNATNVVIKVCEFQFCNDPFLGVYYHKNNKSWMESEFRVYSSANNCTFEYVSQPFLMDLEGKQGNFKNLREFVFKNIDGYFNIYSKHTPINLVRDLPQGFSALEPLVDLPIGINITRFQTLLALHRSYLTPGDSSSGWTAGAAAYYVGYLQPRTFLLKYNENGTITDAVDCALDPLSETKCTLKSFTVEKGIYQTSNFRVQPTESIVRFPNITNLCPFGEVFNATRFASVYAWNRKRISNCVADYSVLYNSASFSTFKCYGVSPTKLNDLCFTNVYADSFVIRGDEVRQIAPGQTGKIADYNYKLPDDFTGCVIAWNSNNLDSKVGGNYNYLYRLFRKSNLKPFERDISTEIYQAGSTPCNGVEGFNCYFPLQSYGFQPTNGVGYQPYRVVVLSFELLHAPATVCGPKKSTNLVKNKCVNFNFNGLTGTGVLTESNKKFLPFQQFGRDIADTTDAVRDPQTLEILDITPCSFGGVSVITPGTNTSNQVAVLYQGVNCTEVPVAIHADQLTPTWRVYSTGSNVFQTRAGCLIGAEHVNNSYECDIPIGAGICASYQTQTNSPRRARSVASQSIIAYTMSLGAENSVAYSNNSIAIPTNFTISVTTEILPVSMTKTSVDCTMYICGDSTECSNLLLQYGSFCTQLNRALTGIAVEQDKNTQEVFAQVKQIYKTPPIKDFGGFNFSQILPDPSKPSKRSFIEDLLFNKVTLADAGFIKQYGDCLGDIAARDLICAQKFNGLTVLPPLLTDEMIAQYTSALLAGTITSGWTFGAGAALQIPFAMQMAYRFNGIGVTQNVLYENQKLIANQFNSAIGKIQDSLSSTASALGKLQDVVNQNAQALNTLVKCLSSNFGAISSVLNDILSRLDKVEAEVQIDRLITGRLQCLQTYVTQQLIRAAEIRASANLAATKMSECVLGQSKRVDFCGKGYHLMSFPQSAPHGVVFLHVTYVPAQEKNFTTAPAICHDGKAHFPREGVFVSNGTHWFVTQRNFYEPQIITTDNTFVSGNCDVVIGIVNNTVYDPLQPELDSFKEELDKYFKNHTSPDVDLGDISGINASVVNIQKEIDRLNEVAKNLNESLIDLQELGKYEQYIKGGGGSDIIKLLNEQVNKEMQSSNLYMSMSSWCYTHSLDGAGLFLFDHAAEEYEHAKKLIIFLNENNVPVQLTSISAPEHKFEGLTQIFQKAYEHEQHISESINNIVDHAIKSKDHATFNFLQWYVAEQHEEEVLFKDILDKIELIGNENHGLYLADQYVKGIAKSRKS

SEQ ID NO: 5321 - protein, 1379 aa, Artificial Sequence
  SARS-CoV-2/Belgium/BA-02291/2020__EPI_ISL_415159 spike protein (1-1211)(Q965C_S1003C) Ferritin construct
MFVFLVLLPLVSSQCVNLTTRTQLPPAYTNSFTRGVYYPDKVFRSSVLHSTQDLFLPFFSNVTWFHAIHVSGTNGTKRFDNPVLPFNDGVYFASTEKSNIIRGWIFGTTLDSKTQSLLIVNNATNVVIKVCEFQFCNDPFLGVYYHKNNKSWMESEFRVYSSANNCTFEYVSQPFLMDLEGKQGNFKNLREFVFKNIDGYFKIYSKHTPINLVRDLPQGFSALEPLVDLPIGINITRFQTLLALHRSYLTPGDSSSGWTAGAAAYYVGYLQPRTFLLKYNENGTITDAVDCALDPLSETKCTLKSFTVEKGIYQTSNFRVQPTESIVRFPNITNLCPFGEVFNATRFASVYAWNRKRISNCVADYSVLYNSASFSTFKCYGVSPTKLNDLCFTNVYADSFVIRGDEVRQIAPGQTGKIADYNYKLPDDFTGCVIAWNSNNLDSKVGGNYNYLYRLFRRSNLKPFERDISTEIYQAGSTPCNGVEGFNCYFPLQSYGFQPTNGVGYQPYRVVVLSFELLPAPATVCGPKKSTNLVKNKCVNFNFNGLTGTGVLTESNKKFLPFQQFGRDIADTTDAVRDPQTLEILDITPCSFGGVSVITPGTNTSNQVAVLYQGVNCTEVPVAIHADQLTPTWRVYSTGSNVFQTRAGCLIGAEHVNNSYECDIPIGAGICASYQTQTNSPRRARSVASQSIIAYTMSLGAENSVAYSNNSIAIPTNFTISVTTEILPVSMTKTSVDCTMYICGDSTECSNLLLQYGSFCTQLNRALTGIAVEQDKNTQEVFAQVKQIYKTPPIKDFGGFNFSQILPDPSKPSKRSFIEDLLFNKVTLADAGFIKQYGDCLGDIAARDLICAQKFNGLTVLPPLLTDEMIAQYTSALLAGTITSGWTFGAGAALQIPFAMQMAYRFNGIGVTQNVLYENQKLIANQFNSAIGKIQDSLSSAAPALGKLQDVVNQNAQALNTLVKCLSSNFGAISSVLNDILSRLDKVEAEVQIDRLITGRLQCLQTYVTQQLIRAAEIRASANLAATKMSECVLGQSKRVDFCGKGYHLMSFPQSAPHGVVFLHVTYVPAQEKNFTTAPAICHDGKAHFPREGVFVSNGTHWFVTQRNFYEPQIITTDNTFVSGNCDVVIGIVNNTVYDPLQPELDSFKEELDKYFKNHTSPDVDLGDISGINASVVNIQKEIDRLNEVAKNLNESLIDLQELGKYEQYIKGGGGSDIIKLLNEQVNKEMQSSNLYMSMSSWCYTHSLDGAGLFLFDHAAEEYEHAKKLIIFLNENNVPVQLTSISAPEHKFEGLTQIFQKAYEHEQHISESINNIVDHAIKSKDHATFNFLQWYVAEQHEEEVLFKDILDKIELIGNENHGLYLADQYVKGIAKSRKS

SEQ ID NO: 5322 - protein, 1379 aa, Artificial Sequence
  SARS-CoV-2/USA/WA8-UW5/2020__EPI_ISL_413486 spike protein (1-1211)(Q965C_S1003C) Ferritin construct
MFVFLVLLPLVSSQCVNLTTRTQLPPAYTNSFTRGVYYPDKVFRSSVLHSTQDLFLPFFSNVTWFHAIHVSGTNGTKRFDNPVLPFNDGVYFASTEKSNIIRGWIFGTTLDSKTQSLLIVNNATNVVIKVCEFQFCNDPFLGVYYHKNNKSWMESEFRVYSSANNCTFEYVSQPFLMDLEGKQGNFKNLREFVFKNIDGYFKIYSKHTPINLVRDLPQGFSALEPLVDLPIGINITRFQTLLALHRSYLTPGDSSSGWTAGAAAYYVGYLQPRTFLLKYNENGTITDAVDCALDPLSETKCTLKSFTVEKGIYQTSNFRVQPTESIVRFPNITNLCPFGEVFNATRFASVYAWNRKRISNCVADYSVLYNSASFSTFKCYGVSPTKLNDLCFTNVYADSFVIRGDEVRQIAPGQTGKIADYNYKLPDDFTGCVIAWNSNNLDSKVGGNYNYLYRLFRKSNLKPFERDISTEIYQAGSTPCNGVEGFNCYFPLQSYGFQPTNGVGYQPYRVVVLSFELLHAPATVCGPKKSTNLVKNKCVNFNFNGLTGTGVLTESNKKFLPFQQFGRDIADTTDAVRDPQTLEILDITPCSFGGVSVITPGTNTSNQVAVLYQDVNCTEVPVAIHADQLTPTWRVYSTGSNVFQTRAGCLIGAEYVNNSYECDIPIGAGICASYQTQTNSPRRARSVASQSIIAYTMSLGAENSVAYSNNSIAIPTNFTISVTTEILPVSMTKTSVDCTMYICGDSTECSNLLLQYGSFCTQLNRALTGIAVEQDKNTQEVFAQVKQIYKTPPIKDFGGFNFSQILPDPSKPSKRSFIEDLLFNKVTLADAGFIKQYGDCLGDIAARDLICAQKFNGLTVLPPLLTDEMIAQYTSALLAGTITSGWTFGAGAALQIPFAMQMAYRFNGIGVTQNVLYENQKLIANQFNSAIGKIQDSLSSTASALGKLQDVVNQNAQALNTLVKCLSSNFGAISSVLNDILSRLDKVEAEVQIDRLITGRLQCLQTYVTQQLIRAAEIRASANLAATKMSECVLGQSKRVDFCGKGYHLMSFPQSAPHGVVFLHVTYVPAQEKNFTTAPAICHDGKAHFPREGVFVSNGTHWFVTQRNFYEPQIITTDNTFVSGNCDVVIGIVNNTVYDPLQPELDSFKEELDKYFKNHTSPDVDLGDISGINASVVNIQKEIDRLNEVAKNLNESLIDLQELGKYEQYIKGGGGSDIIKLLNEQVNKEMQSSNLYMSMSSWCYTHSLDGAGLFLFDHAAEEYEHAKKLIIFLNENNVPVQLTSISAPEHKFEGLTQIFQKAYEHEQHISESINNIVDHAIKSKDHATFNFLQWYVAEQHEEEVLFKDILDKIELIGNENHGLYLADQYVKGIAKSRKS

SEQ ID NO: 5323 - protein, 1379 aa, Artificial Sequence
  SARS-CoV-2/England/20102000506/2020__EPI_ISL_415147 spike protein (1-1211)(Q965C_S1003C) Ferritin construct
MFVFLVLLPLVSSQCVNLTTRTQLPPAYTNSFTRGVYYPDKVFRSSVLHSTQDLFLPFFSNVTWFHAIHVSGTNGTKRFDNPVLPFNDGVYFASTEKSNIIRGWIFGTTLDSKTQSLLIVNNATNVVIKVCEFQFCNDPFLGVYYHKNNKSWMESEFRVYSSANNCTFEYVSQPFLMDLEGKQGNFKNLREFVFKNIDGYFKIYSKHTPINLVRDLPQGFSALEPLVDLPIGINITRFQTLLALHRSYLTPGDSSSGWTAGAAAYYVGYLQPRTFLLKYNENGTITDAVDCALDPLSETKCTLKSFTVEKGIYQTSNFRVQPTESIVRFPNITNLCPFGEVFNATRFASVYAWNRKRISNCVADYSVLYNSASFSTFKCYGVSPTKLNDLCFTNVYADSFVIRGDEVRQIAPGQTGKIADYNYKLPDDFTGCVIAWNSNNLDSKVGGNYNYLYRLFRKSNLKPFERDISTEIYQAGSTPCNGVEGFNCYFPLQSYGFQPTNGVGYQPYRVVVLSFELLHAPATVCGPKKSTNLVKNKCVNFNFNGLTGTGVLTESNKKFLPFQQFGRDIADTTDAVRDPQTLEILDITPCSFGGVSVITPGTNTSNQVAVLYQGVNCTEVPVAIHADQLTPTWRVYSTGSNVFQTRAGCLIGAEHVNNSYECDIPIGAGICASYQTQTNSPRRARSVASQSIIAYTMSLGAENSVAYSNNSIAIPTNFTISVTTEILPVSMTKTSVDCTMYICGDSTECSNLLLQYGSFCTQLNRALTGIAVEQDKNTQEVFAQVKQIYKTPPIKDFGGFNFSQILPDPSKPSKRSFIEDLLFNKVTLADAGFIKQYGYCLGDIAARDLICAQKFNGLTVLPPLLTDEMIAQYTSALLAGTITSGWTFGAGAALQIPFAMQMAYRFNGIGVTQNVLYENQKLIANQFNSAIGKIQDSLSSTASALGKLQDVVNQNAQALNTLVKCLSSNFGAISSVLNDILSRLDKVEAEVQIDRLITGRLQCLQTYVTQQLIRAAEIRASANLAATKMSECVLGQSKRVDFCGKGYHLMSFPQSAPHGVVFLHVTYVPAQEKNFTTAPAICHDGKAHFPREGVFVSNGTHWFVTQRNFYEPQIITTDNTFVSGNCDVVIGIVNNTVYDPLQPELDSFKEELDKYFKNHTSPDVDLGDISGINASVVNIQKEIDRLNEVAKNLNESLIDLQELGKYEQYIKGGGGSDIIKLLNEQVNKEMQSSNLYMSMSSWCYTHSLDGAGLFLFDHAAEEYEHAKKLIIFLNENNVPVQLTSISAPEHKFEGLTQIFQKAYEHEQHISESINNIVDHAIKSKDHATFNFLQWYVAEQHEEEVLFKDILDKIELIGNENHGLYLADQYVKGIAKSRKS

SEQ ID NO: 5324 - protein, 1379 aa, Artificial Sequence
  SARS-CoV-2/Belgium/VAG-03013/2020__EPI_ISL_415155 spike protein (1-1211)(Q965C_S1003C) Ferritin construct
MFVFLVLLPLVSSQCVNLTTRTQLPPAYTNSFTRGVYYPDKVFRSSVLHSTQDLFLPFFSNVTWFHAIHVSGTNGTKRFDNPVLPFNDGVYFASTEKSNIIRGWIFGTTLDSKTQSLLIVNNATNVVIKVCEFQFCNDPFLGVYYHKNNKSWMESEFRVYSSANNCTFEYVSQPFLMDLEGKQGNFKNLREFVFKNIDGYFKIYSKHTPINLVRDLPQGFSALEPLVDLPIGINITRFQTLLALHRSYLTPGDSSSGWTAGAAAYYVGYLQPRTFLLKYNENGTITDAVDCALDPLSETKCTLKSFTVEKGIYQTSNFRVQPTESIVRFPNITNLCPFGEVFNATRFASVYAWNRKRISNCVADYSVLYNSASFSTFKCYGVSPTKLNDLCFTNVYADSFVIRGDEVRQIAPGQTGKIADYNYKLPDDFTGCVIAWNSNNLDSKVGGNYNYLYRLFRKSNLKPFERDISTEIYQAGSTPCNGVEGFNCYFPLQSYGFQPTNGVGYQPYRVVVLSFELLHAPATVCGPKKSTNLVKNKCVNFNFNGLTGTGVLTESNKKFLPFQQFGRDIADTTDAVRDPQTLEILDITPCSFGGVSVITPGTNTSNQVAVLYQGVNCTEVPVAIHADQLTPTWRVYSTGSNVFQTRAGCLIGAEHVNNSYECDIPIGAGICASYQTQTNSPRRARSVASQSIIAYTMSLGAENSVAYSNNSIAIPTNFTISVTTEILPVSMTKTSVDCTMYICGDSTECSNLLLQYGSFCTQLNRALTGIAVEQDKNTQEVFAQVKQIYKTPPIKDFGGFNFSQILPDPSKPSKRSFIEDLLFNKVTLADAGFIKQYGDCLGDIAARDLICAQKFNGLTVLPPLLTDEMIAQYTSALLAGTITSGWTFGAGAALQIPFAMQMAYRFNGIGVTQNVLYENQKLIANQFNSAIGKIQDSLSSTATALGKLQDVVNQNAQALNTLVKCLSSNFGAISSVLNDILSRLDKVEAEVQIDRLITGRLQCLQTYVTQQLIRAAEIRASANLAATKMSECVLGQSKRVDFCGKGYHLMSFPQSAPHGVVFLHVTYVPAQEKNFTTAPAICHDGKAHFPREGVFVSNGTHWFVTQRNFYEPQIITTDNTFVSGNCDVVIGIVNNTVYDPLQPELDSFKEELDKYFKNHTSPDVDLGDISGINASVVNIQKEIDRLNEVAKNLNESLIDLQELGKYEQYIKGGGGSDIIKLLNEQVNKEMQSSNLYMSMSSWCYTHSLDGAGLFLFDHAAEEYEHAKKLIIFLNENNVPVQLTSISAPEHKFEGLTQIFQKAYEHEQHISESINNIVDHAIKSKDHATFNFLQWYVAEQHEEEVLFKDILDKIELIGNENHGLYLADQYVKGIAKSRKS

SEQ ID NO: 5325 - protein, 1379 aa, Artificial Sequence
  SARS-CoV-2/Belgium/BC-03016/2020__EPI_ISL_415157 spike protein (1-1211)(Q965C_S1003C) Ferritin construct
MFVFLVLLPLVSSQCVNLTTRTQLPPAYTNSFTRGVYYPDKVFRSSVLHSTQDLFLPFFSNVTWFHAIHVSGTNGTKRFDNPVLPFNDGVYFASTEKSNIIRGWIFGTTLDSKTQSLLIVNNATNVVIKVCEFQFCNDPFLGVYYHKNNKSWMESEFRVYSSANNCTFEYVSQPFLMDLEGKQGNFKNLREFVFKNIDGYFKIYSKHTPINLVRDLPQGFSALEPLVDLPIGINITRFQTLLALHRSYLTPGDSSSGWTAGAAAYYVGYLQPRTFLLKYNENGTITDAVDCALDPLSETKCTLKSFTVEKGIYQTSNFRVQPTESIVRFPNITNLCPFGEVFNATRFASVYAWNRKRISNCVADYSVLYNSASFSTFKCYGVSPTKLNDLCFTNVYADSFVIRGDEVRQIAPGQTGKIADYNYKLPDDFTGCVIAWNSNNLDSKVGGNYNYLYRLFRKSNLKPFERDISTEIYQAGSTPCNGVEGFNCYFPLQSYGFQPTNGVGYQPYRVVVLSFELLHAPATVCGPKKSTNLVKNKCVNFNFNGLTGTGVLTESNKKFLPFQQFGRDIADTTDAVRDPQTLEILDITPCSFGGVSVITPGTNTSNQVAVLYQGVNCTEVPVAIHADQLTPTWRVYSTGSNVFQTRAGCLIGAEHVNNSYECDIPIGAGICASYQTQTNSPRRARSVASQSIIAYTMSLGAENSVAYSNNSIAIPTNFTISVTTEILPVSMTKTSVDCTMYICGDSTECSNLLLQYGSFCTQLNRALTGIAVEQDKNTQEVFAQVKQIYKTPPIKDFGGFNFSQILPDPSKPSKRSFIEDLLFNKVTLADAGFIKQYGDCLGDIAARDLICAQKFNGLTVLPPLLTDEMIAQYTSALLAGTITSGWTFGAGAALQIPFAMQMAYRFNGIGVTQNVLYENQKLIANQFNSAIGKIQDSLSSTAPALGKLQDVVNQNAQALNTLVKCLSSNFGAISSVLNDILSRLDKVEAEVQIDRLITGRLQCLQTYVTQQLIRAAEIRASANLAATKMSECVLGQSKRVDFCGKGYHLMSFPQSAPHGVVFLHVTYVPAQEKNFTTAPAICHDGKAHFPREGVFVSNGTHWFVTQRNFYEPQIITTDNTFVSGNCDVVIGIVNNTVYDPLQPELDSFKEELDKYFKNHTSPDVDLGDISGINASVVNIQKEIDRLNEVAKNLNESLIDLQELGKYEQYIKGGGGSDIIKLLNEQVNKEMQSSNLYMSMSSWCYTHSLDGAGLFLFDHAAEEYEHAKKLIIFLNENNVPVQLTSISAPEHKFEGLTQIFQKAYEHEQHISESINNIVDHAIKSKDHATFNFLQWYVAEQHEEEVLFKDILDKIELIGNENHGLYLADQYVKGIAKSRKS

SEQ ID NO: 5326 - protein, 1379 aa, Artificial Sequence
  SARS-CoV-2/Germany/BavPat3/2020__EPI_ISL_414521 spike protein (1-1211)(Q965C_S1003C) Ferritin construct
MFVFLVLLPLVSSQCVNLTTRTQLPPAYTNSFTRGVYYPDKVFRSSVLHSTQDLFLPFFSNVTWFHAIHVSGTNGTKRFDNPVLPFNDGVYFASTEKSNIIRGWIFGTTLDSKTQSLLIVNNATNVVIKVCEFQFCNDPFLGVYYHKNNKSWMESEFRVYSSANNCTFEYVSQPFLMDLEGKQGNFKNLREFVFKNIDGYFKIYSKHTPINLVRDLPQGFSALEPLVDLPIGINITRFQTLLALHRSYLTPGDSSSGWTAGAAAYYVGYLQPRTFLLKYNENGTITDAVDCALDPLSETKCTLKSFTVEKGIYQTSNFRVQPTESIVRFPNITNLCPFGEVFNATRFASVYAWNRKRISNCVADYSVLYNSASFSTFKCYGVSPTKLNDLCFTNVYADSFVIRGDEVRQIAPGQTGKIADYNYKLPDDFTGCVIAWNSNNLDSKVGGNYNYLYRLFRKSNLKPFERDISTEIYQAGSTPCNGVEGFNCYFPLQSYGFQPTNGVGYQPYRVVVLSFELLHAPATVCGPKKSTNLVKNKCVNFNFNGLTGTGVLTESNKKFLPFQQFGRDIADTTDAVRDPQTLEILDITPCSFGGVSVITPGTNTSNQVAVLYQDVNCTEVPVAIHADQLTPTWRVYSTGSNVFQTRAGCLIGAEHVNNSYECDIPIGAGICASYQTQTNSPRRARSVASQSIIAYTMSLGAENSVAYSNNSIAIPTNFTISVTTEILPVSMTKTSVDCTMYICGDSTECSNLLLQYGSFCTQLNRALTGIAVEQDKNTQQVFAQVKQIYKTPPIKDFGGFNFSQILPDPSKPSKRSFIEDLLFNKVTLADAGFIKQYGDCLGDIAARDLICAQKFNGLTVLPPLLTDEMIAQYTSALLAGTITSGWTFGAGAALQIPFAMQMAYRFNGIGVTQNVLYENQKLIANQFNSAIGKIQDSLSSTASALGKLQDVVNQNAQALNTLVKCLSSNFGAISSVLNDILSRLDKVEAEVQIDRLITGRLQCLQTYVTQQLIRAAEIRASANLAATKMSECVLGQSKRVDFCGKGYHLMSFPQSAPHGVVFLHVTYVPAQEKNFTTAPAICHDGKAHFPREGVFVSNGTHWFVTQRNFYEPQIITTDNTFVSGNCDVVIGIVNNTVYDPLQPELDSFKEELDKYFKNHTSPDVDLGDISGINASVVNIQKEIDRLNEVAKNLNESLIDLQELGKYEQYIKGGGGSDIIKLLNEQVNKEMQSSNLYMSMSSWCYTHSLDGAGLFLFDHAAEEYEHAKKLIIFLNENNVPVQLTSISAPEHKFEGLTQIFQKAYEHEQHISESINNIVDHAIKSKDHATFNFLQWYVAEQHEEEVLFKDILDKIELIGNENHGLYLADQYVKGIAKSRKS

SEQ ID NO: 5327 - protein, 1379 aa, Artificial Sequence
  SARS-CoV-2/France/HF1805/2020__EPI_ISL_414628 spike protein (1-1211)(Q965C_S1003C) Ferritin construct
MFVFLVLLPLVSSQCVNLTTRTQLPPAYTNSFTRGVYYPDKVFRSSVLHSTQDLFLPFFSNVTWFHAIHVSGTNGTKRFDNPVLPFNDGVYFASTEKSNIIRGWIFGTTLDSKTQSLLIVNNATNVVIKVCEFQFCNDPFLGVYYHKNNKSWMESEFRVYSSANNCTFEYVSQPFLMDLEGKQGNFKNLREFVFKNIDGYFKIYSKHTPINLVRDLPQGFSALEPLVDLPIGINITRFQTLLALHRSYLTPGDSSSGWTAGAAAYYVGYLQPRTFLLKYNENGTITDAVDCALDPLSETKCTLKSFTVEKGIYQTSNFRVQPTESIVRFPNITNLCPFGEVFNATRFASVYAWNRKRISNCVADYSVLYNSASFSTFKCYGVSPTKLNDLCFTNVYADSFVIRGDEVRQIAPGQTGKIADYNYKLPDDFTGCVIAWNSNNLDSKVGGNYNYLYRLFRKSNLKPFERDISTEIYQAGSTPCNGVEGFNCYFPLQSYGFQPTNGVGYQPYRVVVLSFELLHAPATVCGPKKSTNLVKNKCVNFNFNGLTGTGVLTESNKKFLPFQQFGRDIADTTDAVRDPQTLEILDITPCSFGGVSVITPGTNTSNQVAVLYQGVNCTEVPVAIHADQLTPTWRVYSTGSNVFQTRAGCLIGAEHVNNSYECDIPIGAGICASYQTQTNSPRRARSVASQSIIAYTMSLGAENSVAYSNNSIAIPTNFTISVTTEILPVSMTKTSVDCTMYICGDSTECSNLLLQYGSFCTQLNRALTGIAVEQDKNTQEVFAQVKQIYKTPPIKDFGGFNFSQILPDPSKPSKRSFIEDLLFNKVTLADAGFIKQYGDCLGDIAARDLICAQKFNGLTVLPPLLTDEMIAQYTSALLAGTITSGWTFGAGAALQIPFAMQMAYRFNGIGVTQNVLYENQKLIANQFNSAIGKIQDSLSSTASALGKLQDVVNQNAQALNTLVKCLSSNFGAISSVLNDILSRLDKVEAEVQIDRLITGRLQCLQTYVTQQLIRAAEIRASANLAATKMSECVLGQSKRVDFCGKGYHLMSFPQSAPHGVVFLHVTYVPAQEKNFTTAPAICHDGKAHFPREGVFVSNGTHWFVTQRNFYEPQIITTDNTFVSGNCDVVIGVVNNTVYDPLQPELDSFKEELDKYFKNHTSPDVDLGDISGINASVVNIQKEIDRLNEVAKNLNESLIDLQELGKYEQYIKGGGGSDIIKLLNEQVNKEMQSSNLYMSMSSWCYTHSLDGAGLFLFDHAAEEYEHAKKLIIFLNENNVPVQLTSISAPEHKFEGLTQIFQKAYEHEQHISESINNIVDHAIKSKDHATFNFLQWYVAEQHEEEVLFKDILDKIELIGNENHGLYLADQYVKGIAKSRKS

SEQ ID NO: 5328 - protein, 1379 aa, Artificial Sequence
  SARS-CoV-2/Netherlands/ZuidHolland_9/2020__EPI_ISL_414445 spike protein (1-1211)(Q965C_S1003C) Ferritin construct
MFVFLVLLPLVSSQCVNLTTRTQLPPAYTNSFTRGVYYPDKVFRSSVLHSTQDLFLPFFSNVTWFHAIHVSGTNGTKRFDNPVLPFNDGVYFASTEKSNIIRGWIFGTTLDSKTQSLLIVNNATNVVIKVCEFQFCNDPFLGVYYHKNNKSWMESEFRVYSSANNCTFEYVSQPFLMDLEGKQGNFKNLREFVFKNIDGYFKIYSKHTPINLVRDLPQGFSALEPLVDLPIGINITRFQTLLALHRSYLTPGDSSSGWTAGAAAYYVGYLQPRTFLLKYNENGTITDAVDCALDPLSETKCTLKSFTVEKGIYQTSNFRVQPTESIVRFPNITNLCPFGEVFNATRFASVYAWNRKRISNCVADYSVLYNSASFSTFKCYGVSPTKLNDLCFTNVYADSFVIRGDEVRQIAPGQTGKIADYNYKLPDDFTGCVIAWNSNNLDSKVGGNYNYLYRLFRKSNLKPFERDISTEIYQAGSTPCNGVEGFNCYFPLQSYGFQPTNGVGYQPYRVVVLSFELLHAPATVCGPKKSTNLVKNKCVNFNFNGLTGTGVLTESNKKFLPFQQFGRDIADTTDAVRDPQTLEILDITPCSFGGVSVITPGTNTSNQVAVLYQGVNCTEVPVAIHADQLTPTWRVYSTGSNVFQTRAGCLIGAEHVNNSYECDIPIGAGICASYQTQTNSPRRARSVASQSIIAYTMSLGAENSVAYSNNSIAIPTNFTISVTTEILPVSMTKTSVDCTMYICGDSTECSNLLLQYGSFCTQLNRALTGIAVEQDKNTQEVFAQVKQIYKTPPIKDFGGFNFSQILPDPSKPSKRSFIEDLLFNKVTLADAGFIKQYGDCLGDIAARDLICVQKFNGLTVLPPLLTDEMIAQYTSALLAGTITSGWTFGAGAALQIPFAMQMAYRFNGIGVTQNVLYENQKLIANQFNSAIGKIQDSLSSTASALGKLQDVVNQNAQALNTLVKCLSSNFGAISSVLNDILSRLDKVEAEVQIDRLITGRLQCLQTYVTQQLIRAAEIRASANLAATKMSECVLGQSKRVDFCGKGYHLMSFPQSAPHGVVFLHVTYVPAQEKNFTTAPAICHDGKAHFPREGVFVSNGTHWFVTQRNFYEPQIITTDNTFVSGNCDVVIGIVNNTVYDPLQPELDSFKEELDKYFKNHTSPDVDLGDISGINASVVNIQKEIDRLNEVAKNLNESLIDLQELGKYEQYIKGGGGSDIIKLLNEQVNKEMQSSNLYMSMSSWCYTHSLDGAGLFLFDHAAEEYEHAKKLIIFLNENNVPVQLTSISAPEHKFEGLTQIFQKAYEHEQHISESINNIVDHAIKSKDHATFNFLQWYVAEQHEEEVLFKDILDKIELIGNENHGLYLADQYVKGIAKSRKS

SEQ ID NO: 5329 - protein, 1379 aa, Artificial Sequence
  SARS-CoV-2/Finland/FIN03032020A/2020__EPI_ISL_413602 spike protein (1-1211)(Q965C_S1003C) Ferritin construct
MFVFLVLLPLVSSQCVNLTTRTQLPPAYTNSFTRGVYYPDKVFRSSVLHSTQDLFLPFFSNVTWFHAIHVSGTNGTKRFDNPVLPFNDGVYFASTEKSNIIRGWIFGTTLDSKTQSLLIVNNATNVVIKVCEFQFCNDPFLGVYYHKNNKSWMESEFRVYSSANNCTFEYVSQPFLMDLEGKQGNFKNLREFVFKNIDGYFKIYSKHTPINLVRDLPQGFSALEPLVDLPIGINITRFQTLLALHRSYLTPGDSSSGWTAGAAAYYVGYLQPRTFLLKYNENGTITDAVDCALDPLSETKCTLKSFTVEKGIYQTSNFRVQPTESIVRFPNITNLCPFGEVFNATRFASVYAWNRKRISNCVADYSVLYNSASFSTFKCYGVSPTKLNDLCFTNVYADSFVIRGDEVRQIAPGQTGKIADYNYKLPDDFTGCVISWNSNNLDSKVGGNYNYLYRLFRKSNLKPFERDISTEIYQAGSTPCNGVEGFNCYFPLQSYGFQPTNGVGYQPYRVVVLSFELLHAPATVCGPKKSTNLVKNKCVNFNFNGLTGTGVLTESNKKFLPFQQFGRDIADTTDAVRDPQTLEILDITPCSFGGVSVITPGTNTSNQVAVLYQGVNCTEVPVAIHADQLTPTWRVYSTGSNVFQTRAGCLIGAEHVNNSYECDIPIGAGICASYQTQTNSPRRARSVASQSIIAYTMSLGAENSVAYSNNSIAIPTNFTISVTTEILPVSMTKTSVDCTMYICGDSTECSNLLLQYGSFCTQLNRALTGIAVEQDKNTQEVFAQVKQIYKTPPIKDFGGFNFSQILPDPSKPSKRSFIEDLLFNKVTLADAGFIKQYGDCLGDIAARDLICAQKFNGLTVLPPLLTDEMIAQYTSALLAGTITSGWTFGAGAALQIPFAMQMAYRFNGIGVTQNVLYENQKLIANQFNSAIGKIQDSLSSTASALGKLQDVVNQNAQALNTLVKCLSSNFGAISSVLNDILSRLDKVEAEVQIDRLITGRLQCLQTYVTQQLIRAAEIRASANLAATKMSECVLGQSKRVDFCGKGYHLMSFPQSAPHGVVFLHVTYVPAQEKNFTTAPAICHDGKAHFPREGVFVSNGTHWFVTQRNFYEPQIITTDNTFVSGNCDVVIGIVNNTVYDPLQPELDSFKEELDKYFKNHTSPDVDLGDISGINASVVNIQKEIDRLNEVAKNLNESLIDLQELGKYEQYIKGGGGSDIIKLLNEQVNKEMQSSNLYMSMSSWCYTHSLDGAGLFLFDHAAEEYEHAKKLIIFLNENNVPVQLTSISAPEHKFEGLTQIFQKAYEHEQHISESINNIVDHAIKSKDHATFNFLQWYVAEQHEEEVLFKDILDKIELIGNENHGLYLADQYVKGIAKSRKS

SEQ ID NO: 5330 - protein, 1379 aa, Artificial Sequence
  SARS-CoV-2/France/GE1977/2020__EPI_ISL_414632 spike protein (1-1211)(Q965C_S1003C) Ferritin construct
MFVFLVLLPLVSSQCVNLTTRTQLPPAYTNSFTRGVYYPDKVFRSSVLHSTQDLFLPFFSNVTWFHAIHVSGTNGTKRFDNPVLPFNDGVYFASTEKSNIIRGWIFGTTLDSKTQSLLIVNNATNVVIKVCEFQFCNDPFLGVYYHKNNKSWMESEFRVYSSANNCTFEYVSQPFLMDLEGKQGNFKNLREFVFKNIDGYFKIYSKHTPINLVRDLPQGFSALEPLVDLPIGINITRFQTLLALHRSYLTPGDSSSGWTAGAAAYYVGYLQPRTFLLKYNENGTITDAVDCALDPLSETKCTLKSFTVEKGIYQTSNFRVQPTESIVRFPNITNLCPFGEVFNATRFASVYAWNRKRISNCVADYSVLYNSASFSTFKCYGVSPTKLNDLCFTNVYADSFVIRGDEVRQIAPGQTGKIADYNYKLPDDFTGCVIAWNSNNLDSKVGGNYNYLYRLFRKSNLKPFERDISTEIYQAGSTPCNGVEGFNCYFPLQSYGFQPTNGVGYQPYRVVVLSFELLHAPATVCGPKKSTNLVKNKCVNFNFNGLTGTGVLTESNKKFLPFQQFGRDIADTTDAVRDPQTLEILDITPCSFGGVSVITPGTNTSNQVAVLYQGVNCTEVPVAIHADQLTPTWRVYSTGSNVFQTRAGCLIGAEHVNNSYECDIPIGAGICASYQTQTNSPRRARSVASQSIIAYTMSLGAENSVAYSNNSIAIPTNFTISVTTEILPVSMTKTSVDCTMYICGDSTECSNLLLQYGSFCTQLNRALTGIAVEQDKNTQEVFAQVKQIYKTPPIKDFGGFNFSQILPDPSKPSKRSFIEDLLFNKVTLADAGFIKQYGDCLGDIAARDLICAQKFNGLTVLPPLLTDEMIAQYTSALLAGTITSGWTFGAGAALQIPFAMQMAYRFNGIGVTQNVLYENQKLIANQFNSAIGKIQDSLFSTASALGKLQDVVNQNAQALNTLVKCLSSNFGAISSVLNDILSRLDKVEAEVQIDRLITGRLQCLQTYVTQQLIRAAEIRASANLAATKMSECVLGQSKRVDFCGKGYHLMSFPQSAPHGVVFLHVTYVPAQEKNFTTAPAICHDGKAHFPREGVFVSNGTHWFVTQRNFYEPQIITTDNTFVSGNCDVVIGIVNNTVYDPLQPELDSFKEELDKYFKNHTSPDVDLGDISGINASVVNIQKEIDRLNEVAKNLNESLIDLQELGKYEQYIKGGGGSDIIKLLNEQVNKEMQSSNLYMSMSSWCYTHSLDGAGLFLFDHAAEEYEHAKKLIIFLNENNVPVQLTSISAPEHKFEGLTQIFQKAYEHEQHISESINNIVDHAIKSKDHATFNFLQWYVAEQHEEEVLFKDILDKIELIGNENHGLYLADQYVKGIAKSRKS

SEQ ID NO: 5331 - protein, 1379 aa, Artificial Sequence
  SARS-CoV-2/Finland/FIN-313/2020__EPI_ISL_414641 spike protein (1-1211)(Q965C_S1003C) Ferritin construct
MFVFLVLLPLVSSQCVNLTTRTQLPPAYTNSFTRGVYYPDKVFRSSVLHSTQDLFLPFFSNVTWFHAIHVSGTNGTKRFDNPVLPFNDGVYFASTEKSNIIRGWIFGTTLDSKTQSLLIVNNATNVVIKVCEFQFCNDPFLGVYYHKNNKSWMESEFRVYSSANNCTFEYVSQPFLMDLEGKQGNFKNLREFVFKNIDGYFKIYSKHTPINLVRDLPQGFSALEPLVDLPIGINITRFKTLLALHRSYLTPGDSSSGWTAGAAAYYVGYLQPRTFLLKYNENGTITDAVDCALDPLSETKCTLKSFTVEKGIYQTSNFRVQPTESIVRFPNITNLCPFGEVFNATRFASVYAWNRKRISNCVADYSVLYNSASFSTFKCYGVSPTKLNDLCFTNVYADSFVIRGDEVRQIAPGQTGKIADYNYKLPDDFTGCVIAWNSNNLDSKVGGNYNYLYRLFRKSNLKPFERDISTEIYQAGSTPCNGVEGFNCYFPLQSYGFQPTNGVGYQPYRVVVLSFELLHAPATVCGPKKSTNLVKNKCVNFNFNGLTGTGVLTESNKKFLPFQQFGRDIADTTDAVRDPQTLEILDITPCSFGGVSVITPGTNTSNQVAVLYQGVNCTEVPVAIHADQLTPTWRVYSTGSNVFQTRAGCLIGAEHVNNSYECDIPIGAGICASYQTQTNSPRRARSVASQSIIAYTMSLGAENSVAYSNNSIAIPTNFTISVTTEILPVSMTKTSVDCTMYICGDSTECSNLLLQYGSFCTQLNRALTGIAVEQDKNTQEVFAQVKQIYKTPPIKDFGGFNFSQILPDPSKPSKRSFIEDLLFNKVTLADAGFIKQYGDCLGDIAARDLICAQKFNGLTVLPPLLTDEMIAQYTSALLAGTITSGWTFGAGAALQIPFAMQMAYRFNGIGVTQNVLYENQKLIANQFNSAIGKIQDSLSSTASALGKLQDVVNQNAQALNTLVKCLSSNFGAISSVLNDILSRLDKVEAEVQIDRLITGRLQCLQTYVTQQLIRAAEIRASANLAATKMSECVLGQSKRVDFCGKGYHLMSFPQSAPHGVVFLHVTYVPAQEKNFTTAPAICHDGKAHFPREGVFVSNGTHWFVTQRNFYEPQIITTDNTFVSGNCDVVIGIVNNTVYDPLQPELDSFKEELDKYFKNHTSPDVDLGDISGINASVVNIQKEIDRLNEVAKNLNESLIDLQELGKYEQYIKGGGGSDIIKLLNEQVNKEMQSSNLYMSMSSWCYTHSLDGAGLFLFDHAAEEYEHAKKLIIFLNENNVPVQLTSISAPEHKFEGLTQIFQKAYEHEQHISESINNIVDHAIKSKDHATFNFLQWYVAEQHEEEVLFKDILDKIELIGNENHGLYLADQYVKGIAKSRKS

SEQ ID NO: 5332 - protein, 1379 aa, Artificial Sequence
  SARS-CoV-2/Netherlands/ZuidHolland_2/2020__EPI_ISL_414556 spike protein (1-1211)(Q965C_S1003C) Ferritin construct
MFVFLVLLPLVSSQCVNLTTRTQLPPAYTNSFTRGVYYPDKVFRSSVLHSTQDLFLPFFSNVTWFHAIHVSGTNGTKRFDNPVLPFNDGVYFASTEKSNIIRGWIFGTTLDSKTQSLLIVNNATNVVIKVCEFQFCNDPFLGVYYHKNNKSWMESEFRVYSSANNCTFEYVSQPFLMDLEGKQGNFKNLREFVFKNIDGYFKIYSKHTPINLVRDLPQGFSALEPLVDLPIGINITRFQTLLALHRSYLTPGDSSSGWTAGAAAYYVGYLQPRTFLLKYNENGTITDAVDCALDPLSETKCTLKSFTVEKGIYQTSNFRVQPTESIVRFPNITNLCPFGEVFNATRFASVYAWNRKRISNCVADYSVLYNSASFSTFKCYGVSPTKLNDLCFTNVYADSFVIRGDEVRQIAPGQTGKIADYNYKLPDDFTGCVIAWNSNNLDSKVGGNYNYLYRLFRKSNLKPFERDISTEIYQAGSTPCNGVEGFNCYFPLQSYGFQPTNGVGYQPYRVVVLSFELLHAPATVCGPKKSTNLVKNKCVNFNFNGLTGTGVLTESNKKFLPFQQFGRDIADTTDAVRDPQTLEILDITPCSFGGVSVITPGTNTSNQVAVLYQGVNCTEVPVAIHADQLTPTWRVYSTGSNVFQTRAGCLIGAEHVNNSYECDIPIGAGICASYQTQTNSPRRARSVASQSIIAYTMSLGAENSVAYSNNSIAIPTNFTISVTTEILPVSMTKTSVDCTMYICGDSTECSNLLLQYGSFCTQLNRALTGIALEQDKNTQEVFAQVKQIYKTPPIKDFGGFNFSQILPDPSKPSKRSFIEDLLFNKVTLADAGFIKQYGDCLGDIAARDLICAQKFNGLTVLPPLLTDEMIAQYTSALLAGTITSGWTFGAGAALQIPFAMQMAYRFNGIGVTQNVLYENQKLIANQFNSAIGKIQDSLSSTASALGKLQDVVNQNAQALNTLVKCLSSNFGAISSVLNDILSRLDKVEAEVQIDRLITGRLQCLQTYVTQQLIRAAEIRASANLAATKMSECVLGQSKRVDFCGKGYHLMSFPQSAPHGVVFLHVTYVPAQEKNFTTAPAICHDGKAHFPREGVFVSNGTHWFVTQRNFYEPQIITTDNTFVSGNCDVVIGIVNNTVYDPLQPELDSFKEELDKYFKNHTSPDVDLGDISGINASVVNIQKEIDRLNEVAKNLNESLIDLQELGKYEQYIKGGGGSDIIKLLNEQVNKEMQSSNLYMSMSSWCYTHSLDGAGLFLFDHAAEEYEHAKKLIIFLNENNVPVQLTSISAPEHKFEGLTQIFQKAYEHEQHISESINNIVDHAIKSKDHATFNFLQWYVAEQHEEEVLFKDILDKIELIGNENHGLYLADQYVKGIAKSRKS

SEQ ID NO: 5333 - protein, 1379 aa, Artificial Sequence
  SARS-CoV-2/USA/WA-UW31/2020__EPI_ISL_414618 spike protein (1-1211)(Q965C_S1003C) Ferritin construct
MFVFLVLLPLVSSQCVNLTTRTQLPPAYTNSFTRGVYYPDKVFRSSVLHSTQDLFLPFFSNVTWFHAIHVSGTNGTKRFDNPVLPFNDGVYFASTEKSNIIRGWIFGTTLDSKTQSLLIVNNATNVVIKVCEFQFCNDPFLGVYYHKNNKSWMESEFRVYSSANNCTFEYVSQPFLMDLEGKQGNFKNLREFVFKNIDGYFKIYSKHTPINLVRDLPQGFSALEPLVDLPIGINITRFQTLLALHRSYLTPGDSSSGWTAGAAAYYVGYLQPRTFLLKYNENGTITDAVDCALDPLSETKCTLKSFTVEKGIYQTSNFRVQPTESIVRFPNITNLCPFGEVFNATRFASVYAWNRKRISNCVADYSVLYNSASFSTFKCYGVSPTKLNDLCFTNVYADSFVIRGDEVRQIAPGQTGKIADYNYKLPDDFTGCVIAWNSNNLDSKVGGNYNYLYRLFRKSNLKPFERDISTEIYQAGSTPCNGAEGFNCYFPLQSYGFQPTNGVGYQPYRVVVLSFELLHAPATVCGPKKSTNLVKNKCVNFNFNGLTGTGVLTESNKKFLPFQQFGRDIADTTDAVRDPQTLEILDITPCSFGGVSVITPGTNTSNQVAVLYQDVNCTEVPVAIHADQLTPTWRVYSTGSNVFQTRAGCLIGAEHVNNSYECDIPIGAGICASYQTQTNSPRRARSVASQSIIAYTMSLGAENSVAYSNNSIAIPTNFTISVTTEILPVSMTKTSVDCTMYICGDSTECSNLLLQYGSFCTQLNRALTGIAVEQDKNTQEVFAQVKQIYKTPPIKDFGGFNFSQILPDPSKPSKRSFIEDLLFNKVTLADAGFIKQYGDCLGDIAARDLICAQKFNGLTVLPPLLTDEMIAQYTSALLAGTITSGWTFGAGAALQIPFAMQMAYRFNGIGVTQNVLYENQKLIANQFNSAIGKIQDSLSSTASALGKLQDVVNQNAQALNTLVKCLSSNFGAISSVLNDILSRLDKVEAEVQIDRLITGRLQCLQTYVTQQLIRAAEIRASANLAATKMSECVLGQSKRVDFCGKGYHLMSFPQSAPHGVVFLHVTYVPAQEKNFTTAPAICHDGKAHFPREGVFVSNGTHWFVTQRNFYEPQIITTDNTFVSGNCDVVIGIVNNTVYDPLQPELDSFKEELDKYFKNHTSPDVDLGDISGINASVVNIQKEIDRLNEVAKNLNESLIDLQELGKYEQYIKGGGGSDIIKLLNEQVNKEMQSSNLYMSMSSWCYTHSLDGAGLFLFDHAAEEYEHAKKLIIFLNENNVPVQLTSISAPEHKFEGLTQIFQKAYEHEQHISESINNIVDHAIKSKDHATFNFLQWYVAEQHEEEVLFKDILDKIELIGNENHGLYLADQYVKGIAKSRKS

SEQ ID NO: 5334 - protein, 1379 aa, Artificial Sequence
  SARS-CoV-2/South Korea/SNU01/2020__EPI_ISL_411929 spike protein (1-1211)(Q965C_S1003C) Ferritin construct
MFVFLVLLPLVSSQCVNLTTRTQLPPAYTNSFTRGVYYPDKVFRSSVLHSTQDLFLPFFSNVTWFHAIHVSGTNGTKRFDNPVLPFNDGVYFASTEKSNIIRGWIFGTTLDSKTQSLLIVNNATNVVIKVCEFQFCNDPFLGVYYHKNNKSWMESEFRVYSSANNCTFEYVSQPFLMDLEGKQGNFKNLREFVFKNIDGYFKIYSKHTPINLVRDLPQGFWALEPLVDLPIGINITRFQTLLALHRSYLTPGDSSSGWTAGAAAYYVGYLQPRTFLLKYNENGTITDAVDCALDPLSETKCTLKSFTVEKGIYQTSNFRVQPTESIVRFPNITNLCPFGEVFNATRFASVYAWNRKRISNCVADYSVLYNSASFSTFKCYGVSPTKLNDLCFTNVYADSFVIRGDEVRQIAPGQTGKIADYNYKLPDDFTGCVIAWNSNNLDSKVGGNYNYLYRLFRKSNLKPFERDISTEIYQAGSTPCNGVEGFNCYFPLQSYGFQPTNGVGYQPYRVVVLSFELLHAPATVCGPKKSTNLVKNKCVNFNFNGLTGTGVLTESNKKFLPFQQFGRDIADTTDAVRDPQTLEILDITPCSFGGVSVITPGTNTSNQVAVLYQDVNCTEVPVAIHADQLTPTWRVYSTGSNVFQTRAGCLIGAEHVNNSYECDIPIGAGICASYQTQTNSPRRARSVASQSIIAYTMSLGAENSVAYSNNSIAIPTNFTISVTTEILPVSMTKTSVDCTMYICGDSTECSNLLLQYGSFCTQLNRALTGIAVEQDKNTQEVFAQVKQIYKTPPIKDFGGFNFSQILPDPSKPSKRSFIEDLLFNKVTLADAGFIKQYGDCLGDIAARDLICAQKFNGLTVLPPLLTDEMIAQYTSALLAGTITSGWTFGAGAALQIPFAMQMAYRFNGIGVTQNVLYENQKLIANQFNSAIGKIQDSLSSTASALGKLQDVVNQNAQALNTLVKCLSSNFGAISSVLNDILSRLDKVEAEVQIDRLITGRLQCLQTYVTQQLIRAAEIRASANLAATKMSECVLGQSKRVDFCGKGYHLMSFPQSAPHGVVFLHVTYVPAQEKNFTTAPAICHDGKAHFPREGVFVSNGTHWFVTQRNFYEPQIITTDNTFVSGNCDVVIGIVNNTVYDPLQPELDSFKEELDKYFKNHTSPDVDLGDISGINASVVNIQKEIDRLNEVAKNLNESLIDLQELGKYEQYIKGGGGSDIIKLLNEQVNKEMQSSNLYMSMSSWCYTHSLDGAGLFLFDHAAEEYEHAKKLIIFLNENNVPVQLTSISAPEHKFEGLTQIFQKAYEHEQHISESINNIVDHAIKSKDHATFNFLQWYVAEQHEEEVLFKDILDKIELIGNENHGLYLADQYVKGIAKSRKS

SEQ ID NO: 5335 - protein, 1379 aa, Artificial Sequence
  SARS-CoV-2/China/WF0004/2020__EPI_ISL_413694 spike protein (1-1211)(Q965C_S1003C) Ferritin construct
MFVFLVLLPLVSSQCVNLTTRTQLPPAYTNSFTRGVYYPDKVFRSSVLHSTQDLFLPFFSNVTWFHAIHVSGTNGTKRFDNPVLPFNDGVYFASTEKSNIIRGWIFGTTLDSKTQSLLIVNNATNVVIKVCEFQFCNDPFLGVYYHKNNKSWTESEFRVYSSANNCTFEYVSQPFLMDLEGKQGNFKNLREFVFKNIDGYFKIYSKHTPINLVRDLPQGFSALEPLVDLPIGINITRFQTLLALHRSYLTPGDSSSGWTAGAAAYYVGYLQPRTFLLKYNENGTITDAVDCALDPLSETKCTLKSFTVEKGIYQTSNFRVQPTESIVRFPNITNLCPFGEVFNATRFASVYAWNRKRISNCVADYSVLYNSASFSTFKCYGVSPTKLNDLCFTNVYADSFVIRGDEVRQIAPGQTGKIADYNYKLPDDFTGCVIAWNSNNLDSKVGGNYNYLYRLFRKSNLKPFERDISTEIYQAGSTPCNGVEGFNCYFPLQSYGFQPTNGVGYQPYRVVVLSFELLHAPATVCGPKKSTNLVKNKCVNFNFNGLTGTGVLTESNKKFLPFQQFGRDIADTTDAVRDPQTLEILDITPCSFGGVSVITPGTNTSNQVAVLYQDVNCTEVPVAIHADQLTPTWRVYSTGSNVFQTRAGCLIGAEHVNNSYECDIPIGAGICASYQTQTNSPRRARSVASQSIIAYTMSLGAENSVAYSNNSIAIPTNFTISVTTEILPVSMTKTSVDCTMYICGDSTECSNLLLQYGSFCTQLNRALTGIAVEQDKNTQEVFAQVKQIYKTPPIKDFGGFNFSQILPDPSKPSKRSFIEDLLFNKVTLADAGFIKQYGDCLGDIAARDLICAQKFNGLTVLPPLLTDEMIAQYTSALLAGTITSGWTFGAGAALQIPFAMQMAYRFNGIGVTQNVLYENQKLIANQFNSAIGKIQDSLSSTASALGKLQDVVNQNAQALNTLVKCLSSNFGAISSVLNDILSRLDKVEAEVQIDRLITGRLQCLQTYVTQQLIRAAEIRASANLAATKMSECVLGQSKRFDFCGKGYHLMSFPQSAPHGVVFLHVTYVPAQEKNFTTAPAICHDGKAHFPREGVFVSNGTHWFVTQRNFYEPQIITTDNTFVSGNCDVVIGIVNNTVYDPLQPELDSFKEELDKYFKNHTSPDVDLGDISGINASVVNIQKEIDRLNEVAKNLNESLIDLQELGKYEQYIKGGGGSDIIKLLNEQVNKEMQSSNLYMSMSSWCYTHSLDGAGLFLFDHAAEEYEHAKKLIIFLNENNVPVQLTSISAPEHKFEGLTQIFQKAYEHEQHISESINNIVDHAIKSKDHATFNFLQWYVAEQHEEEVLFKDILDKIELIGNENHGLYLADQYVKGIAKSRKS

SEQ ID NO: 5336 - protein, 1379 aa, Artificial Sequence
  SARS-CoV-2/China/WF0028/2020__EPI_ISL_413791 spike protein (1-1211)(Q965C_S1003C) Ferritin construct
MFVFLVLLPLVSSQCVNLTTRTQLPPAYTNSFTRGVYYPDKVFRSSVLHSTQDLFLPFFSNVTWFHAIHVSGTNGTKRFDNPVLPFNDGVYFASTEKSNIIRGWIFGTTLDSKTQSLLIVNNATNVVIKVCEFQFCNDPFLGVYYHKNNKSWMESEFRVYSSANNCTFEYVSQPFLMDLEGKQGNFKNLREFVFKNIDGYFKIYSKHTPINLVRDLPQGFSALEPLVDLPIGINITRFQTLLALHRSYLTPGDSSSGWTAGAAAYYVGYLQPRTFLLKYNENGTITDAVDCALDPLSETKCTLKSFTVEKGIYQTSNFRVQPTESIVRFPNITNLCPFGEVFNATRFASVYAWNRKRISNCVADYSVLYNSASFSTFKCYGVSPTKLNDLCFTNVYADSFVIRGDEVRQIAPGQTGKIADYNYKLPDDFTGCVIAWNSNNLDSKVGGNYNYLYRLFRKSNLKPFERDISTEIYQAGSTPCNGVEGFNCYFPLQSYGFQPTNGVGYQPYRVVVLSFELLHAPATVCGPKKSTNLVKNKCVNFNFNGLTGTGVLTESNKKFLPFQQFGRDIADTTDAVRDPQTLEILDITPCSFGGVSVITPGTNTSNQVAVLYQDVNCTEVPVAIHADQLTPTWRVYSTGSNVFQTRAGCLIGAEHVNNSYECDIPIGAGICASYQTQTNSPRRARSVASQSIIAYTMSLGAENSVAYSNNSIAIPTNFTISVTTEILPVSMTKTSVDCTMYICGDSTECSNLLLQYGSFCTQLNRALTGIAVEQDKNTQEVFAQVKQIYKTPPIKDFGGFNFSQILPDPSKPSKRSFIEDLLFNKVTLADAGFIKQYGDCLGDIAARDLICAQKFNGLTVLPPLLTDEMIAQYTSALLAGTITSGWTFGAGAALQIPFAMQMAYRFNGIGVTQNVLYENQKLIANQFNSAIGKIQDSLSSTASALGKLQDVVNQNAQALNTLVKCLSSNFGAISSVLNDILSRLDKVEAEVQIDRLITGRLQCLQTYVTQQLIRAAEIRASANLAATKMSECVLGQSKRVDFCGKGYHLMSFPQSAPHGVVFLHVTYVPAQEKNFTTAPAICHDGKAHFPREGVFVSNGTHWFVTQRNFYEPQIITTDNTFVSGNCDVVIGIVNNTVYDPLQPELESFKEELDKYFKNHTSPDVDLGDISGINASVVNIQKEIDRLNEVAKNLNESLIDLQELGKYEQYIKGGGGSDIIKLLNEQVNKEMQSSNLYMSMSSWCYTHSLDGAGLFLFDHAAEEYEHAKKLIIFLNENNVPVQLTSISAPEHKFEGLTQIFQKAYEHEQHISESINNIVDHAIKSKDHATFNFLQWYVAEQHEEEVLFKDILDKIELIGNENHGLYLADQYVKGIAKSRKS

SEQ ID NO: 5337 - protein, 1379 aa, Artificial Sequence
  SARS-CoV-2/2019-nCoV/USA-CruiseA-18/2020__MT159716.1 spike protein (1-1211)(Q965C_S1003C) Ferritin construct
MFVFLVLLPLVSSQCVNLTTRTQLPPAYTNSFTRGVYYPDKVFRSSVLHSTQDLFLPFFSNVTWFHAIHVSGTNGTKRFDNPVLPFNDGVYFASTEKSNIIRGWIFGTTLDSKTQSLLIVNNATNVVIKVCEFQFCNDPFLGVYYHKNNKSWMESELRVYSSANNCTFEYVSQPFLMDLEGKQGNFKNLREFVFKNIDGYFKIYSKHTPINLVRDLPQGFSALEPLVDLPIGINITRFQTLLALHRSYLTPGDSSSGWTAGAAAYYVGYLQPRTFLLKYNENGTITDAVDCALDPLSETKCTLKSFTVEKGIYQTSNFRVQPTESIVRFPNITNLCPFGEVFNATRFASVYAWNRKRISNCVADYSVLYNSASFSTFKCYGVSPTKLNDLCFTNVYADSFVIRGDEVRQIAPGQTGKIADYNYKLPDDFTGCVIAWNSNNLDSKVGGNYNYLYRLFRKSNLKPFERDISTEIYQAGSTPCNGVEGFNCYFPLQSYGFQPTNGVGYQPYRVVVLSFELLHAPATVCGPKKSTNLVKNKCVNFNFNGLTGTGVLTESNKKFLPFQQFGRDIADTTDAVRDPQTLEILDITPCSFGGVSVITPGTNTSNQVAVLYQDVNCTEVPVAIHADQLTPTWRVYSTGSNVFQTRAGCLIGAEHVNNSYECDIPIGAGICASYQTQTNSPRRARSVASQSIIAYTMSLGAENSVAYSNNSIAIPTNFTISVTTEILPVSMTKTSVDCTMYICGDSTECSNLLLQYGSFCTQLNRALTGIAVEQDKNTQEVFAQVKQIYKTPPIKDFGGFNFSQILPDPSKPSKRSFIEDLLFNKVTLADAGFIKQYGDCLGDIAARDLICAQKFNGLTVLPPLLTDEMIAQYTSALLAGTITSGWTFGAGAALQIPFAMQMAYRFNGIGVTQNVLYENQKLIANQFNSAIGKIQDSLSSTASALGKLQDVVNQNAQALNTLVKCLSSNFGAISSVLNDILSRLDKVEAEVQIDRLITGRLQCLQTYVTQQLIRAAEIRASANLAATKMSECVLGQSKRVDFCGKGYHLMSFPQSAPHGVVFLHVTYVPAQEKNFTTAPAICHDGKAHFPREGVFVSNGTHWFVTQRNFYEPQIITTDNTFVSGNCDVVIGIVNNTVYDPLQPELDSFKEELDKYFKNHTSPDVDLGDISGINASVVNIQKEIDRLNEVAKNLNESLIDLQELGKYEQYIKGGGGSDIIKLLNEQVNKEMQSSNLYMSMSSWCYTHSLDGAGLFLFDHAAEEYEHAKKLIIFLNENNVPVQLTSISAPEHKFEGLTQIFQKAYEHEQHISESINNIVDHAIKSKDHATFNFLQWYVAEQHEEEVLFKDILDKIELIGNENHGLYLADQYVKGIAKSRKS

SEQ ID NO: 5338 - protein, 1379 aa, Artificial Sequence
  SARS-CoV-2/SARS-CoV-2/Yunnan-01/human/2020/CHN__MT049951.1 spike protein (1-1211)(Q965C_S1003C) Ferritin construct
MFVFLVLLPLVSSQCVNLTTRTQLPPANTNSFTRGVYYPDKVFRSSVLHSTQDLFLPFFSNVTWFHAIHVSGTNGTKRFDNPVLPFNDGVYFASTEKSNIIRGWIFGTTLDSKTQSLLIVNNATNVVIKVCEFQFCNDPFLGVYYHKNNKSWMESEFRVYSSANNCTFEYVSQPFLMDLEGKQGNFKNLREFVFKNIDGYFKIYSKHTPINLVRDLPQGFSALEPLVDLPIGINITRFQTLLALHRSYLTPGDSSSGWTAGAAAYYVGYLQPRTFLLKYNENGTITDAVDCALDPLSETKCTLKSFTVEKGIYQTSNFRVQPTESIVRFPNITNLCPFGEVFNATRFASVYAWNRKRISNCVADYSVLYNSASFSTFKCYGVSPTKLNDLCFTNVYADSFVIRGDEVRQIAPGQTGKIADYNYKLPDDFTGCVIAWNSNNLDSKVGGNYNYLYRLFRKSNLKPFERDISTEIYQAGSTPCNGVEGFNCYFPLQSYGFQPTNGVGYQPYRVVVLSFELLHAPATVCGPKKSTNLVKNKCVNFNFNGLTGTGVLTESNKKFLPFQQFGRDIADTTDAVRDPQTLEILDITPCSFGGVSVITPGTNTSNQVAVLYQDVNCTEVPVAIHADQLTPTWRVYSTGSNVFQTRAGCLIGAEHVNNSYECDIPIGAGICASYQTQTNSPRRARSVASQSIIAYTMSLGAENSVAYSNNSIAIPTNFTISVTTEILPVSMTKTSVDCTMYICGDSTECSNLLLQYGSFCTQLNRALTGIAVEQDKNTQEVFAQVKQIYKTPPIKDFGGFNFSQILPDPSKPSKRSFIEDLLFNKVTLADAGFIKQYGDCLGDIAARDLICAQKFNGLTVLPPLLTDEMIAQYTSALLAGTITSGWTFGAGAALQIPFAMQMAYRFNGIGVTQNVLYENQKLIANQFNSAIGKIQDSLSSTASALGKLQDVVNQNAQALNTLVKCLSSNFGAISSVLNDILSRLDKVEAEVQIDRLITGRLQCLQTYVTQQLIRAAEIRASANLAATKMSECVLGQSKRVDFCGKGYHLMSFPQSAPHGVVFLHVTYVPAQEKNFTTAPAICHDGKAHFPREGVFVSNGTHWFVTQRNFYEPQIITTDNTFVSGNCDVVIGIVNNTVYDPLQPELDSFKEELDKYFKNHTSPDVDLGDISGINASVVNIQKEIDRLNEVAKNLNESLIDLQELGKYEQYIKGGGGSDIIKLLNEQVNKEMQSSNLYMSMSSWCYTHSLDGAGLFLFDHAAEEYEHAKKLIIFLNENNVPVQLTSISAPEHKFEGLTQIFQKAYEHEQHISESINNIVDHAIKSKDHATFNFLQWYVAEQHEEEVLFKDILDKIELIGNENHGLYLADQYVKGIAKSRKS

SEQ ID NO: 5339 - protein, 1379 aa, Artificial Sequence
  SARS-CoV-2/USA/WA-UW292/2020__EPI_ISL_418077 spike protein (1-1211)(Q965C_S1003C) Ferritin construct
MFVFLVLLPLVSSQCVNLTTRTQLPPAYTNSFTRGVYYPDKVFRSSVLHSTQDLFLPFFSNVTWFHAIHVSGTNGTKRFDNPVLPFNDGVYFASTEKSNIIRGWIFGTTLDSKTQSLLIVNNATNVVIKVCEFQFCNDPFLGVYYHKNNKSWMESEFRVYSSANNCTFEYVSQPFLMDLEGKQGNFKNLREFVFKNIDGYFKIYSKHTPINLVRDLPQGFSALEPLVDLPIGINITRFQTLLALHRSYLTPGDSSSGWTAGAAAYYVGYLQPRTFLLKYNENGTITDAVDCALDPLSETKCTLKSFTVEKGIYQTSNFRVQPTESIVRFPNITNLCPFGEVFNATRFASVYAWNRKRISNCVADYSVLYNSASFSTFKCYGVSPTKLNDLCFTNVYADSFVIRGDEVRQIAPGQTGKIADYNYKLPDDFTGCVIAWNSNNLDSKVGGNYNYLYRLFRKSNLKPFERDISTEIYQASSTPCNGVEGFNCYFPLQSYGFQPTNGVGYQPYRVVVLSFELLHAPATVCGPKKSTNLVKNKCVNFNFNGLTGTGVLTESNKKFLPFQQFGRDIADTTDAVRDPQTLEILDITPCSFGGVSVITPGTNTSNQVAVLYQDVNCTEVPVAIHADQLTPTWRVYSTGSNVFQTRAGCLIGAEHVNNSYECDIPIGAGICASYQTQTNSPRRARSVASQSIIAYTMSLGAENSVAYSNNSIAIPTNFTISVTTEILPVSMTKTSVDCTMYICGDSTECSNLLLQYGSFCTQLNRALTGIAVEQDKNTQEVFAQVKQIYKTPPIKDFGGFNFSQILPDPSKPSKRSFIEDLLFNKVTLADAGFIKQYGDCLGDIAARDLICAQKFNGLTVLPPLLTDEMIAQYTSALLAGTITSGWTFGAGAALQIPFAMQMAYRFNGIGVTQNVLYENQKLIANQFNSAIGKIQDSLSSTASALGKLQDVVNQNAQALNTLVKCLSSNFGAISSVLNDILSRLDKVEAEVQIDRLITGRLQCLQTYVTQQLIRAAEIRASANLAATKMSECVLGQSKRVDFCGKGYHLMSFPQSAPHGVVFLHVTYVPAQEKNFTTAPAICHDGKAHFPREGVFVSNGTHWFVTQRNFYEPQIITTDNTFVSGNCDVVIGIVNNTVYDPLQPELDSFKEELDKYFKNHTSPDVDLGDISGINASVVNIQKEIDRLNEVAKNLNESLIDLQELGKYEQYIKGGGGSDIIKLLNEQVNKEMQSSNLYMSMSSWCYTHSLDGAGLFLFDHAAEEYEHAKKLIIFLNENNVPVQLTSISAPEHKFEGLTQIFQKAYEHEQHISESINNIVDHAIKSKDHATFNFLQWYVAEQHEEEVLFKDILDKIELIGNENHGLYLADQYVKGIAKSRKS

SEQ ID NO: 5340 - protein, 1379 aa, Artificial Sequence
  SARS-CoV-2/Iceland/192/2020__EPI_ISL_417819 spike protein (1-1211)(Q965C_S1003C) Ferritin construct
MFVFFVLLPLVSSQCVNLTTRTQLPPAYTNSFTRGVYYPDKVFRSSVLHSTQDLFLPFFSNVTWFHAIHVSGTNGTKRFDNPVLPFNDGVYFASTEKSNIIRGWIFGTTLDSKTQSLLIVNNATNVVIKVCEFQFCNDPFLGVYYHKNNKSWMESEFRVYSSANNCTFEYVSQPFLMDLEGKQGNFKNLREFVFKNIDGYFKIYSKHTPINLVRDLPQGFSALEPLVDLPIGINITRFQTLLALHRSYLTPGDSSSGWTAGAAAYYVGYLQPRTFLLKYNENGTITDAVDCALDPLSETKCTLKSFTVEKGIYQTSNFRVQPTESIVRFPNITNLCPFGEVFNATRFASVYAWNRKRISNCVADYSVLYNSASFSTFKCYGVSPTKLNDLCFTNVYADSFVIRGDEVRQIAPGQTGKIADYNYKLPDDFTGCVIAWNSNNLDSKVGGNYNYLYRLFRKSNLKPFERDISTEIYQAGSTPCNGVEGFNCYFPLQSYGFQPTNGVGYQPYRVVVLSFELLHAPATVCGPKKSTNLVKNKCVNFNFNGLTGTGVLTESNKKFLPFQQFGRDIADTTDAVRDPQTLEILDITPCSFGGVSVITPGTNTSNQVAVLYQGVNCTEVPVAIHADQLTPTWRVYSTGSNVFQTRAGCLIGAEHVNNSYECDIPIGAGICASYQTQTNSPRRARSVASQSIIAYTMSLGAENSVAYSNNSIAIPTNFTISVTTEILPVSMTKTSVDCTMYICGDSTECSNLLLQYGSFCTQLNRALTGIAVEQDKNTQEVFAQVKQIYKTPPIKDFGGFNFSQILPDPSKPSKRSFIEDLLFNKVTLADAGFIKQYGDCLGDIAARDLICAQKFNGLTVLPPLLTDEMIAQYTSALLAGTITSGWTFGAGAALQIPFAMQMAYRFNGIGVTQNVLYENQKLIANQFNSAIGKIQDSLSSTASALGKLQDVVNQNAQALNTLVKCLSSNFGAISSVLNDILSRLDKVEAEVQIDRLITGRLQCLQTYVTQQLIRAAEIRASANLAATKMSECVLGQSKRVDFCGKGYHLMSFPQSAPHGVVFLHVTYVPAQEKNFTTAPAICHDGKAHFPREGVFVSNGTHWFVTQRNFYEPQIITTDNTFVSGNCDVVIGIVNNTVYDPLQPELDSFKEELDKYFKNHTSPDVDLGDISGINASVVNIQKEIDRLNEVAKNLNESLIDLQELGKYEQYIKGGGGSDIIKLLNEQVNKEMQSSNLYMSMSSWCYTHSLDGAGLFLFDHAAEEYEHAKKLIIFLNENNVPVQLTSISAPEHKFEGLTQIFQKAYEHEQHISESINNIVDHAIKSKDHATFNFLQWYVAEQHEEEVLFKDILDKIELIGNENHGLYLADQYVKGIAKSRKS

SEQ ID NO: 5341 - protein, 1379 aa, Artificial Sequence
  SARS-CoV-2/Belgium/ULG-6939/2020__EPI_ISL_417020 spike protein (1-1211)(Q965C_S1003C) Ferritin construct
MFVFLVLLPLVSSQCVNLTTRTQLPPAYTNSFTRGVYYPDKVFRSSVLHSTQDLFLPFFSNVTWFHAIHVSGTNGTKRFDNPVLPFNDGVYFASTEKSNIIRGWIFGTTLDSKTQSLLIVNNATNVVIKVCEFQFCNDPFLGVYYHKNNKSWMESEFRVYSSANNCTFEYVSQPFLMDLEGKQGNFKNLREFVFKNIDGYFKIYSKHTPINLVRDLPQGFSALEPLVDLPIGINITRFQTLLALHRSYLTPGDSSSGWTAGAAAYYVGYLQPRTFLLKYNENGTITDAVDCALDPLSETKCTLKSFTVEKGIYQTSNFRVQPTESIVRFPNITNLCPFGEVFNATRFASVYAWNRKRISNCVADYSVLYNSASFSTFKCYGVSPTKLNDLCFTNVYADSFVIRGDEVRQIAPGQTGKIADYNYKLPDDFTGCVIAWNSNNLDSKVGGNYNYLYRLFRKSNLKPFERDISTEIYQAGSTPCNGVEGFNCYFPLQSYGFQPTNGVGYQPYRVVVLSFELLHAPATVCGPKKSTNLVKNKCVNFNFNGLTGTGVLTESNKKFLPFQQFGRDIADTTDAVRDPQTLEILDITPCSFGGVSVITPGTNTSNQVAVLYQGVNCTEVPVAIHADQLTPTWRVYSTGSNVFQTRAGCLIGAEHVNNSYECDIPIGAGICASYQTQTNSPRRARSVASQSIIAYTMSLGAENSVVYSNNSIAIPTNFTISVTTEILPVSMTKTSVDCTMYICGDSTECSNLLLQYGSFCTQLNRALTGIAVEQDKNTQEVFAQVKQIYKTPPIKDFGGFNFSQILPDPSKPSKRSFIEDLLFNKVTLADAGFIKQYGDCLGDIAARDLICAQKFNGLTVLPPLLTDEMIAQYTSALLAGTITSGWTFGAGAALQIPFAMQMAYRFNGIGVTQNVLYENQKLIANQFNSAIGKIQDSLSSTASALGKLQDVVNQNAQALNTLVKCLSSNFGAISSVLNDILSRLDKVEAEVQIDRLITGRLQCLQTYVTQQLIRAAEIRASANLAATKMSECVLGQSKRVDFCGKGYHLMSFPQSAPHGVVFLHVTYVPAQEKNFTTAPAICHDGKAHFPREGVFVSNGTHWFVTQRNFYEPQIITTDNTFVSGNCDVVIGIVNNTVYDPLQPELDSFKEELDKYFKNHTSPDVDLGDISGINASVVNIQKEIDRLNEVAKNLNESLIDLQELGKYEQYIKGGGGSDIIKLLNEQVNKEMQSSNLYMSMSSWCYTHSLDGAGLFLFDHAAEEYEHAKKLIIFLNENNVPVQLTSISAPEHKFEGLTQIFQKAYEHEQHISESINNIVDHAIKSKDHATFNFLQWYVAEQHEEEVLFKDILDKIELIGNENHGLYLADQYVKGIAKSRKS

SEQ ID NO: 5342 - protein, 1379 aa, Artificial Sequence
  SARS-CoV-2/France/HF2496/2020__EPI_ISL_418231 spike protein (1-1211)(Q965C_S1003C) Ferritin construct
MFVFLVLLPLVSSQCVNLTTRTQLPPAYTNSFTRGVYYPDKVFRSSVLHSTQDLFLPFFSNVTWFHAIHVSGTNGTKRFDNPVLPFNDGVYFASTEKSNIIRGWIFGTTLDSKTQSLLIVNNATNVVIKVCEFQFCNDPFLGVYYHKNNKSWMESEFRVYSSANNCTFEYVSQPFLMDLEGKQGNFKNLREFVFKNIDGYFKIYSKHTPINLVRDLPQGFSALEPLVDLPIGINITRFQTLLALHRSYLTPGDSSSGWTAGAAAYYVGYLQPRTFLLKYNENGTITDAVDCALDPLSETKCTLKSFTVEKGIYQTSNFRVQPTESIVRFPNITNLCPFGEVFNATRFASVYAWNRKRISNCVADYSVLYNSASFSTFKCYGVSPTKLNDLCFTNVYADSFVIRGDEVRQIAPGQTGKIADYNYKLPDDFTGCVIAWNSNNLDSKVGGNYNYLYRLFRKSNLKPFERDISTEIYQAGSTPCNGVEGFNCYFPLQSYGFQPTNGVGYQPYRVVVLSFELLHAPATVCGPKKSTNLVKNKCVNFNFNGLTGTGVLTESNKKFLPFQQFGRDIADTTDAVRDPQTLEILDITPCSFGGVSVITPGTNTSNQVAVLYQGVNCTEVPVAIHADQLTPTWRVYSTGSNVFQTRAGCLIGAEHVNNSYECDIPIGAGICASYQTQTNSPRRARSVASQSIIAYTMSLGAENSVAYSNNSIAIPTNFTISVTTEILPVSMTKTSVDCTMYICGDSTECSNLLLQYGSFCTQLNRALTGIAVEQDKNTQEVFAQVKQIYKTPPIKDFGGFNFSQILPDPSKPSKRSFIEDLLFNKVTLADAGFIKQYGDCLGDIVARDLICAQKFNGLTVLPPLLTDEMIAQYTSALLAGTITSGWTFGAGAALQIPFAMQMAYRFNGIGVTQNVLYENQKLIANQFNSAIGKIQDSLSSTASALGKLQDVVNQNAQALNTLVKCLSSNFGAISSVLNDILSRLDKVEAEVQIDRLITGRLQCLQTYVTQQLIRAAEIRASANLAATKMSECVLGQSKRVDFCGKGYHLMSFPQSAPHGVVFLHVTYVPAQEKNFTTAPAICHDGKAHFPREGVFVSNGTHWFVTQRNFYEPQIITTDNTFVSGNCDVVIGIVNNTVYDPLQPELDSFKEELDKYFKNHTSPDVDLGDISGINASVVNIQKEIDRLNEVAKNLNESLIDLQELGKYEQYIKGGGGSDIIKLLNEQVNKEMQSSNLYMSMSSWCYTHSLDGAGLFLFDHAAEEYEHAKKLIIFLNENNVPVQLTSISAPEHKFEGLTQIFQKAYEHEQHISESINNIVDHAIKSKDHATFNFLQWYVAEQHEEEVLFKDILDKIELIGNENHGLYLADQYVKGIAKSRKS

SEQ ID NO: 5343 - protein, 1379 aa, Artificial Sequence
  SARS-CoV-2/USA/WA-UW291/2020__EPI_ISL_418076 spike protein (1-1211)(Q965C_S1003C) Ferritin construct
MFVFLVLLPLVSSQCVNLTTRTQLPPAYTNSFTRGVYYPDKVFRSSVLHSTQDLFLPFFSNVTWFHAIHVSGTNGTKRFDNPVLPFNDGVYFASTEKSNIIRGWIFGTTLDSKTQSLLIVNNATNVVIKVCEFQFCNDPFLGVYYHKNNKSWMESEFRVYSSANNCTFEYVSQPFLMDLEGKQGNFKNLREFVFKNIDGYFKIYSKHTPINLVRDLPQGFSALEPLVDLPIGINITRFQTLLALHRSYLTPGDSSSGWTAGAAAYYVGYLQPRTFLLKYNENGTITDAVDCALDPLSETKCTLKSFTVEKGIYQTSNFRVQPTESIVRFPNITNLCPFGEVFNATRFASVYAWNRKRISNCVADYSVLYNSASFSTFKCYGVSPTKLNDLCFTNVYADSFVIRGDEVRQIAPGQTGKIADYNYKLPDDFTGCVIAWNSNNLDSKVGGNYNYLYRLFRKSNLKPFERDISTEIYQAGSTPCNGVEGFNCYFPLQSYGFQPTNGVGYQPYRVVVLSFELLHAPATVCGPKKSTNLVKNKCVNFNFNGLTGTGVLTESNKKFLPFQQFGRDIADTTDAVRDPQTLEILDITPCSFGGVSVITPGTNTSNQVAVLYQGVNCTEVPVAIHADQLTPTWRVYSTGSNVFQTRAGCLIGAEHVNNSYECDIPIGAGICASYQTQTNSPRRARSVASQSIIAYTMSLGAENSVAYSNNSIAIPTNFTISVTTEILPVSMTKTSVDCTMYICGDSTECSNLLLQYGSFCTQLNRALTGIAVEQDKNTQEVFAQVKQIYKTPPIKDFGGFNFSQILPDPSKPSKRSFIEDLLFNKVTLADAGFIKQYGDCLGDIAARDLICAQKFNGLTVLPPLLTDEMIAQYTSALLAGTITSGWTFGAGAALQIPFAMQMAYRFNGIGVTQNVLYENQKLIANQFNSAIGKIQYSLSSTASALGKLQDVVNQNAQALNTLVKCLSSNFGAISSVLNDILSRLDKVEAEVQIDRLITGRLQCLQTYVTQQLIRAAEIRASANLAATKMSECVLGQSKRVDFCGKGYHLMSFPQSAPHGVVFLHVTYVPAQEKNFTTAPAICHDGKAHFPREGVFVSNGTHWFVTQRNFYEPQIITTDNTFVSGNCDVVIGIVNNTVYDPLQPELDSFKEELDKYFKNHTSPDVDLGDISGINASVVNIQKEIDRLNEVAKNLNESLIDLQELGKYEQYIKGGGGSDIIKLLNEQVNKEMQSSNLYMSMSSWCYTHSLDGAGLFLFDHAAEEYEHAKKLIIFLNENNVPVQLTSISAPEHKFEGLTQIFQKAYEHEQHISESINNIVDHAIKSKDHATFNFLQWYVAEQHEEEVLFKDILDKIELIGNENHGLYLADQYVKGIAKSRKS

SEQ ID NO: 5344 - protein, 1379 aa, Artificial Sequence; identical to SEQ ID NO: 5307
  SARS-CoV-2/Portugal/PT0034/2020__EPI_ISL_418019 spike protein (1-1211)(Q965C_S1003C) Ferritin construct

SEQ ID NO: 5345 - protein, 1379 aa, Artificial Sequence
  SARS-CoV-2/Iceland/202/2020__EPI_ISL_417750 spike protein (1-1211)(Q965C_S1003C) Ferritin construct
MFVFLVLLPLVSSQCVNLTTRTQLPPAYTNSFTRGVYYPDKVFRSSVLHSTQDLFLPFFSNVTWFHAIHVSGTNGTKRFDNPVLPFNDGVYFASTEKSNIIRGWIFGTTLDSKTQSLLIVNNATNVVIKVCEFQFCNDPFLGVYYHKNNKSWMESEFRVYSSANNCTFEYVSQPFLMDLEGKQGNFKNLREFVFKNIDGYFKIYSKHTPINLVRDLPQGFSALEPLVDLPIGINITRFQTLLALHRSYLTPGDSSSGWTAGAAAYYVGYLQPRTFLLKYNENGTITDAVDCALDPLSETKCTLKSFTVEKGIYQTSNFRVQPTESIVRFPNITNLCPFGEVFNATRFASVYAWNRKRISNCVADYSVLYNSASFSTFKCYGVSPTKLNDLCFTNVYADSFVIRGDEVRQIAPGQTGKIADYNYKLPDDFTGCVIAWNSNNLDSKVGGNYNYLYRLFRKSNLKPFERDISTEIYQAGSTPCNGVEGFNCYFPLQSYGFQPTNGVGYQPYRVVVLSFELLHAPATVCGPKKSTNLVKNKCVNFNFNGLTGTGVLTESNKKFLPFQQFGRDIADTTDAVRDPQTLEILDITPCSFGGVSVITPGTNTSNQVAVLYQDVNCTEVPVAIHADQLTPTWRVYSTGSNVFQTRAGCLIGAEHVNNSYECDIPIGAGICASYQTQTNSPRRARSVASQSIIAYTMSLGAENSVAYSNNSIAIPTNFTISVTTEILPVSMTKTSVDCTMYICGDSTECSNLLLQYGSFCTQLNRALTGIAVEQDKNTQEVFAQVKQIYKTPPIKDFGGFNFSQILPDPSKPSKRSFIEDLLFNKVTLADAGFIKQYGDCLGDIAARDLICAQKFNGLTVLPPLLTDEMIAQYTSALLAGTITSGWTFGAGAALQIPFAMQMAYRFNGIGVTQNVLYENQKLIANQFNSAIGKIQDSLSSTASALGKLQDVVNQNAQALNTLVKCLSSNFGAISSVLNDILSRLDKVEAEVQIDRLITGRLQCLQTYVTQQLIRAAEIRASANLAATKMSECVLGQSKRVDFCGKGYHLMSFPQSAPHGVVFLHVTYVPAQEKNFTTAPAICHDGKAHFPREGVFVSNGTHWFVTQRNFYEPQIITTDNTFVSGNCDVVIGIVNNTVYDPLQPELDSFKEELDKYFKNHTSPDVDLGDIPGINASVVNIQKEIDRLNEVAKNLNESLIDLQELGKYEQYIKGGGGSDIIKLLNEQVNKEMQSSNLYMSMSSWCYTHSLDGAGLFLFDHAAEEYEHAKKLIIFLNENNVPVQLTSISAPEHKFEGLTQIFQKAYEHEQHISESINNIVDHAIKSKDHATFNFLQWYVAEQHEEEVLFKDILDKIELIGNENHGLYLADQYVKGIAKSRKS

SEQ ID NO: 5346 - protein, 1379 aa, Artificial Sequence
  SARS-CoV-2/USA/WA-UW261/2020__EPI_ISL_418046 spike protein (1-1211)(Q965C_S1003C) Ferritin construct
MFVFLVLLPLVSSQCVNLTTRTQLPPAYTNSFTRGVYYPDKVFRSSVLHSTQDLFLPFFSNVTWFHAIHVSGTNGTKRFDNPVLPFNDGVYFASTEKSNIIRGWIFGTTLDSKTQSLLIVNNATNVVIKVCEFQFCNDPFLGVYYHKNNKSWMESEFRVYSSANNCTFEYVSQPFLMDLEGKQGNFKNLREFVFKNIDGYFKIYSKHTPINLVRDLPQGFSALEPLVDLPIGINITRFQTLLALHRSYLTPGDSSSGWTAGAAAYYVGYLQPRTFLLKYNENGTITDAVDCALDPLSETKCTLKSFTVEKGIYQTSNFRVQPTESIVRFPNITNLCPFGEVFNATRFTSVYAWNRKRISNCVADYSVLYNSASFSTFKCYGVSPTKLNDLCFTNVYADSFVIRGDEVRQIAPGQTGKIADYNYKLPDDFTGCVIAWNSNNLDSKVGGNYNYLYRLFRKSNLKPFERDISTEIYQAGSTPCNGVEGFNCYFPLQSYGFQPTNGVGYQPYRVVVLSFELLHAPATVCGPKKSTNLVKNKCVNFNFNGLTGTGVLTESNKKFLPFQQFGRDIADTTDAVRDPQTLEILDITPCSFGGVSVITPGTNTSNQVAVLYQDVNCTEVPVAIHADQLTPTWRVYSTGSNVFQTRAGCLIGAEHVNNSYECDIPIGAGICASYQTQTNSPRRARSVASQSIIAYTMSLGAENSVAYSNNSIAIPTNFTISVTTEILPVSMTKTSVDCTMYICGDSTECSNLLLQYGSFCTQLNRALTGIAVEQDKNTQEVFAQVKQIYKTPPIKDFGGFNFSQILPDPSKPSKRSFIEDLLFNKVTLADAGFIKQYGDCLGDIAARDLICAQKFNGLTVLPPLLTDEMIAQYTSALLAGTITSGWTFGAGAALQIPFAMQMAYRFNGIGVTQNVLYENQKLIANQFNSAIGKIQDSLSSTASALGKLQDVVNQNAQALNTLVKCLSSNFGAISSVLNDILSRLDKVEAEVQIDRLITGRLQCLQTYVTQQLIRAAEIRASANLAATKMSECVLGQSKRVDFCGKGYHLMSFPQSAPHGVVFLHVTYVPAQEKNFTTAPAICHDGKAHFPREGVFVSNGTHWFVTQRNFYEPQIITTDNTFVSGNCDVVIGIVNNTVYDPLQPELDSFKEELDKYFKNHTSPDVDLGDISGINASVVNIQKEIDRLNEVAKNLNESLIDLQELGKYEQYIKGGGGSDIIKLLNEQVNKEMQSSNLYMSMSSWCYTHSLDGAGLFLFDHAAEEYEHAKKLIIFLNENNVPVQLTSISAPEHKFEGLTQIFQKAYEHEQHISESINNIVDHAIKSKDHATFNFLQWYVAEQHEEEVLFKDILDKIELIGNENHGLYLADQYVKGIAKSRKS

SEQ ID NO: 5347 - protein, 1379 aa, Artificial Sequence
  SARS-CoV-2/Portugal/PT0035/2020__EPI_ISL_418020 spike protein (1-1211)(Q965C_S1003C) Ferritin construct
MFVFLVLLPLVSSQCVNLTTRTQLPPAYTNSFTRGVYYPDKVFRSSVLHSTQDLFLPFFSNVTWFHAIHVSGTNGTKRFDNPVLPFNDGVYFASTEKSNIIRGWIFGTTLDSKTQSLLIVNNATNVVIKVCEFQFCNDPFLGVYYHKNNKSWMESEFRVYSSANNCTFEYVSQPFLMDLEGKQGNFKNLREFVFKNIDGYFKIYSKHTPINLVRDLPQGFSALEPLVDLPIGINITRFQTLLALHRSYLTPGDSSSGWTAGAAAYYVGYLQPRTFLLKYNENGTITDAVDCALDPLSETKCTLKSFTVEKGIYQTSNFRVQPTESIVRFPNITNLCPFGEVFNATRFASVYAWNRKRISNCVADYSVLYNSASFSTFKCYGVSPTKLNDLCFTNVYADSFVIRGDEVRQIAPGQTGKIADYNYKLPDDFTGCVIAWNSNNLDSKVGGNYNYLYRLFRKSNLKPFERDISTEIYQAGSTPCNGVEGFNCYFPLQSYGFQPTNGVGYQPYRVVVLSFELLHAPATVCGPKKSTNLVKNKCVNFNFNGLTGTGVLTESNKKFLPFQQFGRDIADTTDAVRDPQTLEILDITPCSFGGVSVITPGTNTSNQVAVLYQDVNCTEVPVAIHADQLTPTWRVYSTGSNVFQTRAGCLIGAEHVNNSYECDIPIGAGICASYQTQTNSPRRARSVASQSIIAYTMSLGAENSVAYSNNSIAIPTNFTISVTTEILPVSMTKTSVDCTMYICGDSTECSNLLLQYGSFCTQLNRALTGIAVEQDKNTQEVFAQVKQIYKTPPIKDFGGFNFSQILPDPSKPSKRSFIEDLLFNKVTLADAGFIKQYGDCLGDISARDLICAQKFNGLTVLPPLLTDEMIAQYTSALLAGTITSGWTFGAGAALQIPFAMQMAYRFNGIGVTQNVLYENQKLIANQFNSAIGKIQDSLSSTASALGKLQDVVNQNAQALNTLVKCLSSNFGAISSVLNDILSRLDKVEAEVQIDRLITGRLQCLQTYVTQQLIRAAEIRASANLAATKMSECVLGQSKRVDFCGKGYHLMSFPQSAPHGVVFLHVTYVPAQEKNFTTAPAICHDGKAHFPREGVFVSNGTHWFVTQRNFYEPQIITTDNTFVSGNCDVVIGIVNNTVYDPLQPELDSFKEELDKYFKNHTSPDVDLGDISGINASVVNIQKEIDRLNEVAKNLNESLIDLQELGKYEQYIKGGGGSDIIKLLNEQVNKEMQSSNLYMSMSSWCYTHSLDGAGLFLFDHAAEEYEHAKKLIIFLNENNVPVQLTSISAPEHKFEGLTQIFQKAYEHEQHISESINNIVDHAIKSKDHATFNFLQWYVAEQHEEEVLFKDILDKIELIGNENHGLYLADQYVKGIAKSRKS

SEQ ID NO: 5348 - protein, 1379 aa, Artificial Sequence
  SARS-CoV-2/USA/NY-NYUMC7/2020__EPI_ISL_418192 spike protein (1-1211)(Q965C_S1003C) Ferritin construct
MFVFLVLLPLVSSQCVNLTTRTQLPPAYTNSFTRGVYYPDKVFRSSVLHSTQDLFLPFFSNVTWFHAIHVSGTNGTKRFDNPVLPFNDGVYFASTEKSNIIRGWIFGTTLDSKTQSLLIVNNATNVVIKVCEFQFCNDPFLGVYHHKNNKSWMESEFRVYSSANNCTFEYVSQPFLMDLEGKQGNFKNLREFVFKNIDGYFKIYSKHTPINLVRDLPQGFSALEPLVDLPIGINITRFQTLLALHRSYLTPGDSSSGWTAGAAAYYVGYLQPRTFLLKYNENGTITDAVDCALDPLSETKCTLKSFTVEKGIYQTSNFRVQPTESIVRFPNITNLCPFGEVFNATRFASVYAWNRKRISNCVADYSVLYNSASFSTFKCYGVSPTKLNDLCFTNVYADSFVIRGDEVRQIAPGQTGKIADYNYKLPDDFTGCVIAWNSNNLDSKVGGNYNYLYRLFRKSNLKPFERDISTEIYQAGSTPCNGVEGFNCYFPLQSYGFQPTNGVGYQPYRVVVLSFELLHAPATVCGPKKSTNLVKNKCVNFNFNGLTGTGVLTESNKKFLPFQQFGRDIADTTDAVRDPQTLEILDITPCSFGGVSVITPGTNTSNQVAVLYQGVNCTEVPVAIHADQLTPTWRVYSTGSNVFQTRAGCLIGAEHVNNSYECDIPIGAGICASYQTQTNSPRRARSVASQSIIAYTMSLGAENSVAYSNNSIAIPTNFTISVTTEILPVSMTKTSVDCTMYICGDSTECSNLLLQYGSFCTQLNRALTGIAVEQDKNTQEVFAQVKQIYKTPPIKDFGGFNFSQILPDPSKPSKRSFIEDLLFNKVTLADAGFIKQYGDCLGDIAARDLICAQKFNGLTVLPPLLTDEMIAQYTSALLAGTITSGWTFGAGAALQIPFAMQMAYRFNGIGVTQNVLYENQKLIANQFNSAIGKIQDSLSSTASALGKLQDVVNQNAQALNTLVKCLSSNFGAISSVLNDILSRLDKVEAEVQIDRLITGRLQCLQTYVTQQLIRAAEIRASANLAATKMSECVLGQSKRVDFCGKGYHLMSFPQSAPHGVVFLHVTYVPAQEKNFTTAPAICHDGKAHFPREGVFVSNGTHWFVTQRNFYEPQIITTDNTFVSGNCDVVIGIVNNTVYDPLQPELDSFKEELDKYFKNHTSPDVDLGDISGINASVVNIQKEIDRLNEVAKNLNESLIDLQELGKYEQYIKGGGGSDIIKLLNEQVNKEMQSSNLYMSMSSWCYTHSLDGAGLFLFDHAAEEYEHAKKLIIFLNENNVPVQLTSISAPEHKFEGLTQIFQKAYEHEQHISESINNIVDHAIKSKDHATFNFLQWYVAEQHEEEVLFKDILDKIELIGNENHGLYLADQYVKGIAKSRKS

SEQ ID NO: 5349 - protein, 1379 aa, Artificial Sequence
  SARS-CoV-2/Iceland/189/2020__EPI_ISL_417709 spike protein (1-1211)(Q965C_S1003C) Ferritin construct
MFVFLVLLPLVSSQCVNLTTRTQLPPAYTNSFTRGVYYPDKVFRSSVLHSTQDLFLPFFSNVTWFHAIHVSGTNGTKRFDNPVLPFNDGVYFASTEKSNIIRGWIFGTTLDSKTQSLLIVNNATNVVIKVCEFQFCNDPFLGVYYHKNNKSWMESEFRVYSSANNCTFEYVSQPFLMDLEGKQGNFKNLREFVFKNIDGYFKIYSKHTPINLVRDLPQGFSALEPLVDLPIGINITRFQTLLALHRSYLTPGDSSSGWTAGAAAYYVGYLQPRTFLLKYNENGTITDAVDCALDPLSETKCTLKSFTVEKGIYQTSNFRVQPTESIVRFPNITNLCPFGEVFNATRFASVYAWNRKRISNCVADYSVLYNSASFSTFKCYGVSPTKLNDLCFTNVYADSFVIRGDEVRQIAPGQTGKIADYNYKLPDDFTGCVIAWNSNNLDSKVGGNYNYLYRLFRKSNLKPFERDISTEIYQAGSTPCNGVEGFNCYFPLQSYGFQPTNGVGYQPYRVVVLSFELLHAPATVCGPKKSTNLVKNKCVNFNFNGLTGTGVLTESNKKFLPFQQFGRDIADTTDAVRDPQTLEILDITPCSFGGVSVITPGTNTSNQVAVLYQGVNCTEVPVAIHADQLTPTWRVYSTGSNVFQTRAGCLIGAEHVNNSYECDIPIGAGICASYQTQTNSPRRARSVASQSIIAYTMSLGAENSVAYSNNSIAIPTNFTISVTTEILPVSMTKTSVDCTMYICGDSTECSNLLLQYGSFCTQLNRALTGIAVEQDKNTQEVFAQVKQIYKTPPIKDFGGFNFSQILPDPSKPSKRSFIEDLLFNKVTLADAGFTKQYGDCLGDIAARDLICAQKFNGLTVLPPLLTDEMIAQYTSALLAGTITSGWTFGAGAALQIPFAMQMAYRFNGIGVTQNVLYENQKLIANQFNSAIGKIQDSLSSTASALGKLQDVVNQNAQALNTLVKCLSSNFGAISSVLNDILSRLDKVEAEVQIDRLITGRLQCLQTYVTQQLIRAAEIRASANLAATKMSECVLGQSKRVDFCGKGYHLMSFPQSAPHGVVFLHVTYVPAQEKNFTTAPAICHDGKAHFPREGVFVSNGTHWFVTQRNFYEPQIITTDNTFVSGNCDVVIGIVNNTVYDPLQPELDSFKEELDKYFKNHTSPDVDLGDISGINASVVNIQKEIDRLNEVAKNLNESLIDLQELGKYEQYIKGGGGSDIIKLLNEQVNKEMQSSNLYMSMSSWCYTHSLDGAGLFLFDHAAEEYEHAKKLIIFLNENNVPVQLTSISAPEHKFEGLTQIFQKAYEHEQHISESINNIVDHAIKSKDHATFNFLQWYVAEQHEEEVLFKDILDKIELIGNENHGLYLADQYVKGIAKSRKS

SEQ ID NO: 5350 - protein, 1379 aa, Artificial Sequence
  SARS-CoV-2/Australia/NSW56/2020__EPI_ISL_417408 spike protein (1-1211)(Q965C_S1003C) Ferritin construct
MFVFLVLLPLVSSQCVNLTTRTQLPPAYTNSFTRGVYYPDKVFRSSVLHSTQDLFLPFFSNVTWFHAIHVSGTNGTKRFDNPVLPFNDGVYFASTEKSNIIRGWIFGTTLDSKTQSLLIVNNATNVVIKVCEFQFCNDPFLGVYYHKNNKSWMESEFRVYSSANNCTFEYVSQPFLMDLEGKQGNFKNLREFVFKNIDGYFKIYSKHTPINLVRDLPQGFSALEPLVDLPIGINITRFQTLLALHRSYLTPGDSSSGWTAGAAAYYVGYLQPRTFLLKYNENGTITDAVDCALDPLSETKCTLKSFTVEKGIYQTSNFRVQPTESIVRFPNITNLCPFGEVFNATRFASVYAWNRKRISNCVADYSVLYNSASFSTFKCYGVSPTKLNDLCFTNVYADSFVIRGDEVRQIAPGQTGKIADYNYKLPDDFTGCVIAWNSNNLDSKVGGNYNYLYRLFRKSNLKPFERDISTEIYQAGSTPCNGVEGFNCYFPLQSYGFQPTNGVGYQPYRVVVLSFELLHAPATVCGPKKSTNLVKNKCVNFNFNGLTGTGVLTESNKKFLPFQQFGRDIADTTDAVRDPQTLEILDITPCSFGGVSVITPGTNTSNQVAVLYQDVNCTEVPVAIHADQLTPTWRVYSTGSNVFQTRAGCLIGAEHVNNSYECDIPIGAGICASYQTQTNSPRRARSVASQSIIAYTMSLGAENSVAYSNNSIAIPTNFTISVTTEILPVSMTKTSVDCTMYICGDSTECSNLLLQYGSFCTQLNRALTGIAVEQDKNTQEVFAQVKQIYKTPPIKDFGGFNFSQILPDSSKPSKRSFIEDLLFNKVTLADAGFIKQYGDCLGDIAARDLICAQKFNGLTVLPPLLTDEMIAQYTSALLAGTITSGWTFGAGAALQIPFAMQMAYRFNGIGVTQNVLYENQKLIANQFNSAIGKIQDSLSSTASALGKLQDVVNQNAQALNTLVKCLSSNFGAISSVLNDILSRLDKVEAEVQIDRLITGRLQCLQTYVTQQLIRAAEIRASANLAATKMSECVLGQSKRVDFCGKGYHLMSFPQSAPHGVVFLHVTYVPAQEKNFTTAPAICHDGKAHFPREGVFVSNGTHWFVTQRNFYEPQIITTDNTFVSGNCDVVIGIVNNTVYDPLQPELDSFKEELDKYFKNHTSPDVDLGDISGINASVVNIQKEIDRLNEVAKNLNESLIDLQELGKYEQYIKGGGGSDIIKLLNEQVNKEMQSSNLYMSMSSWCYTHSLDGAGLFLFDHAAEEYEHAKKLIIFLNENNVPVQLTSISAPEHKFEGLTQIFQKAYEHEQHISESINNIVDHAIKSKDHATFNFLQWYVAEQHEEEVLFKDILDKIELIGNENHGLYLADQYVKGIAKSRKS

SEQ ID NO: 5351 - protein, 1379 aa, Artificial Sequence
  SARS-CoV-2/Iceland/280/2020__EPI_ISL_417608 spike protein (1-1211)(Q965C_S1003C) Ferritin construct
MFVFLVLLPLVSSQCVNLTTRTQLPPAYTNSFTRGVYYPDKVFRSSVLHSTQDLFLPFFSNVTWFHAIHVSGTNGTKRFDNPVLPFNDGVYFASTEKSNIIRGWIFGTTLDSKTQSLLIVNNATNVVIKVCEFQFCNDPFLGVYYHKNNKSWMESEFRVYSSANNCTFEYVSQPFLMDLEGKQGNFKNLREFVFKNIDGYFKIYSKHTPINLVRDLPQGFSALEPLVDLPIGINITRFQTLLALHRSYLTPGDSSSGWTAGAAAYYVGYLQPRTFLLKYNENGTITDAVDCALDPLSETKCTLKSFTVEKGIYQTSNFRVQPTESIVRFPNITNLCPFGEVFNATRFASVYAWNRKRISNCVADYSVLYNSASFSTFKCYGVSPTKLNDLCFTNVYADSFVIRGDEVRQIAPGQTGKIADYNYKLPDDFTGCVIAWNSNNLDSKVGGNYNYLYRLFRKSNLKPFERDISTEIYQAGSTPCNGVEGFNCYFPLQSYGFQPTNGVGYQPYRVVVLSFELLHAPATVCGPKKSTNLVKNKCVNFNFNGLTGTGVLTESNKKFLPFQQFGRDIADTTDAVRDPQTLEILDITPCSFGGVSVITPGTNTSNQVAVLYQGVNCTEVPVAIHADQLTPTWRVYSTGSNVFQTRAGCLIGAEHVNNSYECDIPIGAGICASYHTQTNSPRRARSVASQSIIAYTMSLGAENSVAYSNNSIAIPTNFTISVTTEILPVSMTKTSVDCTMYICGDSTECSNLLLQYGSFCTQLNRALTGIAVEQDKNTQEVFAQVKQIYKTPPIKDFGGFNFSQILPDPSKPSKRSFIEDLLFNKVTLADAGFIKQYGDCLGDIAARDLICAQKFNGLTVLPPLLTDEMIAQYTSALLAGTITSGWTFGAGAALQIPFAMQMAYRFNGIGVTQNVLYENQKLIANQFNSAIGKIQDSLSSTASALGKLQDVVNQNAQALNTLVKCLSSNFGAISSVLNDILSRLDKVEAEVQIDRLITGRLQCLQTYVTQQLIRAAEIRASANLAATKMSECVLGQSKRVDFCGKGYHLMSFPQSAPHGVVFLHVTYVPAQEKNFTTAPAICHDGKAHFPREGVFVSNGTHWFVTQRNFYEPQIITTDNTFVSGNCDVVIGIVNNTVYDPLQPELDSFKEELDKYFKNHTSPDVDLGDISGINASVVNIQKEIDRLNEVAKNLNESLIDLQELGKYEQYIKGGGGSDIIKLLNEQVNKEMQSSNLYMSMSSWCYTHSLDGAGLFLFDHAAEEYEHAKKLIIFLNENNVPVQLTSISAPEHKFEGLTQIFQKAYEHEQHISESINNIVDHAIKSKDHATFNFLQWYVAEQHEEEVLFKDILDKIELIGNENHGLYLADQYVKGIAKSRKS

SEQ ID NO: 5352 - protein, 1379 aa, Artificial Sequence; identical to SEQ ID NO: 5307
  SARS-CoV-2/Iceland/247/2020__EPI_ISL_417575 spike protein (1-1211)(Q965C_S1003C) Ferritin construct

SEQ ID NO: 5353 - protein, 1379 aa, Artificial Sequence
  SARS-CoV-2/Iceland/238/2020__EPI_ISL_417566 spike protein (1-1211)(Q965C_S1003C) Ferritin construct
MFVFLVLLPLVSSQCVNLTTRTQLPPAYTNSFTRGVYYPDKVFRSSVLHSTQDLFLPFFSNVTWFHAIHVSGTNGTKRFDNPVLPFNDGVYFASTEKSNIIRGWIFGTTLDSKTQSLLIVNNATNVVIKVCEFQFCNDPFLGVYYHKNNKSWMESEFRVYSSANNCTFEYVSQPFLMDLEGKQGNFKNLREFVFKNIDGYFKIYSKHTPINLVRDLPQGFSALEPLVDLPIGINITRFQTLLALHRSYLTPGDSSSGWTAGAAAYYVGYLQPRTFLLKYNENGTITDAVDCALDPLSETKCTLKSFTVEKGIYQTSNFRVQPTESIVRFPNITNLCPFGEVFNATRFASVYAWNRKRISNCVADYSVLYNSASFSTFKCYGVSPTKLNDLCFTNVYADSFVIRGDEVRQIAPGQTGKIADYNYKLPDDFTGCVIAWNSNNLDSKVGGNYNYLYRLFRKSNLKPFERDISTEIYQAGSTPCNGVEGFNCYFPLQSYGFQPTNGVGYQPYRVVVLSFELLHAPATVCGPKKSTNLVKNKCVNFNFNGLTGTGVLTESNKKFLPFQQFGRDIADTTDAVRDPQTLEILDITPCSFGGVSVITPGTNTSNQVAVLYQGVNCTEVPVAIHADQLTPTWRVYSTGSNVFQTRAGCLIGAEHVNNSYECDIPIGAGICASYQTQTNSPRRARSVASQSIIAYTMSLGAENSVAYSNNSIAIPTNFTISVTTEILPVSMTKTSVDCTMYICGDSTECSNLLLQYGSFCTQLNRALTGIAVEQDKNTQEVFAQVKQIYKTPPIKDFGGFNFSQILPDPSKPSKRSFIEDLLFNKVTLADVGFIKQYGDCLGDIAARDLICAQKFNGLTVLPPLLTDEMIAQYTSALLAGTITSGWTFGAGAALQIPFAMQMAYRFNGIGVTQNVLYENQKLIANQFNSAIGKIQDSLSSTASALGKLQDVVNQNAQALNTLVKCLSSNFGAISSVLNDILSRLDKVEAEVQIDRLITGRLQCLQTYVTQQLIRAAEIRASANLAATKMSECVLGQSKRVDFCGKGYHLMSFPQSAPHGVVFLHVTYVPAQEKNFTTAPAICHDGKAHFPREGVFVSNGTHWFVTQRNFYEPQIITTDNTFVSGNCDVVIGIVNNTVYDPLQPELDSFKEELDKYFKNHTSPDVDLGDISGINASVVNIQKEIDRLNEVAKNLNESLIDLQELGKYEQYIKGGGGSDIIKLLNEQVNKEMQSSNLYMSMSSWCYTHSLDGAGLFLFDHAAEEYEHAKKLIIFLNENNVPVQLTSISAPEHKFEGLTQIFQKAYEHEQHISESINNIVDHAIKSKDHATFNFLQWYVAEQHEEEVLFKDILDKIELIGNENHGLYLADQYVKGIAKSRKS

SEQ ID NO: 5354 - protein, 1379 aa, Artificial Sequence
  SARS-CoV-2/Greece/16/2020__EPI_ISL_418265 spike protein (1-1211)(Q965C_S1003C) Ferritin construct
MFVFLVLLPLVSSQCVNLTTRTQLPPAYTNSFTRGVYYPDKVFRSSVLHSTQDLFLPFFSNVTWFHAIHVSGTNGTKRFDNPVLPFNDGVYFASTEKSNIIRGWIFGTTLDSKTQSLLIVNNATNVVIKVCEFQFCNDPFLGVYYHKNNKSWMESEFRVYSSANNCTFEYVSQPFLMDLEGKQGNFKNLREFVFKNVDGYFKIYSKHTPINLVRDLPQGFSALEPLVDLPIGINITRFQTLLALHRSYLTPGDSSSGWTAGAAAYYVGYLQPRTFLLKYNENGTITDAVDCALDPLSETKCTLKSFTVEKGIYQTSNFRVQPTESIVRFPNITNLCPFGEVFNATRFASVYAWNRKRISNCVADYSVLYNSASFSTFKCYGVSPTKLNDLCFTNVYADSFVIRGDEVRQIAPGQTGKIADYNYKLPDDFTGCVIAWNSNNLDSKVGGNYNYLYRLFRKSNLKPFERDISTEIYQAGSTPCNGVEGFNCYFPLQSYGFQPTNGVGYQPYRVVVLSFELLHAPATVCGPKKSTNLVKNKCVNFNFNGLTGTGVLTESNKKFLPFQQFGRDIADTTDAVRDPQTLEILDITPCSFGGVSVITPGTNTSNQVAVLYQDVNCTEVPVAIHADQLTPTWRVYSTGSNVFQTRAGCLIGAEHVNNSYECDIPIGAGICASYQTQTNSPRRARSVASQSIIAYTMSLGAENSVAYSNNSIAIPTNFTISVTTEILPVSMTKTSVDCTMYICGDSTECSNLLLQYGSFCTQLNRALTGIAVEQDKNTQEVFAQVKQIYKTPPIKDFGGFNFSQILPDPSKPSKRSFIEDLLFNKVTLADAGFIKQYGDCLGDIAARDLICAQKFNGLTVLPPLLTDEMIAQYTSALLAGTITSGWTFGAGAALQIPFAMQMAYRFNGIGVTQNVLYENQKLIANQFNSAIGKIQDSLSSTASALGKLQDVVNQNAQALNTLVKCLSSNFGAISSVLNDILSRLDKVEAEVQIDRLITGRLQCLQTYVTQQLIRAAEIRASANLAATKMSECVLGQSKRVDFCGKGYHLMSFPQSAPHGVVFLHVTYVPAQEKNFTTAPAICHDGKAHFPREGVFVSNGTHWFVTQRNFYEPQIITTDNTFVSGNCDVVIGIVNNTVYDPLQPELDSFKEELDKYFKNHTSPDVDLGDISGINASVVNIQKEIDRLNEVAKNLNESLIDLQELGKYEQYIKGGGGSDIIKLLNEQVNKEMQSSNLYMSMSSWCYTHSLDGAGLFLFDHAAEEYEHAKKLIIFLNENNVPVQLTSISAPEHKFEGLTQIFQKAYEHEQHISESINNIVDHAIKSKDHATFNFLQWYVAEQHEEEVLFKDILDKIELIGNENHGLYLADQYVKGIAKSRKS

SEQ ID NO: 5355 - protein, 1379 aa, Artificial Sequence
  SARS-CoV-2/Iceland/319/2020__EPI_ISL_417648 spike protein (1-1211)(Q965C_S1003C) Ferritin construct
MFVFLVLLPLVSSQCVNLTTRTQLPPAYTNSFTRGVYYPDKVFRSSVLHSTQDLFLPFFSNVTWFHAIHVSGTNGTKRFDNPVLPFNDGVYFASTEKSNIIRGWIFGTTLDSKTQSLLIVNNATNVVIKVCEFQFCNDPFLGVYYHKNNKSWMESEFRVYSSANNCTFEYVSQPFLIDLEGKQGNFKNLREFVFKNIDGYFKIYSKHTPINLVRDLPQGFSALEPLVDLPIGINITRFQTLLALHRSYLTPGDSSSGWTAGAAAYYVGYLQPRTFLLKYNENGTITDAVDCALDPLSETKCTLKSFTVEKGIYQTSNFRVQPTESIVRFPNITNLCPFGEVFNATRFASVYAWNRKRISNCVADYSVLYNSASFSTFKCYGVSPTKLNDLCFTNVYADSFVIRGDEVRQIAPGQTGKIADYNYKLPDDFTGCVIAWNSNNLDSKVGGNYNYLYRLFRKSNLKPFERDISTEIYQAGSTPCNGVEGFNCYFPLQSYGFQPTNGVGYQPYRVVVLSFELLHAPATVCGPKKSTNLVKNKCVNFNFNGLTGTGVLTESNKKFLPFQQFGRDIADTTDAVRDPQTLEILDITPCSFGGVSVITPGTNTSNQVAVLYQGVNCTEVPVAIHADQLTPTWRVYSTGSNVFQTRAGCLIGAEHVNNSYECDIPIGAGICASYQTQTNSPRRARSVASQSIIAYTMSLGAENSVAYSNNSIAIPTNFTISVTTEILPVSMTKTSVDCTMYICGDSTECSNLLLQYGSFCTQLNRALTGIAVEQDKNTQEVFAQVKQIYKTPPIKDFGGFNFSQILPDPSKPSKRSFIEDLLFNKVTLADAGFIKQYGDCLGDIAARDLICAQKFNGLTVLPPLLTDEMIAQYTSALLAGTITSGWTFGAGAALQIPFAMQMAYRFNGIGVTQNVLYENQKLIANQFNSAIGKIQDSLSSTASALGKLQDVVNQNAQALNTLVKCLSSNFGAISSVLNDILSRLDKVEAEVQIDRLITGRLQCLQTYVTQQLIRAAEIRASANLAATKMSECVLGQSKRVDFCGKGYHLMSFPQSAPHGVVFLHVTYVPAQEKNFTTAPAICHDGKAHFPREGVFVSNGTHWFVTQRNFYEPQIITTDNTFVSGNCDVVIGIVNNTVYDPLQPELDSFKEELDKYFKNHTSPDVDLGDISGINASVVNIQKEIDRLNEVAKNLNESLIDLQELGKYEQYIKGGGGSDIIKLLNEQVNKEMQSSNLYMSMSSWCYTHSLDGAGLFLFDHAAEEYEHAKKLIIFLNENNVPVQLTSISAPEHKFEGLTQIFQKAYEHEQHISESINNIVDHAIKSKDHATFNFLQWYVAEQHEEEVLFKDILDKIELIGNENHGLYLADQYVKGIAKSRKS

SEQ ID NO: 5356 - protein, 1379 aa, Artificial Sequence
  SARS-CoV-2/Congo/94/2020__EPI_ISL_417947 spike protein (1-1211)(Q965C_S1003C) Ferritin construct
MFVFLVLLPLVSSQCVNLTTRTQLPPAYTNSFTRGVYYPDKVFRSSVLHSTQDLFLPFFSNVTWFHAIHVSGTNGTKRFDNPVLPFNDGVYFASTEKSNIIRGWIFGTTLDSKTQSLLIVNNATNVVIKVCEFQFCNDPFLGVYYHKNNKSWMESEFRVYSSANNCTFEYVSQPFLMDLEGKQGNFKNLREFVFKNIDGYFKIYSKHTPINLVRDLPQGFSALEPLVDLPIGINITRFQTLLALHRSYLTPGDSSSGWTAGAAAYYVGYLQPRTFLLKYNENGTITDAVDCALDPLSETKCTLKSFTVEKGIYQTSNFRVQPTESIVRFPNITNLCPFGEVFNATRFASVYAWNRKRISNCVADYSVLYNSASFSTFKCYGVSPTKLNDLCFTNVYADSFVIRGDEVRQIAPGQTGKIADYNYKLPDDFTGCVIAWNSNNLDSKVGGNYNYLYRLFRKSNLKPFERDISTEIYQAGSTPCNGVEGFNCYFPLQSYGFQPTNGVGYQPYRVVVLSFELLHAPATVCGPKKSTNLVKNKCVNFNFNGLTGTGVLTESNKKFLPFQQFGRDIADTTDAVRDPQTLEILDITPCSFGGVSVITPGTNTSNQVAVLYQGVNCTEVPVAIHADQLTPTWRVYSTGSNVFQTRAGCLIGAEHVNNSYECDIPIGAGICASYQTQTNSPRRARSVASQSIIAYTMSLGAENSVAYSNNSIAIPTNFTISVTTEILPVSMTKTSVDCTMYICGDSTECSNLLLQYGSFCTQLNRALTGIAVEQDKNTQEVFAQVKQIYKTPPIKDFGGFNFSQILPDPSKPSKRSFIEDILFNKVTLADAGFIKQYGDCLGDIAARDLICAQKFNGLTVLPPLLTDEMIAQYTSALLAGTITSGWTFGAGAALQIPFAMQMAYRFNGIGVTQNVLYENQKLIANQFNSAIGKIQDSLSSTASALGKLQDVVNQNAQALNTLVKCLSSNFGAISSVLNDILSRLDKVEAEVQIDRLITGRLQCLQTYVTQQLIRAAEIRASANLAATKMSECVLGQSKRVDFCGKGYHLMSFPQSAPHGVVFLHVTYVPAQEKNFTTAPAICHDGKAHFPREGVFVSNGTHWFVTQRNFYEPQIITTDNTFVSGNCDVVIGIVNNTVYDPLQPELDSFKEELDKYFKNHTSPDVDLGDISGINASVVNIQKEIDRLNEVAKNLNESLIDLQELGKYEQYIKGGGGSDIIKLLNEQVNKEMQSSNLYMSMSSWCYTHSLDGAGLFLFDHAAEEYEHAKKLIIFLNENNVPVQLTSISAPEHKFEGLTQIFQKAYEHEQHISESINNIVDHAIKSKDHATFNFLQWYVAEQHEEEVLFKDILDKIELIGNENHGLYLADQYVKGIAKSRKS

SEQ ID NO: 5357 - protein, 1379 aa, Artificial Sequence
  SARS-CoV-2/Congo/158/2020__EPI_ISL_417950 spike protein (1-1211)(Q965C_S1003C) Ferritin construct
MFVFLVLLPLVSSQCVNLTTRTQLPPAYTNSFTRGVYYPDKVFRSSVLHSTQDLFLPFFSNVTWFHAIHVSGTNGTKRFDNPVLPFNDGVYFASTEKSNIIRGWIFGTTLDSKTQSLLIVNNATNVVIKVCEFQFCNDPFLGVYYHKNNKSWMESEFRVYSSANNCTFEYVSQPFLMDLEGKQGNFKNLREFVFKNIDGYFKIYSKHTPINLVRDLPQGFSALEPLVDLPIGINITRFQTLLALHRSYLTPGDSSSGWTAGAAAYYVGYLQPRTFLLKYNENGTITDAVDCALDPLSETKCTLKSFTVEKGIYQTSNFRVQPTESIVRFPNITNLCPFGEVFNATRFASVYAWNRKRISNCVADYSVLYNSASFSTFKCYGVSPTKLNDLCFTNVYADSFVIRGDEVRQIAPGQTGKIADYNYKLPDDFTGCVIAWNSNNLDSKVGGNYNYLYRLFRKSNLKPFERDISTEIYQAGSTPCNGVEGFNCYFPLQSYGFQPTNGVGYQPYRVVVLSFELLHAPATVCGPKKSTNLVKNKCVNFNFNGLTGTGVLTESNKKFLPFQQFGRDIADTTDAVRDPQTLEILDITPCSFGGVSVITPGTNTSNQVAVLYQDVNCTEVPVAIHADQLTPTWRVYSTGSNVFQTRAGCLIGAEHVNNSYECDIPIGAGICASYQTQTNSPRRARSVASQSIIAYTMSLGAENSVAYSNNSIAIPTNFTISVTTEILPVSMTKTSVDCTMYICGDSTECSNLLLQYGSFCTQLNRALTGIAVEQDKNTQEVFAQVKQIYKTPPIKDFGGFNFSQILPDPSKPSKRSFIEDLLFNKVTLADAGFIKQYGDCLGDIAARDLICAQKFNGLTVLPPLLTDEMIAQYTSALLAGTITSGWTFGAGAALQIPFAMQMAYRFNGIGVTQNVLYENQKLIANQFNSAIGKIQDSLSSTASALGKLQDVVNQNAQALNTLVKCLSSNFGAISSVLNDILSRLDKVEAEVQIDRLITGRLQCLQTYVTQQLIRAAEIRASANLAATKMSECVLGQSKRVDFCGKGYHLMSFPQSAPHGVVFLHVTYVPAQEKNFTTAPAICHDGKAHFPREGVFVSNGTHWFVTQRNFYEPQIITTDNTFLSGNCDVVIGIVNNTVYDPLQPELDSFKEELDKYFKNHTSPDVDLGDISGINASVVNIQKEIDRLNEVAKNLNESLIDLQELGKYEQYIKGGGGSDIIKLLNEQVNKEMQSSNLYMSMSSWCYTHSLDGAGLFLFDHAAEEYEHAKKLIIFLNENNVPVQLTSISAPEHKFEGLTQIFQKAYEHEQHISESINNIVDHAIKSKDHATFNFLQWYVAEQHEEEVLFKDILDKIELIGNENHGLYLADQYVKGIAKSRKS

SEQ ID NO: 5358 - protein, 1379 aa, Artificial Sequence
  SARS-CoV-2/USA/UT-00034/2020__EPI_ISL_417977 spike protein (1-1211)(Q965C_S1003C) Ferritin construct
MFVFLVLLPLVSSQCVNLTTRTQLPPAYTNSFTRGVYYPDKVFRSSVLHSTQDLFLPFFSNVTWFHAIHVSGTNGTKRFDNPVLPFNDGVYFASTEKSNIIRGWIFGTTLDSKTQSLLIVNNATNVVIKVCEFQFCNDPFLGVYYYKNNKSWMESEFRVYSSANNCTFEYVSQPFLMDLEGKQGNFKNLREFVFKNIDGYFKIYSKHTPINLVRDLPQGFSALEPLVDLPIGINITRFQTLLALHRSYLTPGDSSSGWTAGAAAYYVGYLQPRTFLLKYNENGTITDAVDCALDPLSETKCTLKSFTVEKGIYQTSNFRVQPTESIVRFPNITNLCPFGEVFNATRFASVYAWNRKRISNCVADYSVLYNSASFSTFKCYGVSPTKLNDLCFTNVYADSFVIRGDEVRQIAPGQTGKIADYNYKLPDDFTGCVIAWNSNNLDSKVGGNYNYLYRLFRKSNLKPFERDISTEIYQAGSTPCNGVEGFNCYFPLQSYGFQPTNGVGYQPYRVVVLSFELLHAPATVCGPKKSTNLVKNKCVNFNFNGLTGTGVLTESNKKFLPFQQFGRDIADTTDAVRDPQTLEILDITPCSFGGVSVITPGTNTSNQVAVLYQGVNCTEVPVAIHADQLTPTWRVYSTGSNVFQTRAGCLIGAEHVNNSYECDIPIGAGICASYQTQTNSPRRARSVASQSIIAYTMSLGAENSVAYSNNSIAIPTNFTISVTTEILPVSMTKTSVDCTMYICGDSTECSNLLLQYGSFCTQLNRALTGIAVEQDKNTQEVFAQVKQIYKTPPIKDFGGFNFSQILPDPSKPSKRSFIEDLLFNKVTLADAGFIKQYGDCLGDIAARDLICAQKFNGLTVLPPLLTDEMIAQYTSALLAGTITSGWTFGAGAALQIPFAMQMAYRFNGIGVTQNVLYENQKLIANQFNSAIGKIQDSLSSTASALGKLQDVVNQNAQALNTLVKCLSSNFGAISSVLNDILSRLDKVEAEVQIDRLITGRLQCLQTYVTQQLIRAAEIRASANLAATKMSECVLGQSKRVDFCGKGYHLMSFPQSAPHGVVFLHVTYVPAQEKNFTTAPAICHDGKAHFPREGVFVSNGTHWFVTQRNFYEPQIITTDNTFVSGNCDVVIGIVNNTVYDPLQPELDSFKEELDKYFKNHTSPDVDLGDISGINASVVNIQKEIDRLNEVAKNLNESLIDLQELGKYEQYIKGGGGSDIIKLLNEQVNKEMQSSNLYMSMSSWCYTHSLDGAGLFLFDHAAEEYEHAKKLIIFLNENNVPVQLTSISAPEHKFEGLTQIFQKAYEHEQHISESINNIVDHAIKSKDHATFNFLQWYVAEQHEEEVLFKDILDKIELIGNENHGLYLADQYVKGIAKSRKS

SEQ ID NO: 5359 - protein, 1379 aa, Artificial Sequence
  SARS-CoV-2/USA/UT-00033/2020__EPI_ISL_417976 spike protein (1-1211)(Q965C_S1003C) Ferritin construct
MFVFLVLLPLVSSQCVNLTTRTQLPPAYTNSFTRGVYYPDKVFRSSVLHSTQDLFLPFFSNVTWFHAIHVSGTNGTKRFDNPVLPFNDGVYFASTEKSNIIRGWIFGTTLDSKTQSLLIVNNATNVVIKVCEFQFCNDPFLGVYYHKNNKSWMESEFRVYSSANNCTFEYVSQPFLMDLEGKQGNFKNLREFVFKNIDGYFKIYSKHTPINLVRDLPQGFSALEPLVDLPIGINITRFQTLLALHRSYLTPGDSSSGLTAGAAAYYVGYLQPRTFLLKYNENGTITDAVDCALDPLSETKCTLKSFTVEKGIYQTSNFRVQPTESIVRFPNITNLCPFGEVFNATRFASVYAWNRKRISNCVADYSVLYNSASFSTFKCYGVSPTKLNDLCFTNVYADSFVIRGDEVRQIAPGQTGKIADYNYKLPDDFTGCVIAWNSNNLDSKVGGNYNYLYRLFRKSNLKPFERDISTEIYQAGSTPCNGVEGFNCYFPLQSYGFQPTNGVGYQPYRVVVLSFELLHAPATVCGPKKSTNLVKNKCVNFNFNGLTGTGVLTESNKKFLPFQQFGRDIADTTDAVRDPQTLEILDITPCSFGGVSVITPGTNTSNQVAVLYQGVNCTEVPVAIHADQLTPTWRVYSTGSNVFQTRAGCLIGAEHVNNSYECDIPIGAGICASYQTQTNSPRRARSVASQSIIAYTMSLGAENSVAYSNNSIAIPTNFTISVTTEILPVSMTKTSVDCTMYICGDSTECSNLLLQYGSFCTQLNRALTGIAVEQDKNTQEVFAQVKQIYKTPPIKDFGGFNFSQILPDPSKPSKRSFIEDLLFNKVTLADAGFIKQYGDCLGDIAARDLICAQKFNGLTVLPPLLTDEMIAQYTSALLAGTITSGWTFGAGAALQIPFAMQMAYRFNGIGVTQNVLYENQKLIANQFNSAIGKIQDSLSSTASALGKLQDVVNQNAQALNTLVKCLSSNFGAISSVLNDILSRLDKVEAEVQIDRLITGRLQCLQTYVTQQLIRAAEIRASANLAATKMSECVLGQSKRVDFCGKGYHLMSFPQSAPHGVVFLHVTYVPAQEKNFTTAPAICHDGKAHFPREGVFVSNGTHWFVTQRNFYEPQIITTDNTFVSGNCDVVIGIVNNTVYDPLQPELDSFKEELDKYFKNHTSPDVDLGDISGINASVVNIQKEIDRLNEVAKNLNESLIDLQELGKYEQYIKGGGGSDIIKLLNEQVNKEMQSSNLYMSMSSWCYTHSLDGAGLFLFDHAAEEYEHAKKLIIFLNENNVPVQLTSISAPEHKFEGLTQIFQKAYEHEQHISESINNIVDHAIKSKDHATFNFLQWYVAEQHEEEVLFKDILDKIELIGNENHGLYLADQYVKGIAKSRKS

SEQ ID NO: 5360 - protein, 1379 aa, Artificial Sequence
  SARS-CoV-2/USA/WI-13/2020__EPI_ISL_417516 spike protein (1-1211)(Q965C_S1003C) Ferritin construct
MFVFLVLLPLVSSQCVNLTTRTQLPPAYTNSFTRGVYYPDKVFRSSVLHSTQDLFLPFFSNVTWFHAIHVSGTNGTKRFDNPVLPFNDGVYFASTEKSNIIRGWIFGTTLDSKTQSLLIVNNATNVVIKVCEFQFCNDPFLGVYYHKNNKSWMESEFRVYSSANNCTFEYVSQPFLMDLEGKQGNFKNLREFVFKNIDGYFKIYSKHTPINLVRDLPQGFSALEPLVDLPIGINITRFQTLLALHRSYLTPGDSSSGWTAGAAAYYVGYLQPRTFLLKYNENGTITDAVDCALDPLSETKCTLKSFTVEKGIYQTSNFRVLPTESIVRFPNITNLCPFGEVFNATRFASVYAWNRKRISNCVADYSVLYNSASFSTFKCYGVSPTKLNDLCFTNVYADSFVIRGDEVRQIAPGQTGKIADYNYKLPDDFTGCVIAWNSNNLDSKVGGNYNYLYRLFRKSNLKPFERDISTEIYQAGSTPCNGVEGFNCYFPLQSYGFQPTNGVGYQPYRVVVLSFELLHAPATVCGPKKSTNLVKNKCVNFNFNGLTGTGVLTESNKKFLPFQQFGRDIADTTDAVRDPQTLEILDITPCSFGGVSVITPGTNTSNQVAVLYQGVNCTEVPVAIHADQLTPTWRVYSTGSNVFQTRAGCLIGAEHVNNSYECDIPIGAGICASYQTQTNSPRRARSVASQSIIAYTMSLGAENSVAYSNNSIAIPTNFTISVTTEILPVSMTKTSVDCTMYICGDSTECSNLLLQYGSFCTQLNRALTGIAVEQDKNTQEVFAQVKQIYKTPPIKDFGGFNFSQILPDPSKPSKRSFIEDLLFNKVTLADAGFIKQYGDCLGDIAARDLICAQKFNGLTVLPPLLTDEMIAQYTSALLAGTITSGWTFGAGAALQIPFAMQMAYRFNGIGVTQNVLYENQKLIANQFNSAIGKIQDSLSSTASALGKLQDVVNQNAQALNTLVKCLSSNFGAISSVLNDILSRLDKVEAEVQIDRLITGRLQCLQTYVTQQLIRAAEIRASANLAATKMSECVLGQSKRVDFCGKGYHLMSFPQSAPHGVVFLHVTYVPAQEKNFTTAPAICHDGKAHFPREGVFVSNGTHWFVTQRNFYEPQIITTDNTFVSGNCDVVIGIVNNTVYDPLQPELDSFKEELDKYFKNHTSPDVDLGDISGINASVVNIQKEIDRLNEVAKNLNESLIDLQELGKYEQYIKGGGGSDIIKLLNEQVNKEMQSSNLYMSMSSWCYTHSLDGAGLFLFDHAAEEYEHAKKLIIFLNENNVPVQLTSISAPEHKFEGLTQIFQKAYEHEQHISESINNIVDHAIKSKDHATFNFLQWYVAEQHEEEVLFKDILDKIELIGNENHGLYLADQYVKGIAKSRKS

SEQ ID NO: 5361 - protein, 1378 aa, Artificial Sequence
  SARS-CoV-2/India/1-27/2020__EPI_ISL_413522 spike protein (1-1210)(Q964C_S1002C) Ferritin construct
MFVFLVLLPLVSSQCVNLTTRTQLPPAYTNSFTRGVYYPDKVFRSSVLHSTQDLFLPFFSNVTWFHAIHVSGTNGTKRFDNPVLPFNDGVYFASTEKSNIIRGWIFGTTLDSKTQSLLIVNNATNVVIKVCEFQFCNDPFLGVYHKNNKSWMESEFRVYSSANNCTFEYVSQPFLMDLEGKQGNFKNLREFVFKNIDGYFKIYSKHTPINLVRDLPQGFSALEPLVDLPIGINITRFQTLLALHRSYLTPGDSSSGWTAGAAAYYVGYLQPRTFLLKYNENGTITDAVDCALDPLSETKCTLKSFTVEKGIYQTSNFRVQPTESIVRFPNITNLCPFGEVFNATRFASVYAWNRKRISNCVADYSVLYNSASFSTFKCYGVSPTKLNDLCFTNVYADSFVIRGDEVIQIAPGQTGKIADYNYKLPDDFTGCVIAWNSNNLDSKVGGNYNYLYRLFRKSNLKPFERDISTEIYQAGSTPCNGVEGFNCYFPLQSYGFQPTNGVGYQPYRVVVLSFELLHAPATVCGPKKSTNLVKNKCVNFNFNGLTGTGVLTESNKKFLPFQQFGRDIADTTDAVRDPQTLEILDITPCSFGGVSVITPGTNTSNQVAVLYQDVNCTEVPVAIHADQLTPTWRVYSTGSNVFQTRAGCLIGAEHVNNSYECDIPIGAGICASYQTQTNSPRRARSVASQSIIAYTMSLGAENSVAYSNNSIAIPTNFTISVTTEILPVSMTKTSVDCTMYICGDSTECSNLLLQYGSFCTQLNRALTGIAVEQDKNTQEVFAQVKQIYKTPPIKDFGGFNFSQILPDPSKPSKRSFIEDLLFNKVTLADAGFIKQYGDCLGDIAARDLICAQKFNGLTVLPPLLTDEMIAQYTSALLAGTITSGWTFGAGAALQIPFAMQMAYRFNGIGVTQNVLYENQKLIANQFNSAIGKIQDSLSSTASALGKLQDVVNQNAQALNTLVKCLSSNFGAISSVLNDILSRLDKVEAEVQIDRLITGRLQCLQTYVTQQLIRAAEIRASANLAATKMSECVLGQSKRVDFCGKGYHLMSFPQSAPHGVVFLHVTYVPAQEKNFTTAPAICHDGKAHFPREGVFVSNGTHWFVTQRNFYEPQIITTDNTFVSGNCDVVIGIVNNTVYDPLQPELDSFKEELDKYFKNHTSPDVDLGDISGINASVVNIQKEIDRLNEVAKNLNESLIDLQELGKYEQYIKGGGGSDIIKLLNEQVNKEMQSSNLYMSMSSWCYTHSLDGAGLFLFDHAAEEYEHAKKLIIFLNENNVPVQLTSISAPEHKFEGLTQIFQKAYEHEQHISESINNIVDHAIKSKDHATFNFLQWYVAEQHEEEVLFKDILDKIELIGNENHGLYLADQYVKGIAKSRKS

SEQ ID NO: 5362 - protein, 1373 aa, Artificial Sequence
  SARS-CoV-2/pangolin/Guangxi/P4L/2017__EPI_ISL_410538 spike protein (1-1205)(Q959C_S997C) Ferritin construct
MFVFLFVLPLVSSQCVNLTTRTGIPPGYTNSSTRGVYYPDKVFRSSILHLTQDLFLPFFSNVTWFNTINYQGGFKKFDNPVLPFNDGVYFASTEKSNIIRGWIFGTTLDARTQSLLIVNNATNVVIKVCEFQFCTDPFLGVYYHNNNKTWVENEFRVYSSANNCTFEYISQPFLMDLEGKQGNFKNLREFVFKNVDGYFKIYSKHTPIDLVRDLPRGFAALEPLVDLPIGINITRFQTLLALHRSYLTPGNLESGWTTGAAAYYVGYLQQRTFLLSYNQNGTITDAVDCSLDPLSETKCTLKSLTVEKGIYQTSNFRVQPTISIVRFPNITNLCPFGEVFNASKFASVYAWNRKRISNCVADYSVLYNSTSFSTFKCYGVSPTKLNDLCFTNVYADSFVVKGDEVRQIAPGQTGVIADYNYKLPDDFTGCVIAWNSVKQDALTGGNYGYLYRLFRKSKLKPFERDISTEIYQAGSTPCNGQVGLNCYYPLERYGFHPTTGVNYQPFRVVVLSFELLNGPATVCGPKLSTTLVKDKCVNFNFNGLTGTGVLTTSKKQFLPFQQFGRDISDTTDAVRDPQTLEILDITPCSFGGVSVITPGTNTSNQVAVLYQDVNCTEVPMAIHAEQLTPAWRVYSAGANVFQTRAGCLVGAEHVNNSYECDIPVGAGICASYHSMSSLRSVNQRSIIAYTMSLGAENSVAYSNNSIAIPTNFTISVTTEILPVSMTKTSVDCTMYICGDSIECSNLLLQYGSFCTQLNRALTGIAVEQDKNTQEVFAQVKQIYKTPPIKDFGGFNFSQILPDPSKPSKRSFIEDLLFNKVTLADAGFIKQYGDCLGDIAARDLICAQKFNGLTVLPPLLTDEMIAQYTSALLAGTITSGWTFGAGAALQIPFAMQMAYRFNGIGVTQNVLYENQKLIANQFNSAIGKIQDSLSSTASALGKLQDVVNQNAQALNTLVKCLSSNFGAISSVLNDILSRLDKVEAEVQIDRLITGRLQCLQTYVTQQLIRAAEIRASANLAATKMSECVLGQSKRVDFCGKGYHLMSFPQSAPHGVVFLHVTYVPAQEKNFTTAPAICHEGKAHFPREGVFVSNGTHWFITQRNFYEPQIITTDNTFVSGSCDVVIGIVNNTVYDPLQPELDSFKEELDKYFKNHTSPDVDLGDISGINASVVNIQKEIDRLNEVAKNLNESPIDLQELGKYEQYIKGGGGSDIIKLLNEQVNKEMQSSNLYMSMSSWCYTHSLDGAGLFLFDHAAEEYEHAKKLIIFLNENNVPVQLTSISAPEHKFEGLTQIFQKAYEHEQHISESINNIVDHAIKSKDHATFNFLQWYVAEQHEEEVLFKDILDKIELIGNENHGLYLADQYVKGIAKSRKS

SEQ ID NO: 5363 - protein, 1373 aa, Artificial Sequence
  SARS-CoV-2/pangolin/Guangxi/P5L/2017__EPI_ISL_410540 spike protein (1-1205)(Q959C_S997C) Ferritin construct
MFVFLFVLPLVSSQCVNLTTRTGIPPGYTNSSTRGVYYPDKVFRSSILHLTQDLFLPFFSNVTWFNTINYQGGFKKFDNPVLPFNDGVYFASTEKSNIIRGWIFGTTLDARTQSLLIVNNATNVVIKVCEFQFCTDPFLGVYYHNNNKTWVENEFRVYSSANNCTFEYISQPFLMDLEGKQGNFKNLREFVFKNVDGYFKIYSKHTPIDLVRDLPRGFAALEPLVDLPIGINITRFQTLLALHRSYLTPGKLESGWTTGAAAYYVGYLQQRTFLLSYNQNGTITDAVDCSLDPLSETKCTLKSLTVEKGIYQTSNFRVQPTISIVRFPNITNLCPFGEVFNASKFASVYAWNRKRISNCVADYSVLYNSTSFSTFKCYGVSPTKLNDLCFTNVYADSFVVKGDEVRQIAPGQTGVIADYNYKLPDDFTGCVIAWNSVKQDALTGGNYGYLYRLFRKSKLKPFERDISTEIYQAGSTPCNGQVGLNCYYPLERYGFHPTTGVNYQPFRVVVLSFELLNGPATVCGPKLSTTLVKDKCVNFNFNGLTGTGVLTTSKKQFLPFQQFGRDISDTTDAVRDPQTLEILDITPCSFGGVSVITPGTNTSNQVAVLYQDVNCTEVPMAIHAEQLTPAWRVYSAGANVFQTRAGCLVGAEHVNNSYECDIPVGAGICASYHSMSSFRSVNQRSIIAYTMSLGAENSVAYSNNSIAIPTNFTISVTTEILPVSMTKTSVDCTMYICGDSIECSNLLLQYGSFCTQLNRALTGIAVEQDKNTQEVFAQVKQIYKTPPIKDFGGFNFSQILPDPSKPSKRSFIEDLLFNKVTLADAGFIKQYGDCLGDIAARDLICAQKFNGLTVLPPLLTDEMIAQYTSALLAGTITSGWTFGAGAALQIPFAMQMAYRFNGIGVTQNVLYENQKLIANQFNSAIGKIQDSLSSTASALGKLQDVVNQNAQALNTLVKCLSSNFGAISSVLNDILSRLDKVEAEVQIDRLITGRLQCLQTYVTQQLIRAAEIRASANLAATKMSECVLGQSKRVDFCGKGYHLMSFPQSAPHGVVFLHVTYVPAQEKNFTTAPAICHEGKAHFPREGVFVSNGTHWFITQRNFYEPQIITTDNTFVSGSCDVVIGIVNNTVYDPLQPELDSFKEELDKYFKNHTSPDVDLGDISGINASVVNIQKEIDRLNEVAKNLNESLIDLQELGKYEQYIKGGGGSDIIKLLNEQVNKEMQSSNLYMSMSSWCYTHSLDGAGLFLFDHAAEEYEHAKKLIIFLNENNVPVQLTSISAPEHKFEGLTQIFQKAYEHEQHISESINNIVDHAIKSKDHATFNFLQWYVAEQHEEEVLFKDILDKIELIGNENHGLYLADQYVKGIAKSRKS

SEQ ID NO: 5364 - protein, 1373 aa, Artificial Sequence
  SARS-CoV-2/pangolin/Guangxi/P5E/2017__EPI_ISL_410541 spike protein (1-1205)(Q959C_S997C) Ferritin construct
MFVFLFVLPLVSSQCVNLTTRTGIPPGYTNSSTRGVYYPDKVFRSSILHLTQDLFLPFFSNVTWFNTITYQGGSKKFDNPVLPFNDGVYFASTEKSNIIRGWIFGTTLDARTQSLLIVNNATNVVIKVCEFQFCTDPFLGVYYHNNNKTWVENEFRVYSSANNCTFEYISQPFLMDLEGKQGNFKNLREFVFKNVDGYFKIYSKHTPIDLVRDLPRGFAALEPLVDLPIGINITRFQTLLALHRSYLTPGKLESGWTTGAAAYYVGYLQQRTFLLSYNQNGTITDAVDCSLDPLSETKCTLKSLTVEKGIYQTSNFRVQPTISIVRFPNITNLCPFGEVFNASKFASVYAWNRKRISNCVADYSVLYNSTSFSTFKCYGVSPTKLNDLCFTNVYADSFVVKGDEVRQIAPGQTGVIADYNYKLPDDFTGCVIAWNSVKQDALTGDNYGYLYRLFRKSKLKPFERDISTEIYQAGSTPCNGQVGLNCYYPLERYGFHPTTGVNYQPFRVVVLSFELLNGPATVCGPKLSTTLVKDKCVNFNFNGLTGTGVLTTSKKQFLPFQQFGRDISDTTDAVRDPQTLEILDITPCSFGGVSVITPGTNTSNQVAVLYQDVNCTEVPMAIHAEQLTPAWRVYSAGANVFQTRAGCLVGAEHVNNSYECDIPVGAGICASYHSMSSFRSVNQRSIIAYTMSLGAENSVAYSNNSIAIPTNFTISVTTEILPVSMTKTSVDCTMYICGDSIECSNLLLQYGSFCTQLNRALTGIAVEQDKNTQEVFAQVKQIYKTPPIKDFGGFNFSQILPDPSKPSKRSFIEDLLFNKVTLADAGFIKQYGDCLGDIAARDLICAQKFNGLTVLPPLLTDEMIAQYTSALLAGTITSGWTFGAGAALQIPFAMQMAYRFNGIGVTQNVLYENQKLIANQFNSAIGKIQDSLSSTASALGKLQDVVNQNAQALNTLVKCLSSNFGAISSVLNDILSRLDKVEAEVQIDRLITGRLQCLQTYVTQQLIRAAEIRASANLAATKMSECVLGQSKRVDFCGKGYHLMSFPQSAPHGVVFLHVTYVPAQEKNFTTAPAICHEGKAHFPREGVFVSNGTHWFITQRNFYEPQIITTDNTFVSGSCDVVIGIVNNTVYDPLQPELDSFKEELDKYFKNHTSPDVDLGDISGINASVVNIQKEIDRLNEVAKNLNESLIDLQELGKYEQYIKGGGGSDIIKLLNEQVNKEMQSSNLYMSMSSWCYTHSLDGAGLFLFDHAAEEYEHAKKLIIFLNENNVPVQLTSISAPEHKFEGLTQIFQKAYEHEQHISESINNIVDHAIKSKDHATFNFLQWYVAEQHEEEVLFKDILDKIELIGNENHGLYLADQYVKGIAKSRKS

SEQ ID NO: 5365 - protein, 1371 aa, Artificial Sequence
  SARS-CoV-2/pangolin/Guangxi/P1E/2017__EPI_ISL_410539 spike protein (1-1203)(Q957C_S995C) Ferritin construct
MFVFLFVLPLVSSQCVNLTTRTGIQPGYTNSSTRGVYYPDKVFRSSILHLTQDLFLPFFSNVTWFNTINYQGGFKKFDNPVLPFNDGVYFASTEKSNIIRGWIFGTTLDARTQSLLIVNNATNVVIKVCEFQFCTDPFLGVYYHNNNKTWVENEFRVYSSANNCTFEYISQPFLMDLEGKQGNFKNLREFVFKNVDGYFKIYSKHTPIDLVRDLPRGFAALEPLVDLPIGINITRFQTLLALHRSYLTPGKLESGWTTGAAAYYVGYLQQRTFLLSYNQNGTITDAVDCSLDPLSETKCTLKSLTVEKGIYQTSNFRVQPTISIVRFPNITNLCPFGEVFNASKFASVYAWNRKRISNCVADYSVLYNSTSFSTFKCYGVSPTKLNDLCFTNVYADSFVVKGDEVRQIAPGQTGVIADYNYKLPDDFTGCVIAWNSVKQDALTGGNYLYRLFRKSKLKPFERDISTEIYQAGSTPCNGQVGLNCYYPLERYGFHPTTGVNYQPFRVVVLSFELLNGPATVCGPKLSTTLVKDKCVNFNFNGLTGTGVLTTSKKQFLPFQQFGRDISDTTDAVRDPQTLEILDITPCSFGGVSVITPGTNTSNQVAVLYQDVNCTEVPMAIHAEQLTPAWRVYSAGANVFQTRAGCLVGAEHVNNSYECDIPVGAGICASYHSMSSLRSVNQRSIIAYTMSLGAENSVAYSNNSIAIPTNFTISVTTEILPVSMTKTSVDCTMYICGDSIECSNLLLQYGSFCTQLNRALTGIAVEQDKNTQEVFAQVKQIYKTPPIKDFGGFNFSQILPDPSKPSKRSFIEDLLFNKVTLADAGFIKQYGDCLGDIAARDLICAQKFNGLTVLPPLLTDEMIAQYTSALLAGTITSGWTFGAGAALQIPFAMQMAYRFNGIGVTQNVLYENQKLIANQFNSAIGKIQDSLSSTASALGKLQDVVNQNAQALNTLVKCLSSNFGAISSVLNDILSRLDKVEAEVQIDRLITGRLQCLQTYVTQQLIRAAEIRASANLAATKMSECVLGQSKRVDFCGKGYHLMSFPQSAPHGVVFLHVTYVPAQEKNFTTAPAICHEGKAHFPREGVFVSNGTHWFITQRNFYEPQIITTDNTFVSGSCDVVIGIVNNTVYDPLQPELDSFKEELDKYFKNHTSPDVDLGDISGINASVVNIQKEIDRLNEVAKNLNESLIDLQELGKYEQYIKGGGGSDIIKLLNEQVNKEMQSSNLYMSMSSWCYTHSLDGAGLFLFDHAAEEYEHAKKLIIFLNENNVPVQLTSISAPEHKFEGLTQIFQKAYEHEQHISESINNIVDHAIKSKDHATFNFLQWYVAEQHEEEVLFKDILDKIELIGNENHGLYLADQYVKGIAKSRKS

SEQ ID NO: 5366 - protein, 1379 aa, Artificial Sequence
  SARS-CoV-2/Wuhan/WIV05/2019__EPI_ISL_402128 spike protein (1-1211)(F970C_G999C) Ferritin construct
MFVFLVLLPLVSSQCVNLTTRTQLPPAYTNSFTRGVYYPDKVFRSSVLHSTQDLFLPFFSNVTWFHAIHVSGTNGTKRFDNPVLPFNDGVYFASTEKSNIIRGWIFGTTLDSKTQSLLIVNNATNVVIKVCEFQFCNDPFLGVYYHKNNKSWMESEFRVYSSANNCTFEYVSQPFLMDLEGKQGNFKNLREFVFKNIDGYFKIYSKHTPINLVRDLPQGFSALEPLVDLPIGINITRFQTLLALHRSYLTPGDSSSGWTAGAAAYYVGYLQPRTFLLKYNENGTITDAVDCALDPLSETKCTLKSFTVEKGIYQTSNFRVQPTESIVRFPNITNLCPFGEVFNATRFASVYAWNRKRISNCVADYSVLYNSASFSTFKCYGVSPTKLNDLCFTNVYADSFVIRGDEVRQIAPGQTGKIADYNYKLPDDFTGCVIAWNSNNLDSKVGGNYNYLYRLFRKSNLKPFERDISTEIYQAGSTPCNGVEGFNCYFPLQSYGFQPTNGVGYQPYRVVVLSFELLHAPATVCGPKKSTNLVKNKCVNFNFNGLTGTGVLTESNKKFLPFQQFGRDIADTTDAVRDPQTLEILDITPCSFGGVSVITPGTNTSNQVAVLYQDVNCTEVPVAIHADQLTPTWRVYSTGSNVFQTRAGCLIGAEHVNNSYECDIPIGAGICASYQTQTNSPRRARSVASQSIIAYTMSLGAENSVAYSNNSIAIPTNFTISVTTEILPVSMTKTSVDCTMYICGDSTECSNLLLQYGSFCTQLNRALTGIAVEQDKNTQEVFAQVKQIYKTPPIKDFGGFNFSQILPDPSKPSKRSFIEDLLFNKVTLADAGFIKQYGDCLGDIAARDLICAQKFNGLTVLPPLLTDEMIAQYTSALLAGTITSGWTFGAGAALQIPFAMQMAYRFNGIGVTQNVLYENQKLIANQFNSAIGKIQDSLSSTASALGKLQDVVNQNAQALNTLVKQLSSNCGAISSVLNDILSRLDKVEAEVQIDRLITCRLQSLQTYVTQQLIRAAEIRASANLAATKMSECVLGQSKRVDFCGKGYHLMSFPQSAPHGVVFLHVTYVPAQEKNFTTAPAICHDGKAHFPREGVFVSNGTHWFVTQRNFYEPQIITTDNTFVSGNCDVVIGIVNNTVYDPLQPELDSFKEELDKYFKNHTSPDVDLGDISGINASVVNIQKEIDRLNEVAKNLNESLIDLQELGKYEQYIKGGGGSDIIKLLNEQVNKEMQSSNLYMSMSSWCYTHSLDGAGLFLFDHAAEEYEHAKKLIIFLNENNVPVQLTSISAPEHKFEGLTQIFQKAYEHEQHISESINNIVDHAIKSKDHATFNFLQWYVAEQHEEEVLFKDILDKIELIGNENHGLYLADQYVKGIAKSRKS

SEQ ID NO: 5367 - protein, 1375 aa, Artificial Sequence
  SARS-CoV-2/bat/Yunnan/RaTG13/2013__EPI_ISL_402131 spike protein (1-1207)(F966C_G995C) Ferritin construct
MFVFLVLLPLVSSQCVNLTTRTQLPPAYTNSSTRGVYYPDKVFRSSVLHLTQDLFLPFFSNVTWFHAIHVSGTNGIKRFDNPVLPFNDGVYFASTEKSNIIRGWIFGTTLDSKTQSLLIVNNATNVVIKVCEFQFCNDPFLGVYYHKNNKSWMESEFRVYSSANNCTFEYVSQPFLMDLEGKQGNFKNLREFVFKNIDGYFKIYSKHTPINLVRDLPPGFSALEPLVDLPIGINITRFQTLLALHRSYLTPGDSSSGWTAGAAAYYVGYLQPRTFLLKYNENGTITDAVDCALDPLSETKCTLKSFTVEKGIYQTSNFRVQPTDSIVRFPNITNLCPFGEVFNATTFASVYAWNRKRISNCVADYSVLYNSTSFSTFKCYGVSPTKLNDLCFTNVYADSFVITGDEVRQIAPGQTGKIADYNYKLPDDFTGCVIAWNSKHIDAKEGGNFNYLYRLFRKANLKPFERDISTEIYQAGSKPCNGQTGLNCYYPLYRYGFYPTDGVGHQPYRVVVLSFELLNAPATVCGPKKSTNLVKNKCVNFNFNGLTGTGVLTESNKKFLPFQQFGRDIADTTDAVRDPQTLEILDITPCSFGGVSVITPGTNASNQVAVLYQDVNCTEVPVAIHADQLTPTWRVYSTGSNVFQTRAGCLIGAEHVNNSYECDIPIGAGICASYQTQTNSRSVASQSIIAYTMSLGAENSVAYSNNSIAIPTNFTISVTTEILPVSMTKTSVDCTMYICGDSTECSNLLLQYGSFCTQLNRALTGIAVEQDKNTQEVFAQVKQIYKTPPIKDFGGFNFSQILPDPSKPSKRSFIEDLLFNKVTLADAGFIKQYGDCLGDIAARDLICAQKFNGLTVLPPLLTDEMIAQYTSALLAGTITSGWTFGAGAALQIPFAMQMAYRFNGIGVTQNVLYENQKLIANQFNSAIGKIQDSLSSTASALGKLQDVVNQNAQALNTLVKQLSSNCGAISSVLNDILSRLDKVEAEVQIDRLITCRLQSLQTYVTQQLIRAAEIRASANLAATKMSECVLGQSKRVDFCGKGYHLMSFPQSAPHGVVFLHVTYVPAQEKNFTTAPAICHDGKAHFPREGVFVSNGTHWFVTQRNFYEPQIITTDNTFVSGSCDVVIGIVNNTVYDPLQPELDSFKEELDKYFKNHTSPDVDLGDISGINASVVNIQKEIDRLNEVAKNLNESLIDLQELGKYEQYIKGGGGSDIIKLLNEQVNKEMQSSNLYMSMSSWCYTHSLDGAGLFLFDHAAEEYEHAKKLIIFLNENNVPVQLTSISAPEHKFEGLTQIFQKAYEHEQHISESINNIVDHAIKSKDHATFNFLQWYVAEQHEEEVLFKDILDKIELIGNENHGLYLADQYVKGIAKSRKS

SEQ ID NO: 5368 - protein, 1379 aa, Artificial Sequence
  SARS-CoV-2/Wuhan/HBCDC-HB-01/2019__EPI_ISL_402132 spike protein (1-1211)(F970C_G999C) Ferritin construct
MFVFLVLLPLVSSQCVNLTTRTQLPPAYTNSITRGVYYPDKVFRSSVLHSTQDLFLPFFSNVTWFHAIHVSGTNGTKRFDNPVLPFNDGVYFASTEKSNIIRGWIFGTTLDSKTQSLLIVNNATNVVIKVCEFQFCNDPFLGVYYHKNNKSWMESEFRVYSSANNCTFEYVSQPFLMDLEGKQGNFKNLREFVFKNIDGYFKIYSKHTPINLVRDLPQGFSALEPLVDLPIGINITRFQTLLALHRSYLTPGDSSSGWTAGAAAYYVGYLQPRTFLLKYNENGTITDAVDCALDPLSETKCTLKSFTVEKGIYQTSNFRVQPTESIVRFPNITNLCPFGEVFNATRFASVYAWNRKRISNCVADYSVLYNSASFSTFKCYGVSPTKLNDLCFTNVYADSFVIRGDEVRQIAPGQTGKIADYNYKLPDDFTGCVIAWNSNNLDSKVGGNYNYLYRLFRKSNLKPFERDISTEIYQAGSTPCNGVEGFNCYFPLQSYGFQPTNGVGYQPYRVVVLSFELLHAPATVCGPKKSTNLVKNKCVNFNFNGLTGTGVLTESNKKFLPFQQFGRDIADTTDAVRDPQTLEILDITPCSFGGVSVITPGTNTSNQVAVLYQDVNCTEVPVAIHADQLTPTWRVYSTGSNVFQTRAGCLIGAEHVNNSYECDIPIGAGICASYQTQTNSPRRARSVASQSIIAYTMSLGAENSVAYSNNSIAIPTNFTISVTTEILPVSMTKTSVDCTMYICGDSTECSNLLLQYGSFCTQLNRALTGIAVEQDKNTQEVFAQVKQIYKTPPIKDFGGFNFSQILPDPSKPSKRSFIEDLLFNKVTLADAGFIKQYGDCLGDIAARDLICAQKFNGLTVLPPLLTDEMIAQYTSALLAGTITSGWTFGAGAALQIPFAMQMAYRFNGIGVTQNVLYENQKLIANQFNSAIGKIQDSLSSTASALGKLQDVVNQNAQALNTLVKQLSSNCGAISSVLNDILSRLDKVEAEVQIDRLITCRLQSLQTYVTQQLIRAAEIRASANLAATKMSECVLGQSKRVDFCGKGYHLMSFPQSAPHGVVFLHVTYVPAQEKNFTTAPAICHDGKAHFPREGVFVSNGTHWFVTQRNFYEPQIITTDNTFVSGNCDVVIGIVNNTVYDPLQPELDSFKEELDKYFKNHTSPDVDLGDISGINASVVNIQKEIDRLNEVAKNLNESLIDLQELGKYEQYIKGGGGSDIIKLLNEQVNKEMQSSNLYMSMSSWCYTHSLDGAGLFLFDHAAEEYEHAKKLIIFLNENNVPVQLTSISAPEHKFEGLTQIFQKAYEHEQHISESINNIVDHAIKSKDHATFNFLQWYVAEQHEEEVLFKDILDKIELIGNENHGLYLADQYVKGIAKSRKS

SEQ ID NO: 5369 - protein, 1379 aa, Artificial Sequence
  SARS-CoV-2/Guangdong/20SF028/2020__EPI_ISL_403936 spike protein (1-1211)(F970C_G999C) Ferritin construct
MFVFLVLLPLVSSQCVNLTTRTQLPPAYTNSFTRGVYYPDKVFRSSVLYSTQDLFLPFFSNVTWFHAIHVSGTNGTKRFDNPVLPFNDGVYFASTEKSNIIRGWIFGTTLDSKTQSLLIVNNATNVVIKVCEFQFCNDPFLGVYYHKNNKSWMESEFRVYSSANNCTFEYVSQPFLMDLEGKQGNFKNLREFVFKNIDGYFKIYSKHTPINLVRDLPQGFSALEPLVDLPIGINITRFQTLLALHRSYLTPGDSSSGWTAGAAAYYVGYLQPRTFLLKYNENGTITDAVDCALDPLSETKCTLKSFTVEKGIYQTSNFRVQPTESIVRFPNITNLCPFGEVFNATRFASVYAWNRKRISNCVADYSVLYNSASFSTFKCYGVSPTKLNDLCFTNVYADSFVIRGDEVRQIAPGQTGKIADYNYKLPDDFTGCVIAWNSNNLDSKVGGNYNYLYRLFRKSNLKPFERDISTEIYQAGSTPCNGVEGFNCYFPLQSYGFQPTNGVGYQPYRVVVLSFELLHAPATVCGPKKSTNLVKNKCVNFNFNGLTGTGVLTESNKKFLPFQQFGRDIADTTDAVRDPQTLEILDITPCSFGGVSVITPGTNTSNQVAVLYQDVNCTEVPVAIHADQLTPTWRVYSTGSNVFQTRAGCLIGAEHVNNSYECDIPIGAGICASYQTQTNSPRRARSVASQSIIAYTMSLGAENSVAYSNNSIAIPTNFTISVTTEILPVSMTKTSVDCTMYICGDSTECSNLLLQYGSFCTQLNRALTGIAVEQDKNTQEVFAQVKQIYKTPPIKDFGGFNFSQILPDPSKPSKRSFIEDLLFNKVTLADAGFIKQYGDCLGDIAARDLICAQKFNGLTVLPPLLTDEMIAQYTSALLAGTITSGWTFGAGAALQIPFAMQMAYRFNGIGVTQNVLYENQKLIANQFNSAIGKIQDSLSSTASALGKLQDVVNQNAQALNTLVKQLSSNCGAISSVLNDILSRLDKVEAEVQIDRLITCRLQSLQTYVTQQLIRAAEIRASANLAATKMSECVLGQSKRVDFCGKGYHLMSFPQSAPHGVVFLHVTYVPAQEKNFTTAPAICHDGKAHFPREGVFVSNGTHWFVTQRNFYEPQIITTDNTFVSGNCDVVIGIVNNTVYDPLQPELDSFKEELDKYFKNHTSPDVDLGDISGINASVVNIQKEIDRLNEVAKNLNESLIDLQELGKYEQYIKGGGGSDIIKLLNEQVNKEMQSSNLYMSMSSWCYTHSLDGAGLFLFDHAAEEYEHAKKLIIFLNENNVPVQLTSISAPEHKFEGLTQIFQKAYEHEQHISESINNIVDHAIKSKDHATFNFLQWYVAEQHEEEVLFKDILDKIELIGNENHGLYLADQYVKGIAKSRKS

SEQ ID NO: 5370 - protein, 1379 aa, Artificial Sequence
  SARS-CoV-2/Shenzhen/SZTH-001/2020__EPI_ISL_406592 spike protein (1-1211)(F970C_G999C) Ferritin construct
MFVFLVLLPLVSSQCVNLTTRTQLPPAYTNSFTRGVYYPDKVFRSSVLHSTQDLFLPFFSNVTWFHAIHVSGTNGTKRFDNPVLPFNDGVYFASTEKSNIIRGWIFGTTLDSKTQSLLIVNNATNVVIKVCEFQFCNDPFLGVYYHKNNKSWMESEFRVYSSANNCTFEYVSQPFLMDLEGKQGNFKNLREFVFKNIDGYFKIYSKHTPINLVRDLPQGFSALEPLVDLPIGINITRFQTLLALHRSYLTPGDSSSGWTAGAAAYYVGYLQPRTFLLKYNENGTITDAVDCALDPLSETKCTLKSFTVEKGIYQTSNFRVQPTESIVRFPNITNLCPFGEVFNATRFASVYAWNRKRISNCVADYSVLYNSASFSTFKCYGVSPTKLNDLCFTNVYADSFVIRGDEVRQIAPGQTGKIADYNYKLPDDFTGCVIAWNSNNLDSKVGGNYNYLYRLFRKSNLKPFERDISTEIYQAGSTPCNGVEGFNCYFPLQSYGFQPTNGVGYQPYRVVVLSFELLHAPATVCGPKKSTNLVKNKCVNFNFNGLTGTGVLTESNKKFLPFQQFGRDIADTTDAVRDPQTLEILDITPCSFGGVSVITPGTNTSNQVAVLYQDVNCTEVPVAIHADQLTPTWRVYSTGSNVFQTRAGCLIGAEHVNNSYECDIPIGAGICASYQTQTNSPRRARSVASQSIIAYTMSLGAENSVAYSNNSIAIPTNFTISVTTEILPVSMTKTSVDCTMYICGDSTECSNLLLQYGSFCTQLNRALTGIAVEQDKNTQEVFAQVKQIYKTPPIKDFGGFNFSQILPDPSKPSKRSFIEDLLFNKVTLADAGFIKQYGDCLGDIAARDLICAQKFNGLTVLPPLLTDEMIAQYTSALLAGTITSGWTFGAGAALQIPFAMQMAYRFNGIGVTQNVLYENQKLIANQFNSAIGKIQDSLSSTASALGKLQDVVNQNAQALNTLVKQLSSNCGAISSVLNDILSRLDKVEAEVQIDRLITCRLQSLQTYVTQQLIRAAEIRASANLAATKMSECVLGQSKRVDFCGKGYHLMSFPQSAPHGVVFLHVTYVPAQEKNFTTAPAICHDGKAHFPREGVFVSNGTHWFVTQRNFYEPQIITTDNTFVSGNCDVLIGIVNNTVYDPLQPELDSFKEELDKYFKNHTSPDVDLGDISGINASVVNIQKEIDRLNEVAKNLNESLIDLQELGKYEQYIKGGGGSDIIKLLNEQVNKEMQSSNLYMSMSSWCYTHSLDGAGLFLFDHAAEEYEHAKKLIIFLNENNVPVQLTSISAPEHKFEGLTQIFQKAYEHEQHISESINNIVDHAIKSKDHATFNFLQWYVAEQHEEEVLFKDILDKIELIGNENHGLYLADQYVKGIAKSRKS

SEQ ID NO: 5371 - protein, 1379 aa, Artificial Sequence
  SARS-CoV-2/Shenzhen/SZTH-004/2020__EPI_ISL_406595 spike protein (1-1211)(F970C_G999C) Ferritin construct
MFVFLVLLPLVSSQCVNLTTRTQLPPAYTNSFTRGVYYPDKVFRSSVLHSTQDLFLPFFSNVTWFHAIHVSGTNGTKRFDNPVLPFNDGVYFASTEKSNIIRGWIFGTTLDSKTQSLLIVNNATNVVIKVCEFQFCNDPFLGVYYHKNNKSWMESEFRVYSSANNCTFEYVSQPFLMDLEGKQGNFKNLREFVFKNIDGYFKIYSKHTPINLVRDLPQGFSALEPLVDLPIGINITRFQTLLALHRSYLTPGDSSSGWTAGAAAYYVGYLQPRTFLLKYNENGTITDAVDCALDPLSETKCTLKSFTVEKGIYQTSNFRVQPTESIVRFPNITNLCPFGEVFNATRFASVYAWDRKRISNCVAYYSVLYNSASFSTFKCYGVSPTKLNDLCFTNVYADSFVIRGDEVRQIAPGQTGKIADYNYKLPDDFTGCVIAWNSNNLDSKVGGNYNYLYRLFRKSNLKPFERDISTEIYQAGSTPCNGVEGFNCYFPLQSYGFQPTNGVGYQPYRVVVLSFELLHAPATVCGPKKSTNLVKNKCVNFNFNGLTGTGVLTESNKKFLPFQQFGRDIADTTDAVRDPQTLEILDITPCSFGGVSVITPGTNTSNQVAVLYQDVNCTEVPVAIHADQLTPTWRVYSTGSNVFQTRAGCLIGAEHVNNSYECDIPIGAGICASYQTQTNSPRRARSVASQSIIAYTMSLGAENSVAYSNNSIAIPTNFTISVTTEILPVSMTKTSVDCTMYICGDSTECSNLLLQYGSFCTQLNRALTGIAVEQDKNTQEVFAQVKQIYKTPPIKDFGGFNFSQILPDPSKPSKRSFIEDLLFNKVTLADAGFIKQYGDCLGDIAARDLICAQKFNGLTVLPPLLTDEMIAQYTSALLAGTITSGWTFGAGAALQIPFAMQMAYRFNGIGVTQNVLYENQKLIANQFNSAIGKIQDSLSSTASALGKLQDVVNQNAQALNTLVKQLSSNCGAISSVLNDILSRLDKVEAEVQIDRLITCRLQSLQTYVTQQLIRAAEIRASANLAATKMSECVLGQSKRVDFCGKGYHLMSFPQSAPHGVVFLHVTYVPAQEKNFTTAPAICHDGKAHFPREGVFVSNGTHWFVTQRNFYEPQIITTDNTFVSGNCDVVIGIVNNTVYDPLQPELDSFKEELDKYFKNHTSPDVDLGDISGINASVVNIQKEIDRLNEVAKNLNESLIDLQELGKYEQYIKGGGGSDIIKLLNEQVNKEMQSSNLYMSMSSWCYTHSLDGAGLFLFDHAAEEYEHAKKLIIFLNENNVPVQLTSISAPEHKFEGLTQIFQKAYEHEQHISESINNIVDHAIKSKDHATFNFLQWYVAEQHEEEVLFKDILDKIELIGNENHGLYLADQYVKGIAKSRKS

SEQ ID NO: 5372 - protein, 1379 aa, Artificial Sequence
  SARS-CoV-2/France/IDF0372/2020__EPI_ISL_406596 spike protein (1-1211)(F970C_G999C) Ferritin construct
MFVFLVLLPLVSSQCVNLTTRTQLPPAYTNSFTRGVYYPDKVFRSSVLHSTQDLFLPFFSNVTWFHAIHVSGTNGTKRFDNPVLPFNDGVYFASTEKSNIIRGWIFGTTLDSKTQSLLIVNNATNVVIKVCEFQFCNDPFLGVYYHKNNKSWMESEFRVYSSANNCTFEYVSQPFLMDLEGKQGNFKNLREFVFKNIDGYFKIYSKHTPINLVRDLPQGFSALEPLVDLPIGINITRFQTLLALHRSYLTPGDSSSGWTAGAAAYYVGYLQPRTFLLKYNENGTITDAVDCALDPLSETKCTLKSFTVEKGIYQTSNFRVQPTESIVRFPNITNLCPFGEVFNATRFASVYAWNRKRISNCVADYSFLYNSASFSTFKCYGVSPTKLNDLCFTNVYADSFVIRGDEVRQIAPGQTGKIADYNYKLPDDFTGCVIAWNSNNLDSKVGGNYNYLYRLFRKSNLKPFERDISTEIYQAGSTPCNGVEGFNCYFPLQSYGFQPTNGVGYQPYRVVVLSFELLHAPATVCGPKKSTNLVKNKCVNFNFNGLTGTGVLTESNKKFLPFQQFGRDIADTTDAVRDPQTLEILDITPCSFGGVSVITPGTNTSNQVAVLYQDVNCTEVPVAIHADQLTPTWRVYSTGSNVFQTRAGCLIGAEHVNNSYECDIPIGAGICASYQTQTNSPRRARSVASQSIIAYTMSLGAENSVAYSNNSIAIPTNFTISVTTEILPVSMTKTSVDCTMYICGDSTECSNLLLQYGSFCTQLNRALTGIAVEQDKNTQEVFAQVKQIYKTPPIKDFGGFNFSQILPDPSKPSKRSFIEDLLFNKVTLADAGFIKQYGDCLGDIAARDLICAQKFNGLTVLPPLLTDEMIAQYTSALLAGTITSGWTFGAGAALQIPFAMQMAYRFNGIGVTQNVLYENQKLIANQFNSAIGKIQDSLSSTASALGKLQDVVNQNAQALNTLVKQLSSNCGAISSVLNDILSRLDKVEAEVQIDRLITCRLQSLQTYVTQQLIRAAEIRASANLAATKMSECVLGQSKRVDFCGKGYHLMSFPQSAPHGVVFLHVTYVPAQEKNFTTAPAICHDGKAHFPREGVFVSNGTHWFVTQRNFYEPQIITTDNTFVSGNCDVVIGIVNNTVYDPLQPELDSFKEELDKYFKNHTSPDVDLGDISGINASVVNIQKEIDRLNEVAKNLNESLIDLQELGKYEQYIKGGGGSDIIKLLNEQVNKEMQSSNLYMSMSSWCYTHSLDGAGLFLFDHAAEEYEHAKKLIIFLNENNVPVQLTSISAPEHKFEGLTQIFQKAYEHEQHISESINNIVDHAIKSKDHATFNFLQWYVAEQHEEEVLFKDILDKIELIGNENHGLYLADQYVKGIAKSRKS

SEQ ID NO: 5373 - protein, 1379 aa, Artificial Sequence
  SARS-CoV-2/Australia/VIC01/2020__EPI_ISL_406844 spike protein (1-1211)(F970C_G999C) Ferritin construct
MFVFLVLLPLVSSQCVNLTTRTQLPPAYTNSFTRGVYYPDKVFRSSVLHSTQDLFLPFFSNVTWFHAIHVSGTNGTKRFDNPVLPFNDGVYFASTEKSNIIRGWIFGTTLDSKTQSLLIVNNATNVVIKVCEFQFCNDPFLGVYYHKNNKSWMESEFRVYSSANNCTFEYVSQPFLMDLEGKQGNFKNLREFVFKNIDGYFKIYSKHTPINLVRDLPQGFSALEPLVDLPIGINITRFQTLLALHRRYLTPGDSSSGWTAGAAAYYVGYLQPRTFLLKYNENGTITDAVDCALDPLSETKCTLKSFTVEKGIYQTSNFRVQPTESIVRFPNITNLCPFGEVFNATRFASVYAWNRKRISNCVADYSVLYNSASFSTFKCYGVSPTKLNDLCFTNVYADSFVIRGDEVRQIAPGQTGKIADYNYKLPDDFTGCVIAWNSNNLDSKVGGNYNYLYRLFRKSNLKPFERDISTEIYQAGSTPCNGVEGFNCYFPLQSYGFQPTNGVGYQPYRVVVLSFELLHAPATVCGPKKSTNLVKNKCVNFNFNGLTGTGVLTESNKKFLPFQQFGRDIADTTDAVRDPQTLEILDITPCSFGGVSVITPGTNTSNQVAVLYQDVNCTEVPVAIHADQLTPTWRVYSTGSNVFQTRAGCLIGAEHVNNSYECDIPIGAGICASYQTQTNSPRRARSVASQSIIAYTMSLGAENSVAYSNNSIAIPTNFTISVTTEILPVSMTKTSVDCTMYICGDSTECSNLLLQYGSFCTQLNRALTGIAVEQDKNTQEVFAQVKQIYKTPPIKDFGGFNFSQILPDPSKPSKRSFIEDLLFNKVTLADAGFIKQYGDCLGDIAARDLICAQKFNGLTVLPPLLTDEMIAQYTSALLAGTITSGWTFGAGAALQIPFAMQMAYRFNGIGVTQNVLYENQKLIANQFNSAIGKIQDSLSSTASALGKLQDVVNQNAQALNTLVKQLSSNCGAISSVLNDILSRLDKVEAEVQIDRLITCRLQSLQTYVTQQLIRAAEIRASANLAATKMSECVLGQSKRVDFCGKGYHLMSFPQSAPHGVVFLHVTYVPAQEKNFTTAPAICHDGKAHFPREGVFVSNGTHWFVTQRNFYEPQIITTDNTFVSGNCDVVIGIVNNTVYDPLQPELDSFKEELDKYFKNHTSPDVDLGDISGINASVVNIQKEIDRLNEVAKNLNESLIDLQELGKYEQYIKGGGGSDIIKLLNEQVNKEMQSSNLYMSMSSWCYTHSLDGAGLFLFDHAAEEYEHAKKLIIFLNENNVPVQLTSISAPEHKFEGLTQIFQKAYEHEQHISESINNIVDHAIKSKDHATFNFLQWYVAEQHEEEVLFKDILDKIELIGNENHGLYLADQYVKGIAKSRKS

SEQ ID NO: 5374 - protein, 1379 aa, Artificial Sequence
  SARS-CoV-2/Germany/BavPat1/2020__EPI_ISL_406862 spike protein (1-1211)(F970C_G999C) Ferritin construct
MFVFLVLLPLVSSQCVNLTTRTQLPPAYTNSFTRGVYYPDKVFRSSVLHSTQDLFLPFFSNVTWFHAIHVSGTNGTKRFDNPVLPFNDGVYFASTEKSNIIRGWIFGTTLDSKTQSLLIVNNATNVVIKVCEFQFCNDPFLGVYYHKNNKSWMESEFRVYSSANNCTFEYVSQPFLMDLEGKQGNFKNLREFVFKNIDGYFKIYSKHTPINLVRDLPQGFSALEPLVDLPIGINITRFQTLLALHRSYLTPGDSSSGWTAGAAAYYVGYLQPRTFLLKYNENGTITDAVDCALDPLSETKCTLKSFTVEKGIYQTSNFRVQPTESIVRFPNITNLCPFGEVFNATRFASVYAWNRKRISNCVADYSVLYNSASFSTFKCYGVSPTKLNDLCFTNVYADSFVIRGDEVRQIAPGQTGKIADYNYKLPDDFTGCVIAWNSNNLDSKVGGNYNYLYRLFRKSNLKPFERDISTEIYQAGSTPCNGVEGFNCYFPLQSYGFQPTNGVGYQPYRVVVLSFELLHAPATVCGPKKSTNLVKNKCVNFNFNGLTGTGVLTESNKKFLPFQQFGRDIADTTDAVRDPQTLEILDITPCSFGGVSVITPGTNTSNQVAVLYQGVNCTEVPVAIHADQLTPTWRVYSTGSNVFQTRAGCLIGAEHVNNSYECDIPIGAGICASYQTQTNSPRRARSVASQSIIAYTMSLGAENSVAYSNNSIAIPTNFTISVTTEILPVSMTKTSVDCTMYICGDSTECSNLLLQYGSFCTQLNRALTGIAVEQDKNTQEVFAQVKQIYKTPPIKDFGGFNFSQILPDPSKPSKRSFIEDLLFNKVTLADAGFIKQYGDCLGDIAARDLICAQKFNGLTVLPPLLTDEMIAQYTSALLAGTITSGWTFGAGAALQIPFAMQMAYRFNGIGVTQNVLYENQKLIANQFNSAIGKIQDSLSSTASALGKLQDVVNQNAQALNTLVKQLSSNCGAISSVLNDILSRLDKVEAEVQIDRLITCRLQSLQTYVTQQLIRAAEIRASANLAATKMSECVLGQSKRVDFCGKGYHLMSFPQSAPHGVVFLHVTYVPAQEKNFTTAPAICHDGKAHFPREGVFVSNGTHWFVTQRNFYEPQIITTDNTFVSGNCDVVIGIVNNTVYDPLQPELDSFKEELDKYFKNHTSPDVDLGDISGINASVVNIQKEIDRLNEVAKNLNESLIDLQELGKYEQYIKGGGGSDIIKLLNEQVNKEMQSSNLYMSMSSWCYTHSLDGAGLFLFDHAAEEYEHAKKLIIFLNENNVPVQLTSISAPEHKFEGLTQIFQKAYEHEQHISESINNIVDHAIKSKDHATFNFLQWYVAEQHEEEVLFKDILDKIELIGNENHGLYLADQYVKGIAKSRKS

SEQ ID NO: 5375 - protein, 1379 aa, Artificial Sequence
  SARS-CoV-2/Wuhan/HBCDC-HB-02/2020__EPI_ISL_412978 spike protein (1-1211)(F970C_G999C) Ferritin construct
MFVFLVLLPLVSSQCVNLTTRTQLPPAYTNSFTRGVYYPDKVFRSSVLHSTQDLFLPFFSNVTWFHAIHVSGTNGTKRFDNPVLPFNDGVYFASTEKSNIIRGWIFGTTLDSKTQSLLIVNNATNVVIKVCEFQFCNDPFLGVYYHKNNKSWMESEFRVYSSANNCTFEYVSQPFLMDLEGKQGNFKNLREFVFKNIDGYFKIYSKHTPINLVRDLPQGFSALEPLVDLPIGINITRFQTLLALHRSYLTPGDSSSGWTAGAAAYYVGYLQPRTFLLKYNENGTITDAVDCALDPLSETKCTLKSFTVEKGIYQTSNFRVQPTESIVRFPNITNLCPFGEVFNATRFASVYAWNRKRISNCVADYSVLYNSASFSTFKCYGVSPTKLNDLCFTNVYADSFVIRGDEVRQIAPGQTGKIADYNYKLPDDFTGCVIAWNSNNLDSKVGGNYNYLYRLFRKSNLKPFERDISTEIYQAGSTPCNGVEGFNCYFPLQSYGFQPTNGVGYQPYRVVVLSFELLHAPATVCGPKKSTNLVKNKCVNFNFNGLTGTGVLTESNKKFLPFQQFGRDIADTTDAVRDPQTLEILDITPCSFGGVSVITPGTNTSNQVAVLYQDVNCTEVPVAIHADQLTPTWRVYSTGSNVFQTRAGCLIGAEHVNNSYECDIPIGAGICASYQTQTNSPRRARSVASQSIIAYTMSLGAENSVAYSNNSIAIPTNFTISVTTEILPVSMTKTSVDCTMYICGDSTECSNFLLQYGSFCTQLNRALTGIAVEQDKNTQEVFAQVKQIYKTPPIKDFGGFNFSQILPDPSKPSKRSFIEDLLFNKVTLADAGFIKQYGDCLGDIAARDLICAQKFNGLTVLPPLLTDEMIAQYTSALLAGTITSGWTFGAGAALQIPFAMQMAYRFNGIGVTQNVLYENQKLIANQFNSAIGKIQDSLSSTASALGKLQDVVNQNAQALNTLVKQLSSNCGAISSVLNDILSRLDKVEAEVQIDRLITCRLQSLQTYVTQQLIRAAEIRASANLAATKMSECVLGQSKRVDFCGKGYHLMSFPQSAPHGVVFLHVTYVPAQEKNFTTAPAICHDGKAHFPREGVFVSNGTHWFVTQRNFYEPQIITTDNTFVSGNCDVVIGIVNNTVYDPLQPELDSFKEELDKYFKNHTSPDVDLGDISGINASVVNIQKEIDRLNEVAKNLNESLIDLQELGKYEQYIKGGGGSDIIKLLNEQVNKEMQSSNLYMSMSSWCYTHSLDGAGLFLFDHAAEEYEHAKKLIIFLNENNVPVQLTSISAPEHKFEGLTQIFQKAYEHEQHISESINNIVDHAIKSKDHATFNFLQWYVAEQHEEEVLFKDILDKIELIGNENHGLYLADQYVKGIAKSRKS

SEQ ID NO: 5376 - protein, 1379 aa, Artificial Sequence
  SARS-CoV-2/Australia/QLD02/2020__EPI_ISL_407896 spike protein (1-1211)(F970C_G999C) Ferritin construct
MFVFLVLLPLVSSQCVNLTTRTQLPPAYTNSFTRGVYYPDKVFRSSVLHSTQDLFLPFFSNVTWFHAIHVSGTNGTKRFDNPVLPFNDGVYFASTEKSNIIRGWIFGTTLDSKTQSLLIVNNATNVVIKVCEFQFCNDPFLGVYYHKNNKSWMESEFRVYSSANNCTFEYVSQPFLMDLEGKQGNFKNLREFVFKNIDGYFKIYSKHTPINLVRDLPQGFSALEPLVDLPIGINITRFQTLLALHRSYLTPGDSSSGWTAGAAAYYVGYLQPRTFLLKYNENGTITDAVDCALDPLSETKCTLKSFTVEKGIYQTSNFRVQPTESIVRFPNITNLCPFGEVFNATRFASVYAWNRKRISNCVADYSVLYNSASFSTFKCYGVSPTKLNDLCFTNVYADSFVIRGDEVRQIAPGQTGKIADYNYKLPDDFTGCVIAWNSNNLDSKVGGNYNYLYRLFRKSNLKPFERDISTEIYQAGSTPCNGVEGFNCYFPLQSYGFQPTNGVGYQPYRVVVLSFELLHAPATVCGPKKSTNLVKNKCVNFNFNGLTGTGVLTESNKKFLPFQQFGRDIADTTDAVRDPQTLEILDITPCSFGGVSVITPGTNTSNQVAVLYQDVNCTEVPVAIHADQLTPTWRVYSTGSNVFQTRAGCLIGAEHVNNSYECDIPIGAGICASYQTQTNSPRRARSVASQSIIAYTMSLGAENSVAYSNNSIAIPTNFTISVTTEILPVSMTKTSVDCTMYICGDSTECSNLLLQYGSFCTQLNRALTGIAVEQDKNTQEVFAQVKQIYKTPPIKDFGGFNFSQILPDPSKPSKRSFIEDLLFNKVTLADAGFIKQYGDCLGDIAARDLICAQKFNGLTVLPPLLTDEMIAQYTSALLAGTITSGWTFGAGAALQIPFAMQMAYRFNGIGVTQNVLYENQKLIANQFNSAIGKIQDSLSSTASALGKLQDVVNQNAQALNTLVKQLSSNCGAISSVLNDILSRLDKVEAEVQIDRLITCRLQSLQTYVTQQLIRAAEIRASANLAATKMSECVLGQSKRVDFCGKGYHLMSFPQSAPHGVVFLHVTYVPAQEKNFTTAPAICHDGKAHFPREGVFVSNGTHWFVTQRNFYEPQIITTDNTFVSGNCDVVIGIVNNTVYDPLQLELDSFKEELDKYFKNHTSPDVDLGDISGINASVVNIQKEIDRLNEVAKNLNESLIDLQELGKYEQYIKGGGGSDIIKLLNEQVNKEMQSSNLYMSMSSWCYTHSLDGAGLFLFDHAAEEYEHAKKLIIFLNENNVPVQLTSISAPEHKFEGLTQIFQKAYEHEQHISESINNIVDHAIKSKDHATFNFLQWYVAEQHEEEVLFKDILDKIELIGNENHGLYLADQYVKGIAKSRKS

SEQ ID NO: 5377 - protein, 1379 aa, Artificial Sequence
  SARS-CoV-2/India/1-31/2020__EPI_ISL_413523 spike protein (1-1211)(F970C_G999C) Ferritin construct
MFVFLVLLPLVSSQCVNLTTRTQLPPAYTNSFTRGVYYPDKVFRSSVLHSTQDLFLPFFSNVTWFHAIHVSGTNGTKRFDNPVLPFNDGVYFASTEKSNIIRGWIFGTTLDSKTQSLLIVNNATNVVIKVCEFQFCNDPFLGVYYHKNNKSWMESEFRVYSSANNCTFEYVSQPFLMDLEGKQGNFKNLREFVFKNIDGYFKIYSKHTPINLVRDLPQGFSALEPLVDLPIGINITRFQTLLALHRSYLTPGDSSSGWTAGAAAYYVGYLQPRTFLLKYNENGTITDAVDCALDPLSETKCTLKSFTVEKGIYQTSNFRVQPTESIVRFPNITNLCPFGEVFNATRFASVYAWNRKRISNCVADYSVLYNSASFSTFKCYGVSPTKLNDLCFTNVYADSFVIRGDEVRQIAPGQTGKIADYNYKLPDDFTGCVIAWNSNNLDSKVGGNYNYLYRLFRKSNLKPFERDISTEIYQAGSTPCNGVEGFNCYFPLQSYGFQPTNGVGYQPYRVVVLSFELLHAPATVCGPKKSTNLVKNKCVNFNFNGLTGTGVLTESNKKFLPFQQFGRDIADTTDAVRDPQTLEILDITPCSFGGVSVITPGTNTSNQVAVLYQDVNCTEVPVAIHADQLTPTWRVYSTGSNVFQTRAGCLIGAEHVNNSYECDIPIGAGICASYQTQTNSPRRARSVASQSIIAYTMSLGAENSVAYSNNSIAIPTNFTISVTTEILPVSMTKTSVDCTMYICGDSTECSNLLLQYGSFCTQLNRALTGIAVEQDKNTQEVFAQVKQIYKTPPIKDFGGFNFSQILPDPSKPSKRSFIEDLLFNKVTLADAGFIKQYGDCLGDIAARDLICAQKFNGLTVLPPLLTDEMIAQYTSALLAGTITSGWTFGAGAALQIPFAMQMAYRFNGIGVTQNVLYENQKLIANQFNSVIGKIQDSLSSTASALGKLQDVVNQNAQALNTLVKQLSSNCGAISSVLNDILSRLDKVEAEVQIDRLITCRLQSLQTYVTQQLIRAAEIRASANLAATKMSECVLGQSKRVDFCGKGYHLMSFPQSAPHGVVFLHVTYVPAQEKNFTTAPAICHDGKAHFPREGVFVSNGTHWFVTQRNFYEPQIITTDNTFVSGNCDVVIGIVNNTVYDPLQPELDSFKEELDKYFKNHTSPDVDLGDISGINASVVNIQKEIDRLNEVAKNLNESLIDLQELGKYEQYIKGGGGSDIIKLLNEQVNKEMQSSNLYMSMSSWCYTHSLDGAGLFLFDHAAEEYEHAKKLIIFLNENNVPVQLTSISAPEHKFEGLTQIFQKAYEHEQHISESINNIVDHAIKSKDHATFNFLQWYVAEQHEEEVLFKDILDKIELIGNENHGLYLADQYVKGIAKSRKS

SEQ ID NO: 5378 - protein, 1379 aa, Artificial Sequence
  SARS-CoV-2/Guangdong/GD2020087-P0008/2020__EPI_ISL_413863 spike protein (1-1211)(F970C_G999C) Ferritin construct
MFVFLVLLPLVSSQCVNLTTRTQLPPAYTNSFTRGVYYPDKVFRSSVLHSTQDLFLPFFSNVTWFHAIHVSGTNGTKRFDNPVLPFNDGVYFASTEKSNIIRGWIFGTTLDSKTQSLLIVNNATNVVIKVCEFQFCNDPFLGVYYHKNNKSWMESEFRVYSSANNCTFEYVSQPFLMDLEGKQGNFKNLREFVFKNIDGYFKIYSKHTPINLVRDLPQGFSALEPLVDLPIGINITRFQTLLALHRSYLTPGDSSSGWTAGAAAYYVGYLQPRTFLLKYNENGTITDAVDCALDPLSETKCTLKSFTVEKGIYQTSNFRVQPTESIVRFPNITNLCPFGEVFNATRFASVYAWNRKRISNCVADYSVLYNSASFSTFKCYGVSPTKLNDLCFTNVYADSFVIRGDEVREIAPGQTGKIADYNYKLPDDFTGCVIAWNSNNLDSKVGGNYNYLYRLFRKSNLKPFERDISTEIYQAGSTPCNGVEGFNCYFPLQSYGFQPTNGVGYQPYRVVVLSFELLHAPATVCGPKKSTNLVKNKCVNFNFNGLTGTGVLTESNKKFLPFQQFGRDIADTTDAVRDPQTLEILDITPCSFGGVSVITPGTNTSNQVAVLYQDVNCTEVPVAIHADQLTPTWRVYSTGSNVFQTRAGCLIGAEHVNNSYECDIPIGAGICASYQTQTNSPRRARSVASQSIIAYTMSLGAENSVAYSNNSIAIPTNFTISVTTEILPVSMTKTSVDCTMYICGDSTECSNLLLQYGSFCTQLNRALTGIAVEQDKNTQEVFAQVKQIYKTPPIKDFGGFNFSQILPDPSKPSKRSFIEDLLFNKVTLADAGFIKQYGDCLGDIAARDLICAQKFNGLTVLPPLLTDEMIAQYTSALLAGTITSGWTFGAGAALQIPFAMQMAYRFNGIGVTQNVLYENQKLIANQFNSAIGKIQDSLSSTASALGKLQDVVNQNAQALNTLVKQLSSNCGAISSVLNDILSRLDKVEAEVQIDRLITCRLQSLQTYVTQQLIRAAEIRASANLAATKMSECVLGQSKRVDFCGKGYHLMSFPQSAPHGVVFLHVTYVPAQEKNFTTAPAICHDGKAHFPREGVFVSNGTHWFVTQRNFYEPQIITTDNTFVSGNCDVVIGIVNNTVYDPLQPELDSFKEELDKYFKNHTSPDVDLGDISGINASVVNIQKEIDRLNEVAKNLNESLIDLQELGKYEQYIKGGGGSDIIKLLNEQVNKEMQSSNLYMSMSSWCYTHSLDGAGLFLFDHAAEEYEHAKKLIIFLNENNVPVQLTSISAPEHKFEGLTQIFQKAYEHEQHISESINNIVDHAIKSKDHATFNFLQWYVAEQHEEEVLFKDILDKIELIGNENHGLYLADQYVKGIAKSRKS

SEQ ID NO: 5379 - protein, 1379 aa, Artificial Sequence
  SARS-CoV-2/Sweden/01/2020__EPI_ISL_411951 spike protein (1-1211)(F970C_G999C) Ferritin construct
MFVFLVLLPLVSSQCVNLTTRTQLPPAYTNSFTRGVYYPDKVFRSSVLHSTQDLFLPFFSNVTWFHAIHVSGTNGTKRFDNPVLPFNDGVYFASTEKSNIIRGWIFGTTLDSKTQSLLIVNNATNVVIKVCEFQFCNDPFLGVYYHKNNKSWMESEFRVYSSANNCTFEYVSQPFLMDLEGKQGNFKNLREFVFKNIDGYFKIYSKHTPINLVRDLPQGFSALEPLVDLPIGINITRFQTLLALHRSYLTPGDSSSGWTAGAAAYYVGYLQPRTFLLKYNENGTITDAVDCALDPLSETKCTLKSFTVEKGIYQTSNFRVQPTESIVRFPNITNLCPFGEVFNATRFASVYAWNRKRISNCVADYSVLYNSASFSTFKCYGVSPTKLNDLCFTNVYADSFVIRGDEVRQIAPGQTGKIADYNYKLPDDFTGCVIAWNSNNLDSKVGGNYNYLYRLFRKSNLKPFERDISTEIYQAGSTPCNGVEGFNCYFPLQSYGFQPTNGVGYQPYRVVVLSFELLHAPATVCGPKKSTNLVKNKCVNFNFNGLTGTGVLTESNKKFLPFQQFGRDIADTTDAVRDPQTLEILDITPCSFGGVSVITPGTNTSNQVAVLYQDVNCTEVPVAIHADQLTPTWRVYSTGSNVFQTRAGCLIGAEHVNNSYECDIPIGAGICASYQTQTNSPRRARSVASQSIIAYTMSLGAENSVAYSNNSIAIPTNFTISVTTEILPVSMTKTSVDCTMYICGDSTECSNLLLQYGSFCTQLNRALTGIAVEQDKNTQEVFAQVKQIYKTPPIKDCGGFNFSQILPDPSKPSKRSFIEDLLFNKVTLADAGFIKQYGDCLGDIAARDLICAQKFNGLTVLPPLLTDEMIAQYTSALLAGTITSGWTFGAGAALQIPFAMQMAYRFNGIGVTQNVLYENQKLIANQFNSAIGKIQDSLSSTASALGKLQDVVNQNAQALNTLVKQLSSNCGAISSVLNDILSRLDKVEAEVQIDRLITCRLQSLQTYVTQQLIRAAEIRASANLAATKMSECVLGQSKRVDFCGKGYHLMSFPQSAPHGVVFLHVTYVPAQEKNFTTAPAICHDGKAHFPREGVFVSNGTHWFVTQRNFYEPQIITTDNTFVSGNCDVVIGIVNNTVYDPLQPELDSFKEELDKYFKNHTSPDVDLGDISGINASVVNIQKEIDRLNEVAKNLNESLIDLQELGKYEQYIKGGGGSDIIKLLNEQVNKEMQSSNLYMSMSSWCYTHSLDGAGLFLFDHAAEEYEHAKKLIIFLNENNVPVQLTSISAPEHKFEGLTQIFQKAYEHEQHISESINNIVDHAIKSKDHATFNFLQWYVAEQHEEEVLFKDILDKIELIGNENHGLYLADQYVKGIAKSRKS

SEQ ID NO: 5380 - protein, 1379 aa, Artificial Sequence
  SARS-CoV-2/Tianmen/HBCDC-HB-07/2020__EPI_ISL_412983 spike protein (1-1211)(F970C_G999C) Ferritin construct
MFVFLVLLPLVSSQCVNLTTRTQLPPAYTNSFTRGVYYPDKVFRSSVLHSTQDLFLPFFSNVTWFHAIHVSGTNGTKRFDNPVLPFNDGVYFASTEKSNIIRGWIFGTTLDSKTQSLLIVNNATNVVIKVCEFQFCNDPFLGVYYHKNNKSWMESEFRVYSSANNCTFEYVSQPFLMDLEGKQGNFKNLREFVFKNIDGYFKIYSKHTPINLVRDLPQGFSALEPLVDLPIGINITRFQTLLALHRSYLTPGDSSSGWTAGAAAYYVGYLQPRTFLLKYNENGTITDAVDCALDPLSETKCTLKSFTVEKGIYQTSNFRVQPTESIVRFPNITNLCPFGEVFNATRFASVYAWNRKRISNCVADYSVLYNSASFSTFKCYGVSPTKLNDLCFTNVYADSFVIRGDEVRQIAPGQTGKIADYNYKLPDDFTGCVIAWNSNNLDSKVGGNYNYLYRLFRKSNLKPFERDISTEIYQAGSTPCNGVEGFNCYFPLQSYGFQPTNGVGYQPYRVVVLSFELLHAPATVCGPKKSTNLVKNKCVNFNFNGLTGTGVLTESNKKFLPFQQFGRDIADTTDAVRDPQTLEILDITPCSFGGVSVITPGTNTSNQVAVLYQDLNCTEVPVAIHADQLTPTWRVYSTGSNVFQTRAGCLIGAEHVNNSYECDIPIGAGICASYQTQTNSPRRARSVASQSIIAYTMSLGAENSVAYSNNSIAIPTNFTISVTTEILPVSMTKTSVDCTMYICGDSTECSNLLLQYGSFCTQLNRALTGIAVEQDKNTQEVFAQVKQIYKTPPIKDFGGFNFSQILPDPSKPSKRSFIEDLLFNKVTLADAGFIKQYGDCLGDIAARDLICAQKFNGLTVLPPLLTDEMIAQYTSALLAGTITSGWTFGAGAALQIPFAMQMAYRFNGIGVTQNVLYENQKLIANQFNSAIGKIQDSLSSTASALGKLQDVVNQNAQALNTLVKQLSSNCGAISSVLNDILSRLDKVEAEVQIDRLITCRLQSLQTYVTQQLIRAAEIRASANLAATKMSECVLGQSKRVDFCGKGYHLMSFPQSAPHGVVFLHVTYVPAQEKNFTTAPAICHDGKAHFPREGVFVSNGTHWFVTQRNFYEPQIITTDNTFVSGNCDVVIGIVNNTVYDPLQPELDSFKEELDKYFKNHTSPDVDLGDISGINASVVNIQKEIDRLNEVAKNLNESLIDLQELGKYEQYIKGGGGSDIIKLLNEQVNKEMQSSNLYMSMSSWCYTHSLDGAGLFLFDHAAEEYEHAKKLIIFLNENNVPVQLTSISAPEHKFEGLTQIFQKAYEHEQHISESINNIVDHAIKSKDHATFNFLQWYVAEQHEEEVLFKDILDKIELIGNENHGLYLADQYVKGIAKSRKS

SEQ ID NO: 5381 - protein, 1379 aa, Artificial Sequence
  SARS-CoV-2/Hong Kong/case42_VM20002493/2020__EPI_ISL_414527 spike protein (1-1211)(F970C_G999C) Ferritin construct
MFVFLVLLPLVSSQCVNLTTRTQLPPAYTNSFTRGVYYPDKVFRSSVLHSTQDLFLPFFSNVTWFHAIHVSGTNGTKRFDNPVLPFNDGVYFASTEKSNIIRGWIFGTTLDSKTQSLLIVNNATNVVIKVCEFQFCNDPFLGVYYHKNNKSWMESEFRVYSSANNCTFEYVSQPFLMDLEGKQGNFKNLREFVFKNIDGYFKIYSKHTPINLVRDLPQGFSALEPLVDLPIGINITRFQTLLALHRSYLTPGDSSSGWTAGAAAYYVGYLQPRTFLLKYNENGTITDAVDCALDPLSETKCTLKSFTVEKGIYQTSNFRVQPTESIVRFPNITNLCPFGEVFNATRFASVYAWNRKRISNCVADYSVLYNSASFSTFKCYGVSPTKLNDLCFTNVYADSFVIRGDEVRQIAPGQTGKIADYNYKLPDDFTGCVIAWNSNNLDSKVGGNYNYLYRLFRKSNLKPFERDISTEIYQAGSTPCNGVEGFNCYFPLQSYGFQPTNGVGYQPYRVVVLSFELLHAPATVCGPKKSTNLVKNKCVNFNFNGLTGTGVLTESNKKFLPFQQFGRDIADTTDAVRDPQTLEILDITPCSFGGVSVITPGTNTSNQVAVLYQDVNCTEVPVAIHADQLTPTWRVYSTGSNVFQTRAGCLIGAEHVNNSYECDIPIGAGICASYQTQTNSPRRARSVASQSIIAYTMSLGAENSVAYSNNSIAIPTNFAISVTTEILPVSMTKTSVDCTMYICGDSTECSNLLLQYGSFCTQLNRALTGIAVEQDKNTQEVFAQVKQIYKTPPIKDFGGFNFSQILPDPSKPSKRSFIEDLLFNKVTLADAGFIKQYGDCLGDIAARDLICAQKFNGLTVLPPLLTDEMIAQYTSALLAGTITSGWTFGAGAALQIPFAMQMAYRFNGIGVTQNVLYENQKLIANQFNSAIGKIQDSLSSTASALGKLQDVVNQNAQALNTLVKQLSSNCGAISSVLNDILSRLDKVEAEVQIDRLITCRLQSLQTYVTQQLIRAAEIRASANLAATKMSECVLGQSKRVDFCGKGYHLMSFPQSAPHGVVFLHVTYVPAQEKNFTTAPAICHDGKAHFPREGVFVSNGTHWFVTQRNFYEPQIITTDNTFVSGNCDVVIGIVNNTVYDPLQPELDSFKEELDKYFKNHTSPDVDLGDISGINASVVNIQKEIDRLNEVAKNLNESLIDLQELGKYEQYIKGGGGSDIIKLLNEQVNKEMQSSNLYMSMSSWCYTHSLDGAGLFLFDHAAEEYEHAKKLIIFLNENNVPVQLTSISAPEHKFEGLTQIFQKAYEHEQHISESINNIVDHAIKSKDHATFNFLQWYVAEQHEEEVLFKDILDKIELIGNENHGLYLADQYVKGIAKSRKS

SEQ ID NO: 5382 - protein, 1379 aa, Artificial Sequence
  SARS-CoV-2/USA/CruiseA-23/2020__EPI_ISL_414482 spike protein (1-1211)(F970C_G999C) Ferritin construct
MFVFLVLLPLVSSQCVNLTTRTQLPPAYTNSFTRGVYYPDKVFRSSVLHSTQDLFLPFFSNVTWFHAIHVSGTNGTKRFDNPVLPFNDGVYFASTEKSNIIRGWIFGTTLDSKTQSLLIVNNATNVVIKVCEFQFCNDPFLGVYYHKNNKSWMESEFRVYSSANNCTFEYVSQPFLMDLEVKQGNFKNLREFVFKNIDGYFKIYSKHTPINLVRDLPQGFSALEPLVDLPIGINITRFQTLLALHRSYLTPGDSSSGWTAGAAAYYVGYLQPRTFLLKYNENGTITDAVDCALDPLSETKCTLKSFTVEKGIYQTSNFRVQPTESIVRFPNITNLCPFGEVFNATRFASVYAWNRKRISNCVADYSVLYNSASFSTFKCYGVSPTKLNDLCFTNVYADSFVIRGDEVRQIAPGQTGKIADYNYKLPDDFTGCVIAWNSNNLDSKVGGNYNYLYRLFRKSNLKPFERDISTEIYQAGSTPCNGVEGFNCYFPLQSYGFQPTNGVGYQPYRVVVLSFELLHAPATVCGPKKSTNLVKNKCVNFNFNGLTGTGVLTESNKKFLPFQQFGRDIADTTDAVRDPQTLEILDITPCSFGGVSVITPGTNTSNQVAVLYQDVNCTEVPVAIHADQLTPTWRVYSTGSNVFQTRAGCLIGAEHVNNSYECDIPIGAGICASYQTQTNSPRRARSVASQSIIAYTMSLGAENSVAYSNNSIAIPTNFTISVTTEILPVSMTKTSVDCTMYICGDSTECSNLLLQYGSFCTQLNRALTGIAVEQDKNTQEVFAQVKQIYKTPPIKDFGGFNFSQILPDPSKPSKRSFIEDLLFNKVTLADAGFIKQYGDCLGDIAARDLICAQKFNGLTVLPPLLTDEMIAQYTSALLAGTITSGWTFGAGAALQIPFAMQMAYRFNGIGVTQNVLYENQKLIANQFNSAIGKIQDSLSSTASALGKLQDVVNQNAQALNTLVKQLSSNCGAISSVLNDILSRLDKVEAEVQIDRLITCRLQSLQTYVTQQLIRAAEIRASANLAATKMSECVLGQSKRVDFCGKGYHLMSFPQSAPHGVVFLHVTYVPAQEKNFTTAPAICHDGKAHFPREGVFVSNGTHWFVTQRNFYEPQIITTDNTFVSGNCDVVIGIVNNTVYDPLQPELDSFKEELDKYFKNHTSPDVDLGDISGINASVVNIQKEIDRLNEVAKNLNESLIDLQELGKYEQYIKGGGGSDIIKLLNEQVNKEMQSSNLYMSMSSWCYTHSLDGAGLFLFDHAAEEYEHAKKLIIFLNENNVPVQLTSISAPEHKFEGLTQIFQKAYEHEQHISESINNIVDHAIKSKDHATFNFLQWYVAEQHEEEVLFKDILDKIELIGNENHGLYLADQYVKGIAKSRKS

SEQ ID NO: 5383 - protein, 1379 aa, Artificial Sequence
  SARS-CoV-2/Hong Kong/case85_VM20002868/2020__EPI_ISL_414519 spike protein (1-1211)(F970C_G999C) Ferritin construct
MFVFLVLVPLVSSQCVNLTTRTQLPPAYTNSFTRGVYYPDKVFRSSVLHSTQDLFLPFFSNVTWFHAIHVSGTNGTKRFDNPVLPFNDGVYFASTEKSNIIRGWIFGTTLDSKTQSLLIVNNATNVVIKVCEFQFCNDPFLGVYYHKNNKSWMESEFRVYSSANNCTFEYVSQPFLMDLEGKQGNFKNLREFVFKNIDGYFKIYSKHTPINLVRDLPQGFSALEPLVDLPIGINITRFQTLLALHRSYLTPGDSSSGWTAGAAAYYVGYLQPRTFLLKYNENGTITDAVDCALDPLSETKCTLKSFTVEKGIYQTSNFRVQPTESIVRFPNITNLCPFGEVFNATRFASVYAWNRKRISNCVADYSVLYNSASFSTFKCYGVSPTKLNDLCFTNVYADSFVIRGDEVRQIAPGQTGKIADYNYKLPDDFTGCVIAWNSNNLDSKVGGNYNYLYRLFRKSNLKPFERDISTEIYQAGSTPCNGVEGFNCYFPLQSYGFQPTNGVGYQPYRVVVLSFELLHAPATVCGPKKSTNLVKNKCVNFNFNGLTGTGVLTESNKKFLPFQQFGRDIADTTDAVRDPQTLEILDITPCSFGGVSVITPGTNTSNQVAVLYQDVNCTEVPVAIHADQLTPTWRVYSTGSNVFQTRAGCLIGAEHVNNSYECDIPIGAGICASYQTQTNSPRRARSVASQSIIAYTMSLGAENSVAYSNNSIAIPTNFTISVTTEILPVSMTKTSVDCTMYICGDSTECSNLLLQYGSFCTQLNRALTGIAVEQDKNTQEVFAQVKQIYKTPPIKDFGGFNFSQILPDPSKPSKRSFIEDLLFNKVTLADAGFIKQYGDCLGDIAARDLICAQKFNGLTVLPPLLTDEMIAQYTSALLAGTITSGWTFGAGAALQIPFAMQMAYRFNGIGVTQNVLYENQKLIANQFNSAIGKIQDSLSSTASALGKLQDVVNQNAQALNTLVKQLSSNCGAISSVLNDILSRLDKVEAEVQIDRLITCRLQSLQTYVTQQLIRAAEIRASANLAATKMSECVLGQSKRVDFCGKGYHLMSFPQSAPHGVVFLHVTYVPAQEKNFTTAPAICHDGKAHFPREGVFVSNGTHWFVTQRNFYEPQIITTDNTFVSGNCDVVIGIVNNTVYDPLQPELDSFKEELDKYFKNHTSPDVDLGDISGINASVVNIQKEIDRLNEVAKNLNESLIDLQELGKYEQYIKGGGGSDIIKLLNEQVNKEMQSSNLYMSMSSWCYTHSLDGAGLFLFDHAAEEYEHAKKLIIFLNENNVPVQLTSISAPEHKFEGLTQIFQKAYEHEQHISESINNIVDHAIKSKDHATFNFLQWYVAEQHEEEVLFKDILDKIELIGNENHGLYLADQYVKGIAKSRKS

SEQ ID NO: 5384 - protein, 1379 aa, Artificial Sequence; identical to SEQ ID NO: 5374
  SARS-CoV-2/England/200990660/2020__EPI_ISL_414523 spike protein (1-1211)(F970C_G999C) Ferritin construct

SEQ ID NO: 5385 - protein, 1379 aa, Artificial Sequence
  SARS-CoV-2/Australia/NSW09/2020__EPI_ISL_413595 spike protein (1-1211)(F970C_G999C) Ferritin construct
MFVFLVLLPLVSSQCVNLTTRTQLPPAYTNSFTRGVYYPDKVFRSSVLHSTQDLFLPFFSNVTWFHAIHVSGTNGTKRFDNPVLPFNDGVYFASTEKSNIIRGWIFGTTLDSKTQSLLIVNNATNVVIKVCEFQFCNDPFLGVYYHKNNKSWMESEFRVYSSANNCTFEYVSQPFLMDLEGKQGNFKNLREFVFKNIDGYFKIYSKHTPINLVRDLPQGFSALEPLVDLPIGINITRFQTLLALHRSYLTPGDSSSGWTAGAAAYYVGYLQPRTFLLKYNENGTITDAVDCALDPLSETKCTLKSFTVEKGIYQTSNFRVQPTESIVRFPNITNLCPFGEVFNATRFASVYAWNRKRISNCVADYSVLYNSASFSTFKCYGVSPTKLNDLCFTNVYADSFVIRGDEVRQIAPGQTGKIADYNYKLPDDFTGCVIAWNSNNLDSKVGGNYNYLYRLFRKSNLKPFERDISTEIYQAGSTPCNGVEGFNCYFPLQSYGFQPTNGVGYQPYRVVVLSFELLHAPATVCGPKKSTNLVKNKCVNFNFNGLTGTGVLTESNKKFLPFQQFGRDIADTTDAVRDPQTLEILDITPCSFGGVSVITPGTNTSNQVAVLYQDVNCTEVPVAIHADQLTPTWRVYSTGSNVFQTRAGCLIGAEHVNNSYECDIPIGAGICASYQTQTNSPRRARSVASQSIIAYTMSLGAENSVAYSNNSIAIPTNFTISVTTEILPVSMTKTSVDCTMYICGDSTECSNLLLQYGSFCTQLNRALTGIAVEQDKNTQEVFAQVKQIYKTPPIKDFGGFNFSQILPDPSKPSKRSFIEDLLFNKVTLADAGFIKQYGDCLGDIAARDLICAQKFNGLTVLPPLLTDEMIAQYTSALLAGTITSGWTFGAGAALQIPFAMQMAYRFNGIGVTQNVLYENQKLIANQFNSAIGKIQDSLSFTASALGKLQDVVNQNAQALNTLVKQLSSNCGAISSVLNDILSRLDKVEAEVQIDRLITCRLQSLQTYVTQQLIRAAEIRASANLAATKMSECVLGQSKRVDFCGKGYHLMSFPQSAPHGVVFLHVTYVPAQEKNFTTAPAICHDGKAHFPREGVFVSNGTHWFVTQRNFYEPQIITTDNTFVSGNCDVVIGIVNNTVYDPLQPELDSFKEELDKYFKNHTSPDVDLGDISGINASVVNIQKEIDRLNEVAKNLNESLIDLQELGKYEQYIKGGGGSDIIKLLNEQVNKEMQSSNLYMSMSSWCYTHSLDGAGLFLFDHAAEEYEHAKKLIIFLNENNVPVQLTSISAPEHKFEGLTQIFQKAYEHEQHISESINNIVDHAIKSKDHATFNFLQWYVAEQHEEEVLFKDILDKIELIGNENHGLYLADQYVKGIAKSRKS

SEQ ID NO: 5386 - protein, 1379 aa, Artificial Sequence; identical to SEQ ID NO: 5366
  SARS-CoV-2/Australia/NSW10/2020__EPI_ISL_413596 spike protein (1-1211)(F970C_G999C) Ferritin construct

SEQ ID NO: 5387 - protein, 1379 aa, Artificial Sequence
  SARS-CoV-2/Switzerland/1000477797/2020__EPI_ISL_413023 spike protein (1-1211)(F970C_G999C) Ferritin construct
MFVFLVLLPLVSSQCVNLTTRTQLPPAYTNSFTRGVYYPDKVFRSSVLHSTQDLFLPFFSNVTWFHAIHVSGTNGTKRFDNPVLPFNDGVYFASTEKSNIIRGWIFGTTLDSKTQSLLIVNNATNVVIKVCEFQFCNDPFLGVYYHKNNKSWMESEFRVYSSANNCTFEYVSQPFLMDLEGKQGNFKNLREFVFKNIDGYFNIYSKHTPINLVRDLPQGFSALEPLVDLPIGINITRFQTLLALHRSYLTPGDSSSGWTAGAAAYYVGYLQPRTFLLKYNENGTITDAVDCALDPLSETKCTLKSFTVEKGIYQTSNFRVQPTESIVRFPNITNLCPFGEVFNATRFASVYAWNRKRISNCVADYSVLYNSASFSTFKCYGVSPTKLNDLCFTNVYADSFVIRGDEVRQIAPGQTGKIADYNYKLPDDFTGCVIAWNSNNLDSKVGGNYNYLYRLFRKSNLKPFERDISTEIYQAGSTPCNGVEGFNCYFPLQSYGFQPTNGVGYQPYRVVVLSFELLHAPATVCGPKKSTNLVKNKCVNFNFNGLTGTGVLTESNKKFLPFQQFGRDIADTTDAVRDPQTLEILDITPCSFGGVSVITPGTNTSNQVAVLYQGVNCTEVPVAIHADQLTPTWRVYSTGSNVFQTRAGCLIGAEHVNNSYECDIPIGAGICASYQTQTNSPRRARSVASQSIIAYTMSLGAENSVAYSNNSIAIPTNFTISVTTEILPVSMTKTSVDCTMYICGDSTECSNLLLQYGSFCTQLNRALTGIAVEQDKNTQEVFAQVKQIYKTPPIKDFGGFNFSQILPDPSKPSKRSFIEDLLFNKVTLADAGFIKQYGDCLGDIAARDLICAQKFNGLTVLPPLLTDEMIAQYTSALLAGTITSGWTFGAGAALQIPFAMQMAYRFNGIGVTQNVLYENQKLIANQFNSAIGKIQDSLSSTASALGKLQDVVNQNAQALNTLVKQLSSNCGAISSVLNDILSRLDKVEAEVQIDRLITCRLQSLQTYVTQQLIRAAEIRASANLAATKMSECVLGQSKRVDFCGKGYHLMSFPQSAPHGVVFLHVTYVPAQEKNFTTAPAICHDGKAHFPREGVFVSNGTHWFVTQRNFYEPQIITTDNTFVSGNCDVVIGIVNNTVYDPLQPELDSFKEELDKYFKNHTSPDVDLGDISGINASVVNIQKEIDRLNEVAKNLNESLIDLQELGKYEQYIKGGGGSDIIKLLNEQVNKEMQSSNLYMSMSSWCYTHSLDGAGLFLFDHAAEEYEHAKKLIIFLNENNVPVQLTSISAPEHKFEGLTQIFQKAYEHEQHISESINNIVDHAIKSKDHATFNFLQWYVAEQHEEEVLFKDILDKIELIGNENHGLYLADQYVKGIAKSRKS

SEQ ID NO: 5388 - protein, 1379 aa, Artificial Sequence
  SARS-CoV-2/Belgium/BA-02291/2020__EPI_ISL_415159 spike protein (1-1211)(F970C_G999C) Ferritin construct
MFVFLVLLPLVSSQCVNLTTRTQLPPAYTNSFTRGVYYPDKVFRSSVLHSTQDLFLPFFSNVTWFHAIHVSGTNGTKRFDNPVLPFNDGVYFASTEKSNIIRGWIFGTTLDSKTQSLLIVNNATNVVIKVCEFQFCNDPFLGVYYHKNNKSWMESEFRVYSSANNCTFEYVSQPFLMDLEGKQGNFKNLREFVFKNIDGYFKIYSKHTPINLVRDLPQGFSALEPLVDLPIGINITRFQTLLALHRSYLTPGDSSSGWTAGAAAYYVGYLQPRTFLLKYNENGTITDAVDCALDPLSETKCTLKSFTVEKGIYQTSNFRVQPTESIVRFPNITNLCPFGEVFNATRFASVYAWNRKRISNCVADYSVLYNSASFSTFKCYGVSPTKLNDLCFTNVYADSFVIRGDEVRQIAPGQTGKIADYNYKLPDDFTGCVIAWNSNNLDSKVGGNYNYLYRLFRRSNLKPFERDISTEIYQAGSTPCNGVEGFNCYFPLQSYGFQPTNGVGYQPYRVVVLSFELLPAPATVCGPKKSTNLVKNKCVNFNFNGLTGTGVLTESNKKFLPFQQFGRDIADTTDAVRDPQTLEILDITPCSFGGVSVITPGTNTSNQVAVLYQGVNCTEVPVAIHADQLTPTWRVYSTGSNVFQTRAGCLIGAEHVNNSYECDIPIGAGICASYQTQTNSPRRARSVASQSIIAYTMSLGAENSVAYSNNSIAIPTNFTISVTTEILPVSMTKTSVDCTMYICGDSTECSNLLLQYGSFCTQLNRALTGIAVEQDKNTQEVFAQVKQIYKTPPIKDFGGFNFSQILPDPSKPSKRSFIEDLLFNKVTLADAGFIKQYGDCLGDIAARDLICAQKFNGLTVLPPLLTDEMIAQYTSALLAGTITSGWTFGAGAALQIPFAMQMAYRFNGIGVTQNVLYENQKLIANQFNSAIGKIQDSLSSAAPALGKLQDVVNQNAQALNTLVKQLSSNCGAISSVLNDILSRLDKVEAEVQIDRLITCRLQSLQTYVTQQLIRAAEIRASANLAATKMSECVLGQSKRVDFCGKGYHLMSFPQSAPHGVVFLHVTYVPAQEKNFTTAPAICHDGKAHFPREGVFVSNGTHWFVTQRNFYEPQIITTDNTFVSGNCDVVIGIVNNTVYDPLQPELDSFKEELDKYFKNHTSPDVDLGDISGINASVVNIQKEIDRLNEVAKNLNESLIDLQELGKYEQYIKGGGGSDIIKLLNEQVNKEMQSSNLYMSMSSWCYTHSLDGAGLFLFDHAAEEYEHAKKLIIFLNENNVPVQLTSISAPEHKFEGLTQIFQKAYEHEQHISESINNIVDHAIKSKDHATFNFLQWYVAEQHEEEVLFKDILDKIELIGNENHGLYLADQYVKGIAKSRKS

SEQ ID NO: 5389 - protein, 1379 aa, Artificial Sequence
  SARS-CoV-2/USA/WA8-UW5/2020__EPI_ISL_413486 spike protein (1-1211)(F970C_G999C) Ferritin construct
MFVFLVLLPLVSSQCVNLTTRTQLPPAYTNSFTRGVYYPDKVFRSSVLHSTQDLFLPFFSNVTWFHAIHVSGTNGTKRFDNPVLPFNDGVYFASTEKSNIIRGWIFGTTLDSKTQSLLIVNNATNVVIKVCEFQFCNDPFLGVYYHKNNKSWMESEFRVYSSANNCTFEYVSQPFLMDLEGKQGNFKNLREFVFKNIDGYFKIYSKHTPINLVRDLPQGFSALEPLVDLPIGINITRFQTLLALHRSYLTPGDSSSGWTAGAAAYYVGYLQPRTFLLKYNENGTITDAVDCALDPLSETKCTLKSFTVEKGIYQTSNFRVQPTESIVRFPNITNLCPFGEVFNATRFASVYAWNRKRISNCVADYSVLYNSASFSTFKCYGVSPTKLNDLCFTNVYADSFVIRGDEVRQIAPGQTGKIADYNYKLPDDFTGCVIAWNSNNLDSKVGGNYNYLYRLFRKSNLKPFERDISTEIYQAGSTPCNGVEGFNCYFPLQSYGFQPTNGVGYQPYRVVVLSFELLHAPATVCGPKKSTNLVKNKCVNFNFNGLTGTGVLTESNKKFLPFQQFGRDIADTTDAVRDPQTLEILDITPCSFGGVSVITPGTNTSNQVAVLYQDVNCTEVPVAIHADQLTPTWRVYSTGSNVFQTRAGCLIGAEYVNNSYECDIPIGAGICASYQTQTNSPRRARSVASQSIIAYTMSLGAENSVAYSNNSIAIPTNFTISVTTEILPVSMTKTSVDCTMYICGDSTECSNLLLQYGSFCTQLNRALTGIAVEQDKNTQEVFAQVKQIYKTPPIKDFGGFNFSQILPDPSKPSKRSFIEDLLFNKVTLADAGFIKQYGDCLGDIAARDLICAQKFNGLTVLPPLLTDEMIAQYTSALLAGTITSGWTFGAGAALQIPFAMQMAYRFNGIGVTQNVLYENQKLIANQFNSAIGKIQDSLSSTASALGKLQDVVNQNAQALNTLVKQLSSNCGAISSVLNDILSRLDKVEAEVQIDRLITCRLQSLQTYVTQQLIRAAEIRASANLAATKMSECVLGQSKRVDFCGKGYHLMSFPQSAPHGVVFLHVTYVPAQEKNFTTAPAICHDGKAHFPREGVFVSNGTHWFVTQRNFYEPQIITTDNTFVSGNCDVVIGIVNNTVYDPLQPELDSFKEELDKYFKNHTSPDVDLGDISGINASVVNIQKEIDRLNEVAKNLNESLIDLQELGKYEQYIKGGGGSDIIKLLNEQVNKEMQSSNLYMSMSSWCYTHSLDGAGLFLFDHAAEEYEHAKKLIIFLNENNVPVQLTSISAPEHKFEGLTQIFQKAYEHEQHISESINNIVDHAIKSKDHATFNFLQWYVAEQHEEEVLFKDILDKIELIGNENHGLYLADQYVKGIAKSRKS

SEQ ID NO: 5390 - protein, 1379 aa, Artificial Sequence
  SARS-CoV-2/England/20102000506/2020__EPI_ISL_415147 spike protein (1-1211)(F970C_G999C) Ferritin construct
MFVFLVLLPLVSSQCVNLTTRTQLPPAYTNSFTRGVYYPDKVFRSSVLHSTQDLFLPFFSNVTWFHAIHVSGTNGTKRFDNPVLPFNDGVYFASTEKSNIIRGWIFGTTLDSKTQSLLIVNNATNVVIKVCEFQFCNDPFLGVYYHKNNKSWMESEFRVYSSANNCTFEYVSQPFLMDLEGKQGNFKNLREFVFKNIDGYFKIYSKHTPINLVRDLPQGFSALEPLVDLPIGINITRFQTLLALHRSYLTPGDSSSGWTAGAAAYYVGYLQPRTFLLKYNENGTITDAVDCALDPLSETKCTLKSFTVEKGIYQTSNFRVQPTESIVRFPNITNLCPFGEVFNATRFASVYAWNRKRISNCVADYSVLYNSASFSTFKCYGVSPTKLNDLCFTNVYADSFVIRGDEVRQIAPGQTGKIADYNYKLPDDFTGCVIAWNSNNLDSKVGGNYNYLYRLFRKSNLKPFERDISTEIYQAGSTPCNGVEGFNCYFPLQSYGFQPTNGVGYQPYRVVVLSFELLHAPATVCGPKKSTNLVKNKCVNFNFNGLTGTGVLTESNKKFLPFQQFGRDIADTTDAVRDPQTLEILDITPCSFGGVSVITPGTNTSNQVAVLYQGVNCTEVPVAIHADQLTPTWRVYSTGSNVFQTRAGCLIGAEHVNNSYECDIPIGAGICASYQTQTNSPRRARSVASQSIIAYTMSLGAENSVAYSNNSIAIPTNFTISVTTEILPVSMTKTSVDCTMYICGDSTECSNLLLQYGSFCTQLNRALTGIAVEQDKNTQEVFAQVKQIYKTPPIKDFGGFNFSQILPDPSKPSKRSFIEDLLFNKVTLADAGFIKQYGYCLGDIAARDLICAQKFNGLTVLPPLLTDEMIAQYTSALLAGTITSGWTFGAGAALQIPFAMQMAYRFNGIGVTQNVLYENQKLIANQFNSAIGKIQDSLSSTASALGKLQDVVNQNAQALNTLVKQLSSNCGAISSVLNDILSRLDKVEAEVQIDRLITCRLQSLQTYVTQQLIRAAEIRASANLAATKMSECVLGQSKRVDFCGKGYHLMSFPQSAPHGVVFLHVTYVPAQEKNFTTAPAICHDGKAHFPREGVFVSNGTHWFVTQRNFYEPQIITTDNTFVSGNCDVVIGIVNNTVYDPLQPELDSFKEELDKYFKNHTSPDVDLGDISGINASVVNIQKEIDRLNEVAKNLNESLIDLQELGKYEQYIKGGGGSDIIKLLNEQVNKEMQSSNLYMSMSSWCYTHSLDGAGLFLFDHAAEEYEHAKKLIIFLNENNVPVQLTSISAPEHKFEGLTQIFQKAYEHEQHISESINNIVDHAIKSKDHATFNFLQWYVAEQHEEEVLFKDILDKIELIGNENHGLYLADQYVKGIAKSRKS

SEQ ID NO: 5391 - protein, 1379 aa, Artificial Sequence
  SARS-CoV-2/Belgium/VAG-03013/2020__EPI_ISL_415155 spike protein (1-1211)(F970C_G999C) Ferritin construct
MFVFLVLLPLVSSQCVNLTTRTQLPPAYTNSFTRGVYYPDKVFRSSVLHSTQDLFLPFFSNVTWFHAIHVSGTNGTKRFDNPVLPFNDGVYFASTEKSNIIRGWIFGTTLDSKTQSLLIVNNATNVVIKVCEFQFCNDPFLGVYYHKNNKSWMESEFRVYSSANNCTFEYVSQPFLMDLEGKQGNFKNLREFVFKNIDGYFKIYSKHTPINLVRDLPQGFSALEPLVDLPIGINITRFQTLLALHRSYLTPGDSSSGWTAGAAAYYVGYLQPRTFLLKYNENGTITDAVDCALDPLSETKCTLKSFTVEKGIYQTSNFRVQPTESIVRFPNITNLCPFGEVFNATRFASVYAWNRKRISNCVADYSVLYNSASFSTFKCYGVSPTKLNDLCFTNVYADSFVIRGDEVRQIAPGQTGKIADYNYKLPDDFTGCVIAWNSNNLDSKVGGNYNYLYRLFRKSNLKPFERDISTEIYQAGSTPCNGVEGFNCYFPLQSYGFQPTNGVGYQPYRVVVLSFELLHAPATVCGPKKSTNLVKNKCVNFNFNGLTGTGVLTESNKKFLPFQQFGRDIADTTDAVRDPQTLEILDITPCSFGGVSVITPGTNTSNQVAVLYQGVNCTEVPVAIHADQLTPTWRVYSTGSNVFQTRAGCLIGAEHVNNSYECDIPIGAGICASYQTQTNSPRRARSVASQSIIAYTMSLGAENSVAYSNNSIAIPTNFTISVTTEILPVSMTKTSVDCTMYICGDSTECSNLLLQYGSFCTQLNRALTGIAVEQDKNTQEVFAQVKQIYKTPPIKDFGGFNFSQILPDPSKPSKRSFIEDLLFNKVTLADAGFIKQYGDCLGDIAARDLICAQKFNGLTVLPPLLTDEMIAQYTSALLAGTITSGWTFGAGAALQIPFAMQMAYRFNGIGVTQNVLYENQKLIANQFNSAIGKIQDSLSSTATALGKLQDVVNQNAQALNTLVKQLSSNCGAISSVLNDILSRLDKVEAEVQIDRLITCRLQSLQTYVTQQLIRAAEIRASANLAATKMSECVLGQSKRVDFCGKGYHLMSFPQSAPHGVVFLHVTYVPAQEKNFTTAPAICHDGKAHFPREGVFVSNGTHWFVTQRNFYEPQIITTDNTFVSGNCDVVIGIVNNTVYDPLQPELDSFKEELDKYFKNHTSPDVDLGDISGINASVVNIQKEIDRLNEVAKNLNESLIDLQELGKYEQYIKGGGGSDIIKLLNEQVNKEMQSSNLYMSMSSWCYTHSLDGAGLFLFDHAAEEYEHAKKLIIFLNENNVPVQLTSISAPEHKFEGLTQIFQKAYEHEQHISESINNIVDHAIKSKDHATFNFLQWYVAEQHEEEVLFKDILDKIELIGNENHGLYLADQYVKGIAKSRKS

SEQ ID NO: 5392 - protein, 1379 aa, Artificial Sequence
  SARS-CoV-2/Belgium/BC-03016/2020__EPI_ISL_415157 spike protein (1-1211)(F970C_G999C) Ferritin construct
MFVFLVLLPLVSSQCVNLTTRTQLPPAYTNSFTRGVYYPDKVFRSSVLHSTQDLFLPFFSNVTWFHAIHVSGTNGTKRFDNPVLPFNDGVYFASTEKSNIIRGWIFGTTLDSKTQSLLIVNNATNVVIKVCEFQFCNDPFLGVYYHKNNKSWMESEFRVYSSANNCTFEYVSQPFLMDLEGKQGNFKNLREFVFKNIDGYFKIYSKHTPINLVRDLPQGFSALEPLVDLPIGINITRFQTLLALHRSYLTPGDSSSGWTAGAAAYYVGYLQPRTFLLKYNENGTITDAVDCALDPLSETKCTLKSFTVEKGIYQTSNFRVQPTESIVRFPNITNLCPFGEVFNATRFASVYAWNRKRISNCVADYSVLYNSASFSTFKCYGVSPTKLNDLCFTNVYADSFVIRGDEVRQIAPGQTGKIADYNYKLPDDFTGCVIAWNSNNLDSKVGGNYNYLYRLFRKSNLKPFERDISTEIYQAGSTPCNGVEGFNCYFPLQSYGFQPTNGVGYQPYRVVVLSFELLHAPATVCGPKKSTNLVKNKCVNFNFNGLTGTGVLTESNKKFLPFQQFGRDIADTTDAVRDPQTLEILDITPCSFGGVSVITPGTNTSNQVAVLYQGVNCTEVPVAIHADQLTPTWRVYSTGSNVFQTRAGCLIGAEHVNNSYECDIPIGAGICASYQTQTNSPRRARSVASQSIIAYTMSLGAENSVAYSNNSIAIPTNFTISVTTEILPVSMTKTSVDCTMYICGDSTECSNLLLQYGSFCTQLNRALTGIAVEQDKNTQEVFAQVKQIYKTPPIKDFGGFNFSQILPDPSKPSKRSFIEDLLFNKVTLADAGFIKQYGDCLGDIAARDLICAQKFNGLTVLPPLLTDEMIAQYTSALLAGTITSGWTFGAGAALQIPFAMQMAYRFNGIGVTQNVLYENQKLIANQFNSAIGKIQDSLSSTAPALGKLQDVVNQNAQALNTLVKQLSSNCGAISSVLNDILSRLDKVEAEVQIDRLITCRLQSLQTYVTQQLIRAAEIRASANLAATKMSECVLGQSKRVDFCGKGYHLMSFPQSAPHGVVFLHVTYVPAQEKNFTTAPAICHDGKAHFPREGVFVSNGTHWFVTQRNFYEPQIITTDNTFVSGNCDVVIGIVNNTVYDPLQPELDSFKEELDKYFKNHTSPDVDLGDISGINASVVNIQKEIDRLNEVAKNLNESLIDLQELGKYEQYIKGGGGSDIIKLLNEQVNKEMQSSNLYMSMSSWCYTHSLDGAGLFLFDHAAEEYEHAKKLIIFLNENNVPVQLTSISAPEHKFEGLTQIFQKAYEHEQHISESINNIVDHAIKSKDHATFNFLQWYVAEQHEEEVLFKDILDKIELIGNENHGLYLADQYVKGIAKSRKS

SEQ ID NO: 5393 - protein, 1379 aa, Artificial Sequence
  SARS-CoV-2/Germany/BavPat3/2020__EPI_ISL_414521 spike protein (1-1211)(F970C_G999C) Ferritin construct
MFVFLVLLPLVSSQCVNLTTRTQLPPAYTNSFTRGVYYPDKVFRSSVLHSTQDLFLPFFSNVTWFHAIHVSGTNGTKRFDNPVLPFNDGVYFASTEKSNIIRGWIFGTTLDSKTQSLLIVNNATNVVIKVCEFQFCNDPFLGVYYHKNNKSWMESEFRVYSSANNCTFEYVSQPFLMDLEGKQGNFKNLREFVFKNIDGYFKIYSKHTPINLVRDLPQGFSALEPLVDLPIGINITRFQTLLALHRSYLTPGDSSSGWTAGAAAYYVGYLQPRTFLLKYNENGTITDAVDCALDPLSETKCTLKSFTVEKGIYQTSNFRVQPTESIVRFPNITNLCPFGEVFNATRFASVYAWNRKRISNCVADYSVLYNSASFSTFKCYGVSPTKLNDLCFTNVYADSFVIRGDEVRQIAPGQTGKIADYNYKLPDDFTGCVIAWNSNNLDSKVGGNYNYLYRLFRKSNLKPFERDISTEIYQAGSTPCNGVEGFNCYFPLQSYGFQPTNGVGYQPYRVVVLSFELLHAPATVCGPKKSTNLVKNKCVNFNFNGLTGTGVLTESNKKFLPFQQFGRDIADTTDAVRDPQTLEILDITPCSFGGVSVITPGTNTSNQVAVLYQDVNCTEVPVAIHADQLTPTWRVYSTGSNVFQTRAGCLIGAEHVNNSYECDIPIGAGICASYQTQTNSPRRARSVASQSIIAYTMSLGAENSVAYSNNSIAIPTNFTISVTTEILPVSMTKTSVDCTMYICGDSTECSNLLLQYGSFCTQLNRALTGIAVEQDKNTQQVFAQVKQIYKTPPIKDFGGFNFSQILPDPSKPSKRSFIEDLLFNKVTLADAGFIKQYGDCLGDIAARDLICAQKFNGLTVLPPLLTDEMIAQYTSALLAGTITSGWTFGAGAALQIPFAMQMAYRFNGIGVTQNVLYENQKLIANQFNSAIGKIQDSLSSTASALGKLQDVVNQNAQALNTLVKQLSSNCGAISSVLNDILSRLDKVEAEVQIDRLITCRLQSLQTYVTQQLIRAAEIRASANLAATKMSECVLGQSKRVDFCGKGYHLMSFPQSAPHGVVFLHVTYVPAQEKNFTTAPAICHDGKAHFPREGVFVSNGTHWFVTQRNFYEPQIITTDNTFVSGNCDVVIGIVNNTVYDPLQPELDSFKEELDKYFKNHTSPDVDLGDISGINASVVNIQKEIDRLNEVAKNLNESLIDLQELGKYEQYIKGGGGSDIIKLLNEQVNKEMQSSNLYMSMSSWCYTHSLDGAGLFLFDHAAEEYEHAKKLIIFLNENNVPVQLTSISAPEHKFEGLTQIFQKAYEHEQHISESINNIVDHAIKSKDHATFNFLQWYVAEQHEEEVLFKDILDKIELIGNENHGLYLADQYVKGIAKSRKS

SEQ ID NO: 5394 - protein, 1379 aa, Artificial Sequence
  SARS-CoV-2/France/HF1805/2020__EPI_ISL_414628 spike protein (1-1211)(F970C_G999C) Ferritin construct
MFVFLVLLPLVSSQCVNLTTRTQLPPAYTNSFTRGVYYPDKVFRSSVLHSTQDLFLPFFSNVTWFHAIHVSGTNGTKRFDNPVLPFNDGVYFASTEKSNIIRGWIFGTTLDSKTQSLLIVNNATNVVIKVCEFQFCNDPFLGVYYHKNNKSWMESEFRVYSSANNCTFEYVSQPFLMDLEGKQGNFKNLREFVFKNIDGYFKIYSKHTPINLVRDLPQGFSALEPLVDLPIGINITRFQTLLALHRSYLTPGDSSSGWTAGAAAYYVGYLQPRTFLLKYNENGTITDAVDCALDPLSETKCTLKSFTVEKGIYQTSNFRVQPTESIVRFPNITNLCPFGEVFNATRFASVYAWNRKRISNCVADYSVLYNSASFSTFKCYGVSPTKLNDLCFTNVYADSFVIRGDEVRQIAPGQTGKIADYNYKLPDDFTGCVIAWNSNNLDSKVGGNYNYLYRLFRKSNLKPFERDISTEIYQAGSTPCNGVEGFNCYFPLQSYGFQPTNGVGYQPYRVVVLSFELLHAPATVCGPKKSTNLVKNKCVNFNFNGLTGTGVLTESNKKFLPFQQFGRDIADTTDAVRDPQTLEILDITPCSFGGVSVITPGTNTSNQVAVLYQGVNCTEVPVAIHADQLTPTWRVYSTGSNVFQTRAGCLIGAEHVNNSYECDIPIGAGICASYQTQTNSPRRARSVASQSIIAYTMSLGAENSVAYSNNSIAIPTNFTISVTTEILPVSMTKTSVDCTMYICGDSTECSNLLLQYGSFCTQLNRALTGIAVEQDKNTQEVFAQVKQIYKTPPIKDFGGFNFSQILPDPSKPSKRSFIEDLLFNKVTLADAGFIKQYGDCLGDIAARDLICAQKFNGLTVLPPLLTDEMIAQYTSALLAGTITSGWTFGAGAALQIPFAMQMAYRFNGIGVTQNVLYENQKLIANQFNSAIGKIQDSLSSTASALGKLQDVVNQNAQALNTLVKQLSSNCGAISSVLNDILSRLDKVEAEVQIDRLITCRLQSLQTYVTQQLIRAAEIRASANLAATKMSECVLGQSKRVDFCGKGYHLMSFPQSAPHGVVFLHVTYVPAQEKNFTTAPAICHDGKAHFPREGVFVSNGTHWFVTQRNFYEPQIITTDNTFVSGNCDVVIGVVNNTVYDPLQPELDSFKEELDKYFKNHTSPDVDLGDISGINASVVNIQKEIDRLNEVAKNLNESLIDLQELGKYEQYIKGGGGSDIIKLLNEQVNKEMQSSNLYMSMSSWCYTHSLDGAGLFLFDHAAEEYEHAKKLIIFLNENNVPVQLTSISAPEHKFEGLTQIFQKAYEHEQHISESINNIVDHAIKSKDHATFNFLQWYVAEQHEEEVLFKDILDKIELIGNENHGLYLADQYVKGIAKSRKS

SEQ ID NO: 5395 - protein, 1379 aa, Artificial Sequence
  SARS-CoV-2/Netherlands/ZuidHolland_9/2020__EPI_ISL_414445 spike protein (1-1211)(F970C_G999C) Ferritin construct
MFVFLVLLPLVSSQCVNLTTRTQLPPAYTNSFTRGVYYPDKVFRSSVLHSTQDLFLPFFSNVTWFHAIHVSGTNGTKRFDNPVLPFNDGVYFASTEKSNIIRGWIFGTTLDSKTQSLLIVNNATNVVIKVCEFQFCNDPFLGVYYHKNNKSWMESEFRVYSSANNCTFEYVSQPFLMDLEGKQGNFKNLREFVFKNIDGYFKIYSKHTPINLVRDLPQGFSALEPLVDLPIGINITRFQTLLALHRSYLTPGDSSSGWTAGAAAYYVGYLQPRTFLLKYNENGTITDAVDCALDPLSETKCTLKSFTVEKGIYQTSNFRVQPTESIVRFPNITNLCPFGEVFNATRFASVYAWNRKRISNCVADYSVLYNSASFSTFKCYGVSPTKLNDLCFTNVYADSFVIRGDEVRQIAPGQTGKIADYNYKLPDDFTGCVIAWNSNNLDSKVGGNYNYLYRLFRKSNLKPFERDISTEIYQAGSTPCNGVEGFNCYFPLQSYGFQPTNGVGYQPYRVVVLSFELLHAPATVCGPKKSTNLVKNKCVNFNFNGLTGTGVLTESNKKFLPFQQFGRDIADTTDAVRDPQTLEILDITPCSFGGVSVITPGTNTSNQVAVLYQGVNCTEVPVAIHADQLTPTWRVYSTGSNVFQTRAGCLIGAEHVNNSYECDIPIGAGICASYQTQTNSPRRARSVASQSIIAYTMSLGAENSVAYSNNSIAIPTNFTISVTTEILPVSMTKTSVDCTMYICGDSTECSNLLLQYGSFCTQLNRALTGIAVEQDKNTQEVFAQVKQIYKTPPIKDFGGFNFSQILPDPSKPSKRSFIEDLLFNKVTLADAGFIKQYGDCLGDIAARDLICVQKFNGLTVLPPLLTDEMIAQYTSALLAGTITSGWTFGAGAALQIPFAMQMAYRFNGIGVTQNVLYENQKLIANQFNSAIGKIQDSLSSTASALGKLQDVVNQNAQALNTLVKQLSSNCGAISSVLNDILSRLDKVEAEVQIDRLITCRLQSLQTYVTQQLIRAAEIRASANLAATKMSECVLGQSKRVDFCGKGYHLMSFPQSAPHGVVFLHVTYVPAQEKNFTTAPAICHDGKAHFPREGVFVSNGTHWFVTQRNFYEPQIITTDNTFVSGNCDVVIGIVNNTVYDPLQPELDSFKEELDKYFKNHTSPDVDLGDISGINASVVNIQKEIDRLNEVAKNLNESLIDLQELGKYEQYIKGGGGSDIIKLLNEQVNKEMQSSNLYMSMSSWCYTHSLDGAGLFLFDHAAEEYEHAKKLIIFLNENNVPVQLTSISAPEHKFEGLTQIFQKAYEHEQHISESINNIVDHAIKSKDHATFNFLQWYVAEQHEEEVLFKDILDKIELIGNENHGLYLADQYVKGIAKSRKS

SEQ ID NO: 5396 - protein, 1379 aa, Artificial Sequence
  SARS-CoV-2/Finland/FIN03032020A/2020__EPI_ISL_413602 spike protein (1-1211)(F970C_G999C) Ferritin construct
MFVFLVLLPLVSSQCVNLTTRTQLPPAYTNSFTRGVYYPDKVFRSSVLHSTQDLFLPFFSNVTWFHAIHVSGTNGTKRFDNPVLPFNDGVYFASTEKSNIIRGWIFGTTLDSKTQSLLIVNNATNVVIKVCEFQFCNDPFLGVYYHKNNKSWMESEFRVYSSANNCTFEYVSQPFLMDLEGKQGNFKNLREFVFKNIDGYFKIYSKHTPINLVRDLPQGFSALEPLVDLPIGINITRFQTLLALHRSYLTPGDSSSGWTAGAAAYYVGYLQPRTFLLKYNENGTITDAVDCALDPLSETKCTLKSFTVEKGIYQTSNFRVQPTESIVRFPNITNLCPFGEVFNATRFASVYAWNRKRISNCVADYSVLYNSASFSTFKCYGVSPTKLNDLCFTNVYADSFVIRGDEVRQIAPGQTGKIADYNYKLPDDFTGCVISWNSNNLDSKVGGNYNYLYRLFRKSNLKPFERDISTEIYQAGSTPCNGVEGFNCYFPLQSYGFQPTNGVGYQPYRVVVLSFELLHAPATVCGPKKSTNLVKNKCVNFNFNGLTGTGVLTESNKKFLPFQQFGRDIADTTDAVRDPQTLEILDITPCSFGGVSVITPGTNTSNQVAVLYQGVNCTEVPVAIHADQLTPTWRVYSTGSNVFQTRAGCLIGAEHVNNSYECDIPIGAGICASYQTQTNSPRRARSVASQSIIAYTMSLGAENSVAYSNNSIAIPTNFTISVTTEILPVSMTKTSVDCTMYICGDSTECSNLLLQYGSFCTQLNRALTGIAVEQDKNTQEVFAQVKQIYKTPPIKDFGGFNFSQILPDPSKPSKRSFIEDLLFNKVTLADAGFIKQYGDCLGDIAARDLICAQKFNGLTVLPPLLTDEMIAQYTSALLAGTITSGWTFGAGAALQIPFAMQMAYRFNGIGVTQNVLYENQKLIANQFNSAIGKIQDSLSSTASALGKLQDVVNQNAQALNTLVKQLSSNCGAISSVLNDILSRLDKVEAEVQIDRLITCRLQSLQTYVTQQLIRAAEIRASANLAATKMSECVLGQSKRVDFCGKGYHLMSFPQSAPHGVVFLHVTYVPAQEKNFTTAPAICHDGKAHFPREGVFVSNGTHWFVTQRNFYEPQIITTDNTFVSGNCDVVIGIVNNTVYDPLQPELDSFKEELDKYFKNHTSPDVDLGDISGINASVVNIQKEIDRLNEVAKNLNESLIDLQELGKYEQYIKGGGGSDIIKLLNEQVNKEMQSSNLYMSMSSWCYTHSLDGAGLFLFDHAAEEYEHAKKLIIFLNENNVPVQLTSISAPEHKFEGLTQIFQKAYEHEQHISESINNIVDHAIKSKDHATFNFLQWYVAEQHEEEVLFKDILDKIELIGNENHGLYLADQYVKGIAKSRKS

SEQ ID NO: 5397 - protein, 1379 aa, Artificial Sequence
  SARS-CoV-2/France/GE1977/2020__EPI_ISL_414632 spike protein (1-1211)(F970C_G999C) Ferritin construct
MFVFLVLLPLVSSQCVNLTTRTQLPPAYTNSFTRGVYYPDKVFRSSVLHSTQDLFLPFFSNVTWFHAIHVSGTNGTKRFDNPVLPFNDGVYFASTEKSNIIRGWIFGTTLDSKTQSLLIVNNATNVVIKVCEFQFCNDPFLGVYYHKNNKSWMESEFRVYSSANNCTFEYVSQPFLMDLEGKQGNFKNLREFVFKNIDGYFKIYSKHTPINLVRDLPQGFSALEPLVDLPIGINITRFQTLLALHRSYLTPGDSSSGWTAGAAAYYVGYLQPRTFLLKYNENGTITDAVDCALDPLSETKCTLKSFTVEKGIYQTSNFRVQPTESIVRFPNITNLCPFGEVFNATRFASVYAWNRKRISNCVADYSVLYNSASFSTFKCYGVSPTKLNDLCFTNVYADSFVIRGDEVRQIAPGQTGKIADYNYKLPDDFTGCVIAWNSNNLDSKVGGNYNYLYRLFRKSNLKPFERDISTEIYQAGSTPCNGVEGFNCYFPLQSYGFQPTNGVGYQPYRVVVLSFELLHAPATVCGPKKSTNLVKNKCVNFNFNGLTGTGVLTESNKKFLPFQQFGRDIADTTDAVRDPQTLEILDITPCSFGGVSVITPGTNTSNQVAVLYQGVNCTEVPVAIHADQLTPTWRVYSTGSNVFQTRAGCLIGAEHVNNSYECDIPIGAGICASYQTQTNSPRRARSVASQSIIAYTMSLGAENSVAYSNNSIAIPTNFTISVTTEILPVSMTKTSVDCTMYICGDSTECSNLLLQYGSFCTQLNRALTGIAVEQDKNTQEVFAQVKQIYKTPPIKDFGGFNFSQILPDPSKPSKRSFIEDLLFNKVTLADAGFIKQYGDCLGDIAARDLICAQKFNGLTVLPPLLTDEMIAQYTSALLAGTITSGWTFGAGAALQIPFAMQMAYRFNGIGVTQNVLYENQKLIANQFNSAIGKIQDSLFSTASALGKLQDVVNQNAQALNTLVKQLSSNCGAISSVLNDILSRLDKVEAEVQIDRLITCRLQSLQTYVTQQLIRAAEIRASANLAATKMSECVLGQSKRVDFCGKGYHLMSFPQSAPHGVVFLHVTYVPAQEKNFTTAPAICHDGKAHFPREGVFVSNGTHWFVTQRNFYEPQIITTDNTFVSGNCDVVIGIVNNTVYDPLQPELDSFKEELDKYFKNHTSPDVDLGDISGINASVVNIQKEIDRLNEVAKNLNESLIDLQELGKYEQYIKGGGGSDIIKLLNEQVNKEMQSSNLYMSMSSWCYTHSLDGAGLFLFDHAAEEYEHAKKLIIFLNENNVPVQLTSISAPEHKFEGLTQIFQKAYEHEQHISESINNIVDHAIKSKDHATFNFLQWYVAEQHEEEVLFKDILDKIELIGNENHGLYLADQYVKGIAKSRKS

SEQ ID NO: 5398 - protein, 1379 aa, Artificial Sequence
  SARS-CoV-2/Finland/FIN-313/2020__EPI_ISL_414641 spike protein (1-1211)(F970C_G999C) Ferritin construct
MFVFLVLLPLVSSQCVNLTTRTQLPPAYTNSFTRGVYYPDKVFRSSVLHSTQDLFLPFFSNVTWFHAIHVSGTNGTKRFDNPVLPFNDGVYFASTEKSNIIRGWIFGTTLDSKTQSLLIVNNATNVVIKVCEFQFCNDPFLGVYYHKNNKSWMESEFRVYSSANNCTFEYVSQPFLMDLEGKQGNFKNLREFVFKNIDGYFKIYSKHTPINLVRDLPQGFSALEPLVDLPIGINITRFKTLLALHRSYLTPGDSSSGWTAGAAAYYVGYLQPRTFLLKYNENGTITDAVDCALDPLSETKCTLKSFTVEKGIYQTSNFRVQPTESIVRFPNITNLCPFGEVFNATRFASVYAWNRKRISNCVADYSVLYNSASFSTFKCYGVSPTKLNDLCFTNVYADSFVIRGDEVRQIAPGQTGKIADYNYKLPDDFTGCVIAWNSNNLDSKVGGNYNYLYRLFRKSNLKPFERDISTEIYQAGSTPCNGVEGFNCYFPLQSYGFQPTNGVGYQPYRVVVLSFELLHAPATVCGPKKSTNLVKNKCVNFNFNGLTGTGVLTESNKKFLPFQQFGRDIADTTDAVRDPQTLEILDITPCSFGGVSVITPGTNTSNQVAVLYQGVNCTEVPVAIHADQLTPTWRVYSTGSNVFQTRAGCLIGAEHVNNSYECDIPIGAGICASYQTQTNSPRRARSVASQSIIAYTMSLGAENSVAYSNNSIAIPTNFTISVTTEILPVSMTKTSVDCTMYICGDSTECSNLLLQYGSFCTQLNRALTGIAVEQDKNTQEVFAQVKQIYKTPPIKDFGGFNFSQILPDPSKPSKRSFIEDLLFNKVTLADAGFIKQYGDCLGDIAARDLICAQKFNGLTVLPPLLTDEMIAQYTSALLAGTITSGWTFGAGAALQIPFAMQMAYRFNGIGVTQNVLYENQKLIANQFNSAIGKIQDSLSSTASALGKLQDVVNQNAQALNTLVKQLSSNCGAISSVLNDILSRLDKVEAEVQIDRLITCRLQSLQTYVTQQLIRAAEIRASANLAATKMSECVLGQSKRVDFCGKGYHLMSFPQSAPHGVVFLHVTYVPAQEKNFTTAPAICHDGKAHFPREGVFVSNGTHWFVTQRNFYEPQIITTDNTFVSGNCDVVIGIVNNTVYDPLQPELDSFKEELDKYFKNHTSPDVDLGDISGINASVVNIQKEIDRLNEVAKNLNESLIDLQELGKYEQYIKGGGGSDIIKLLNEQVNKEMQSSNLYMSMSSWCYTHSLDGAGLFLFDHAAEEYEHAKKLIIFLNENNVPVQLTSISAPEHKFEGLTQIFQKAYEHEQHISESINNIVDHAIKSKDHATFNFLQWYVAEQHEEEVLFKDILDKIELIGNENHGLYLADQYVKGIAKSRKS

SEQ ID NO: 5399 - protein, 1379 aa, Artificial Sequence
  SARS-CoV-2/Netherlands/ZuidHolland_2/2020__EPI_ISL_414556 spike protein (1-1211)(F970C_G999C) Ferritin construct
MFVFLVLLPLVSSQCVNLTTRTQLPPAYTNSFTRGVYYPDKVFRSSVLHSTQDLFLPFFSNVTWFHAIHVSGTNGTKRFDNPVLPFNDGVYFASTEKSNIIRGWIFGTTLDSKTQSLLIVNNATNVVIKVCEFQFCNDPFLGVYYHKNNKSWMESEFRVYSSANNCTFEYVSQPFLMDLEGKQGNFKNLREFVFKNIDGYFKIYSKHTPINLVRDLPQGFSALEPLVDLPIGINITRFQTLLALHRSYLTPGDSSSGWTAGAAAYYVGYLQPRTFLLKYNENGTITDAVDCALDPLSETKCTLKSFTVEKGIYQTSNFRVQPTESIVRFPNITNLCPFGEVFNATRFASVYAWNRKRISNCVADYSVLYNSASFSTFKCYGVSPTKLNDLCFTNVYADSFVIRGDEVRQIAPGQTGKIADYNYKLPDDFTGCVIAWNSNNLDSKVGGNYNYLYRLFRKSNLKPFERDISTEIYQAGSTPCNGVEGFNCYFPLQSYGFQPTNGVGYQPYRVVVLSFELLHAPATVCGPKKSTNLVKNKCVNFNFNGLTGTGVLTESNKKFLPFQQFGRDIADTTDAVRDPQTLEILDITPCSFGGVSVITPGTNTSNQVAVLYQGVNCTEVPVAIHADQLTPTWRVYSTGSNVFQTRAGCLIGAEHVNNSYECDIPIGAGICASYQTQTNSPRRARSVASQSIIAYTMSLGAENSVAYSNNSIAIPTNFTISVTTEILPVSMTKTSVDCTMYICGDSTECSNLLLQYGSFCTQLNRALTGIALEQDKNTQEVFAQVKQIYKTPPIKDFGGFNFSQILPDPSKPSKRSFIEDLLFNKVTLADAGFIKQYGDCLGDIAARDLICAQKFNGLTVLPPLLTDEMIAQYTSALLAGTITSGWTFGAGAALQIPFAMQMAYRFNGIGVTQNVLYENQKLIANQFNSAIGKIQDSLSSTASALGKLQDVVNQNAQALNTLVKQLSSNCGAISSVLNDILSRLDKVEAEVQIDRLITCRLQSLQTYVTQQLIRAAEIRASANLAATKMSECVLGQSKRVDFCGKGYHLMSFPQSAPHGVVFLHVTYVPAQEKNFTTAPAICHDGKAHFPREGVFVSNGTHWFVTQRNFYEPQIITTDNTFVSGNCDVVIGIVNNTVYDPLQPELDSFKEELDKYFKNHTSPDVDLGDISGINASVVNIQKEIDRLNEVAKNLNESLIDLQELGKYEQYIKGGGGSDIIKLLNEQVNKEMQSSNLYMSMSSWCYTHSLDGAGLFLFDHAAEEYEHAKKLIIFLNENNVPVQLTSISAPEHKFEGLTQIFQKAYEHEQHISESINNIVDHAIKSKDHATFNFLQWYVAEQHEEEVLFKDILDKIELIGNENHGLYLADQYVKGIAKSRKS

SEQ ID NO: 5400 - protein, 1379 aa, Artificial Sequence
  SARS-CoV-2/USA/WA-UW31/2020__EPI_ISL_414618 spike protein (1-1211)(F970C_G999C) Ferritin construct
MFVFLVLLPLVSSQCVNLTTRTQLPPAYTNSFTRGVYYPDKVFRSSVLHSTQDLFLPFFSNVTWFHAIHVSGTNGTKRFDNPVLPFNDGVYFASTEKSNIIRGWIFGTTLDSKTQSLLIVNNATNVVIKVCEFQFCNDPFLGVYYHKNNKSWMESEFRVYSSANNCTFEYVSQPFLMDLEGKQGNFKNLREFVFKNIDGYFKIYSKHTPINLVRDLPQGFSALEPLVDLPIGINITRFQTLLALHRSYLTPGDSSSGWTAGAAAYYVGYLQPRTFLLKYNENGTITDAVDCALDPLSETKCTLKSFTVEKGIYQTSNFRVQPTESIVRFPNITNLCPFGEVFNATRFASVYAWNRKRISNCVADYSVLYNSASFSTFKCYGVSPTKLNDLCFTNVYADSFVIRGDEVRQIAPGQTGKIADYNYKLPDDFTGCVIAWNSNNLDSKVGGNYNYLYRLFRKSNLKPFERDISTEIYQAGSTPCNGAEGFNCYFPLQSYGFQPTNGVGYQPYRVVVLSFELLHAPATVCGPKKSTNLVKNKCVNFNFNGLTGTGVLTESNKKFLPFQQFGRDIADTTDAVRDPQTLEILDITPCSFGGVSVITPGTNTSNQVAVLYQDVNCTEVPVAIHADQLTPTWRVYSTGSNVFQTRAGCLIGAEHVNNSYECDIPIGAGICASYQTQTNSPRRARSVASQSIIAYTMSLGAENSVAYSNNSIAIPTNFTISVTTEILPVSMTKTSVDCTMYICGDSTECSNLLLQYGSFCTQLNRALTGIAVEQDKNTQEVFAQVKQIYKTPPIKDFGGFNFSQILPDPSKPSKRSFIEDLLFNKVTLADAGFIKQYGDCLGDIAARDLICAQKFNGLTVLPPLLTDEMIAQYTSALLAGTITSGWTFGAGAALQIPFAMQMAYRFNGIGVTQNVLYENQKLIANQFNSAIGKIQDSLSSTASALGKLQDVVNQNAQALNTLVKQLSSNCGAISSVLNDILSRLDKVEAEVQIDRLITCRLQSLQTYVTQQLIRAAEIRASANLAATKMSECVLGQSKRVDFCGKGYHLMSFPQSAPHGVVFLHVTYVPAQEKNFTTAPAICHDGKAHFPREGVFVSNGTHWFVTQRNFYEPQIITTDNTFVSGNCDVVIGIVNNTVYDPLQPELDSFKEELDKYFKNHTSPDVDLGDISGINASVVNIQKEIDRLNEVAKNLNESLIDLQELGKYEQYIKGGGGSDIIKLLNEQVNKEMQSSNLYMSMSSWCYTHSLDGAGLFLFDHAAEEYEHAKKLIIFLNENNVPVQLTSISAPEHKFEGLTQIFQKAYEHEQHISESINNIVDHAIKSKDHATFNFLQWYVAEQHEEEVLFKDILDKIELIGNENHGLYLADQYVKGIAKSRKS

SEQ ID NO: 5401 - protein, 1379 aa, Artificial Sequence
  SARS-CoV-2/South Korea/SNU01/2020__EPI_ISL_411929 spike protein (1-1211)(F970C_G999C) Ferritin construct
MFVFLVLLPLVSSQCVNLTTRTQLPPAYTNSFTRGVYYPDKVFRSSVLHSTQDLFLPFFSNVTWFHAIHVSGTNGTKRFDNPVLPFNDGVYFASTEKSNIIRGWIFGTTLDSKTQSLLIVNNATNVVIKVCEFQFCNDPFLGVYYHKNNKSWMESEFRVYSSANNCTFEYVSQPFLMDLEGKQGNFKNLREFVFKNIDGYFKIYSKHTPINLVRDLPQGFWALEPLVDLPIGINITRFQTLLALHRSYLTPGDSSSGWTAGAAAYYVGYLQPRTFLLKYNENGTITDAVDCALDPLSETKCTLKSFTVEKGIYQTSNFRVQPTESIVRFPNITNLCPFGEVFNATRFASVYAWNRKRISNCVADYSVLYNSASFSTFKCYGVSPTKLNDLCFTNVYADSFVIRGDEVRQIAPGQTGKIADYNYKLPDDFTGCVIAWNSNNLDSKVGGNYNYLYRLFRKSNLKPFERDISTEIYQAGSTPCNGVEGFNCYFPLQSYGFQPTNGVGYQPYRVVVLSFELLHAPATVCGPKKSTNLVKNKCVNFNFNGLTGTGVLTESNKKFLPFQQFGRDIADTTDAVRDPQTLEILDITPCSFGGVSVITPGTNTSNQVAVLYQDVNCTEVPVAIHADQLTPTWRVYSTGSNVFQTRAGCLIGAEHVNNSYECDIPIGAGICASYQTQTNSPRRARSVASQSIIAYTMSLGAENSVAYSNNSIAIPTNFTISVTTEILPVSMTKTSVDCTMYICGDSTECSNLLLQYGSFCTQLNRALTGIAVEQDKNTQEVFAQVKQIYKTPPIKDFGGFNFSQILPDPSKPSKRSFIEDLLFNKVTLADAGFIKQYGDCLGDIAARDLICAQKFNGLTVLPPLLTDEMIAQYTSALLAGTITSGWTFGAGAALQIPFAMQMAYRFNGIGVTQNVLYENQKLIANQFNSAIGKIQDSLSSTASALGKLQDVVNQNAQALNTLVKQLSSNCGAISSVLNDILSRLDKVEAEVQIDRLITCRLQSLQTYVTQQLIRAAEIRASANLAATKMSECVLGQSKRVDFCGKGYHLMSFPQSAPHGVVFLHVTYVPAQEKNFTTAPAICHDGKAHFPREGVFVSNGTHWFVTQRNFYEPQIITTDNTFVSGNCDVVIGIVNNTVYDPLQPELDSFKEELDKYFKNHTSPDVDLGDISGINASVVNIQKEIDRLNEVAKNLNESLIDLQELGKYEQYIKGGGGSDIIKLLNEQVNKEMQSSNLYMSMSSWCYTHSLDGAGLFLFDHAAEEYEHAKKLIIFLNENNVPVQLTSISAPEHKFEGLTQIFQKAYEHEQHISESINNIVDHAIKSKDHATFNFLQWYVAEQHEEEVLFKDILDKIELIGNENHGLYLADQYVKGIAKSRKS

SEQ ID NO: 5402 - protein, 1379 aa, Artificial Sequence
  SARS-CoV-2/China/WF0004/2020__EPI_ISL_413694 spike protein (1-1211)(F970C_G999C) Ferritin construct
MFVFLVLLPLVSSQCVNLTTRTQLPPAYTNSFTRGVYYPDKVFRSSVLHSTQDLFLPFFSNVTWFHAIHVSGTNGTKRFDNPVLPFNDGVYFASTEKSNIIRGWIFGTTLDSKTQSLLIVNNATNVVIKVCEFQFCNDPFLGVYYHKNNKSWTESEFRVYSSANNCTFEYVSQPFLMDLEGKQGNFKNLREFVFKNIDGYFKIYSKHTPINLVRDLPQGFSALEPLVDLPIGINITRFQTLLALHRSYLTPGDSSSGWTAGAAAYYVGYLQPRTFLLKYNENGTITDAVDCALDPLSETKCTLKSFTVEKGIYQTSNFRVQPTESIVRFPNITNLCPFGEVFNATRFASVYAWNRKRISNCVADYSVLYNSASFSTFKCYGVSPTKLNDLCFTNVYADSFVIRGDEVRQIAPGQTGKIADYNYKLPDDFTGCVIAWNSNNLDSKVGGNYNYLYRLFRKSNLKPFERDISTEIYQAGSTPCNGVEGFNCYFPLQSYGFQPTNGVGYQPYRVVVLSFELLHAPATVCGPKKSTNLVKNKCVNFNFNGLTGTGVLTESNKKFLPFQQFGRDIADTTDAVRDPQTLEILDITPCSFGGVSVITPGTNTSNQVAVLYQDVNCTEVPVAIHADQLTPTWRVYSTGSNVFQTRAGCLIGAEHVNNSYECDIPIGAGICASYQTQTNSPRRARSVASQSIIAYTMSLGAENSVAYSNNSIAIPTNFTISVTTEILPVSMTKTSVDCTMYICGDSTECSNLLLQYGSFCTQLNRALTGIAVEQDKNTQEVFAQVKQIYKTPPIKDFGGFNFSQILPDPSKPSKRSFIEDLLFNKVTLADAGFIKQYGDCLGDIAARDLICAQKFNGLTVLPPLLTDEMIAQYTSALLAGTITSGWTFGAGAALQIPFAMQMAYRFNGIGVTQNVLYENQKLIANQFNSAIGKIQDSLSSTASALGKLQDVVNQNAQALNTLVKQLSSNCGAISSVLNDILSRLDKVEAEVQIDRLITCRLQSLQTYVTQQLIRAAEIRASANLAATKMSECVLGQSKRFDFCGKGYHLMSFPQSAPHGVVFLHVTYVPAQEKNFTTAPAICHDGKAHFPREGVFVSNGTHWFVTQRNFYEPQIITTDNTFVSGNCDVVIGIVNNTVYDPLQPELDSFKEELDKYFKNHTSPDVDLGDISGINASVVNIQKEIDRLNEVAKNLNESLIDLQELGKYEQYIKGGGGSDIIKLLNEQVNKEMQSSNLYMSMSSWCYTHSLDGAGLFLFDHAAEEYEHAKKLIIFLNENNVPVQLTSISAPEHKFEGLTQIFQKAYEHEQHISESINNIVDHAIKSKDHATFNFLQWYVAEQHEEEVLFKDILDKIELIGNENHGLYLADQYVKGIAKSRKS

SEQ ID NO: 5403 - protein, 1379 aa, Artificial Sequence
  SARS-CoV-2/China/WF0028/2020__EPI_ISL_413791 spike protein (1-1211)(F970C_G999C) Ferritin construct
MFVFLVLLPLVSSQCVNLTTRTQLPPAYTNSFTRGVYYPDKVFRSSVLHSTQDLFLPFFSNVTWFHAIHVSGTNGTKRFDNPVLPFNDGVYFASTEKSNIIRGWIFGTTLDSKTQSLLIVNNATNVVIKVCEFQFCNDPFLGVYYHKNNKSWMESEFRVYSSANNCTFEYVSQPFLMDLEGKQGNFKNLREFVFKNIDGYFKIYSKHTPINLVRDLPQGFSALEPLVDLPIGINITRFQTLLALHRSYLTPGDSSSGWTAGAAAYYVGYLQPRTFLLKYNENGTITDAVDCALDPLSETKCTLKSFTVEKGIYQTSNFRVQPTESIVRFPNITNLCPFGEVFNATRFASVYAWNRKRISNCVADYSVLYNSASFSTFKCYGVSPTKLNDLCFTNVYADSFVIRGDEVRQIAPGQTGKIADYNYKLPDDFTGCVIAWNSNNLDSKVGGNYNYLYRLFRKSNLKPFERDISTEIYQAGSTPCNGVEGFNCYFPLQSYGFQPTNGVGYQPYRVVVLSFELLHAPATVCGPKKSTNLVKNKCVNFNFNGLTGTGVLTESNKKFLPFQQFGRDIADTTDAVRDPQTLEILDITPCSFGGVSVITPGTNTSNQVAVLYQDVNCTEVPVAIHADQLTPTWRVYSTGSNVFQTRAGCLIGAEHVNNSYECDIPIGAGICASYQTQTNSPRRARSVASQSIIAYTMSLGAENSVAYSNNSIAIPTNFTISVTTEILPVSMTKTSVDCTMYICGDSTECSNLLLQYGSFCTQLNRALTGIAVEQDKNTQEVFAQVKQIYKTPPIKDFGGFNFSQILPDPSKPSKRSFIEDLLFNKVTLADAGFIKQYGDCLGDIAARDLICAQKFNGLTVLPPLLTDEMIAQYTSALLAGTITSGWTFGAGAALQIPFAMQMAYRFNGIGVTQNVLYENQKLIANQFNSAIGKIQDSLSSTASALGKLQDVVNQNAQALNTLVKQLSSNCGAISSVLNDILSRLDKVEAEVQIDRLITCRLQSLQTYVTQQLIRAAEIRASANLAATKMSECVLGQSKRVDFCGKGYHLMSFPQSAPHGVVFLHVTYVPAQEKNFTTAPAICHDGKAHFPREGVFVSNGTHWFVTQRNFYEPQIITTDNTFVSGNCDVVIGIVNNTVYDPLQPELESFKEELDKYFKNHTSPDVDLGDISGINASVVNIQKEIDRLNEVAKNLNESLIDLQELGKYEQYIKGGGGSDIIKLLNEQVNKEMQSSNLYMSMSSWCYTHSLDGAGLFLFDHAAEEYEHAKKLIIFLNENNVPVQLTSISAPEHKFEGLTQIFQKAYEHEQHISESINNIVDHAIKSKDHATFNFLQWYVAEQHEEEVLFKDILDKIELIGNENHGLYLADQYVKGIAKSRKS

SEQ ID NO: 5404 - protein, 1379 aa, Artificial Sequence
  SARS-CoV-2/2019-nCoV/USA-CruiseA-18/2020__MT159716.1 spike protein (1-1211)(F970C_G999C) Ferritin construct
MFVFLVLLPLVSSQCVNLTTRTQLPPAYTNSFTRGVYYPDKVFRSSVLHSTQDLFLPFFSNVTWFHAIHVSGTNGTKRFDNPVLPFNDGVYFASTEKSNIIRGWIFGTTLDSKTQSLLIVNNATNVVIKVCEFQFCNDPFLGVYYHKNNKSWMESELRVYSSANNCTFEYVSQPFLMDLEGKQGNFKNLREFVFKNIDGYFKIYSKHTPINLVRDLPQGFSALEPLVDLPIGINITRFQTLLALHRSYLTPGDSSSGWTAGAAAYYVGYLQPRTFLLKYNENGTITDAVDCALDPLSETKCTLKSFTVEKGIYQTSNFRVQPTESIVRFPNITNLCPFGEVFNATRFASVYAWNRKRISNCVADYSVLYNSASFSTFKCYGVSPTKLNDLCFTNVYADSFVIRGDEVRQIAPGQTGKIADYNYKLPDDFTGCVIAWNSNNLDSKVGGNYNYLYRLFRKSNLKPFERDISTEIYQAGSTPCNGVEGFNCYFPLQSYGFQPTNGVGYQPYRVVVLSFELLHAPATVCGPKKSTNLVKNKCVNFNFNGLTGTGVLTESNKKFLPFQQFGRDIADTTDAVRDPQTLEILDITPCSFGGVSVITPGTNTSNQVAVLYQDVNCTEVPVAIHADQLTPTWRVYSTGSNVFQTRAGCLIGAEHVNNSYECDIPIGAGICASYQTQTNSPRRARSVASQSIIAYTMSLGAENSVAYSNNSIAIPTNFTISVTTEILPVSMTKTSVDCTMYICGDSTECSNLLLQYGSFCTQLNRALTGIAVEQDKNTQEVFAQVKQIYKTPPIKDFGGFNFSQILPDPSKPSKRSFIEDLLFNKVTLADAGFIKQYGDCLGDIAARDLICAQKFNGLTVLPPLLTDEMIAQYTSALLAGTITSGWTFGAGAALQIPFAMQMAYRFNGIGVTQNVLYENQKLIANQFNSAIGKIQDSLSSTASALGKLQDVVNQNAQALNTLVKQLSSNCGAISSVLNDILSRLDKVEAEVQIDRLITCRLQSLQTYVTQQLIRAAEIRASANLAATKMSECVLGQSKRVDFCGKGYHLMSFPQSAPHGVVFLHVTYVPAQEKNFTTAPAICHDGKAHFPREGVFVSNGTHWFVTQRNFYEPQIITTDNTFVSGNCDVVIGIVNNTVYDPLQPELDSFKEELDKYFKNHTSPDVDLGDISGINASVVNIQKEIDRLNEVAKNLNESLIDLQELGKYEQYIKGGGGSDIIKLLNEQVNKEMQSSNLYMSMSSWCYTHSLDGAGLFLFDHAAEEYEHAKKLIIFLNENNVPVQLTSISAPEHKFEGLTQIFQKAYEHEQHISESINNIVDHAIKSKDHATFNFLQWYVAEQHEEEVLFKDILDKIELIGNENHGLYLADQYVKGIAKSRKS

SEQ ID NO: 5405 - protein, 1379 aa, Artificial Sequence
  SARS-CoV-2/SARS-CoV-2/Yunnan-01/human/2020/CHN__MT049951.1 spike protein (1-1211)(F970C_G999C) Ferritin construct
MFVFLVLLPLVSSQCVNLTTRTQLPPANTNSFTRGVYYPDKVFRSSVLHSTQDLFLPFFSNVTWFHAIHVSGTNGTKRFDNPVLPFNDGVYFASTEKSNIIRGWIFGTTLDSKTQSLLIVNNATNVVIKVCEFQFCNDPFLGVYYHKNNKSWMESEFRVYSSANNCTFEYVSQPFLMDLEGKQGNFKNLREFVFKNIDGYFKIYSKHTPINLVRDLPQGFSALEPLVDLPIGINITRFQTLLALHRSYLTPGDSSSGWTAGAAAYYVGYLQPRTFLLKYNENGTITDAVDCALDPLSETKCTLKSFTVEKGIYQTSNFRVQPTESIVRFPNITNLCPFGEVFNATRFASVYAWNRKRISNCVADYSVLYNSASFSTFKCYGVSPTKLNDLCFTNVYADSFVIRGDEVRQIAPGQTGKIADYNYKLPDDFTGCVIAWNSNNLDSKVGGNYNYLYRLFRKSNLKPFERDISTEIYQAGSTPCNGVEGFNCYFPLQSYGFQPTNGVGYQPYRVVVLSFELLHAPATVCGPKKSTNLVKNKCVNFNFNGLTGTGVLTESNKKFLPFQQFGRDIADTTDAVRDPQTLEILDITPCSFGGVSVITPGTNTSNQVAVLYQDVNCTEVPVAIHADQLTPTWRVYSTGSNVFQTRAGCLIGAEHVNNSYECDIPIGAGICASYQTQTNSPRRARSVASQSIIAYTMSLGAENSVAYSNNSIAIPTNFTISVTTEILPVSMTKTSVDCTMYICGDSTECSNLLLQYGSFCTQLNRALTGIAVEQDKNTQEVFAQVKQIYKTPPIKDFGGFNFSQILPDPSKPSKRSFIEDLLFNKVTLADAGFIKQYGDCLGDIAARDLICAQKFNGLTVLPPLLTDEMIAQYTSALLAGTITSGWTFGAGAALQIPFAMQMAYRFNGIGVTQNVLYENQKLIANQFNSAIGKIQDSLSSTASALGKLQDVVNQNAQALNTLVKQLSSNCGAISSVLNDILSRLDKVEAEVQIDRLITCRLQSLQTYVTQQLIRAAEIRASANLAATKMSECVLGQSKRVDFCGKGYHLMSFPQSAPHGVVFLHVTYVPAQEKNFTTAPAICHDGKAHFPREGVFVSNGTHWFVTQRNFYEPQIITTDNTFVSGNCDVVIGIVNNTVYDPLQPELDSFKEELDKYFKNHTSPDVDLGDISGINASVVNIQKEIDRLNEVAKNLNESLIDLQELGKYEQYIKGGGGSDIIKLLNEQVNKEMQSSNLYMSMSSWCYTHSLDGAGLFLFDHAAEEYEHAKKLIIFLNENNVPVQLTSISAPEHKFEGLTQIFQKAYEHEQHISESINNIVDHAIKSKDHATFNFLQWYVAEQHEEEVLFKDILDKIELIGNENHGLYLADQYVKGIAKSRKS

SEQ ID NO: 5406 - protein, 1379 aa, Artificial Sequence
  SARS-CoV-2/USA/WA-UW292/2020__EPI_ISL_418077 spike protein (1-1211)(F970C_G999C) Ferritin construct
MFVFLVLLPLVSSQCVNLTTRTQLPPAYTNSFTRGVYYPDKVFRSSVLHSTQDLFLPFFSNVTWFHAIHVSGTNGTKRFDNPVLPFNDGVYFASTEKSNIIRGWIFGTTLDSKTQSLLIVNNATNVVIKVCEFQFCNDPFLGVYYHKNNKSWMESEFRVYSSANNCTFEYVSQPFLMDLEGKQGNFKNLREFVFKNIDGYFKIYSKHTPINLVRDLPQGFSALEPLVDLPIGINITRFQTLLALHRSYLTPGDSSSGWTAGAAAYYVGYLQPRTFLLKYNENGTITDAVDCALDPLSETKCTLKSFTVEKGIYQTSNFRVQPTESIVRFPNITNLCPFGEVFNATRFASVYAWNRKRISNCVADYSVLYNSASFSTFKCYGVSPTKLNDLCFTNVYADSFVIRGDEVRQIAPGQTGKIADYNYKLPDDFTGCVIAWNSNNLDSKVGGNYNYLYRLFRKSNLKPFERDISTEIYQASSTPCNGVEGFNCYFPLQSYGFQPTNGVGYQPYRVVVLSFELLHAPATVCGPKKSTNLVKNKCVNFNFNGLTGTGVLTESNKKFLPFQQFGRDIADTTDAVRDPQTLEILDITPCSFGGVSVITPGTNTSNQVAVLYQDVNCTEVPVAIHADQLTPTWRVYSTGSNVFQTRAGCLIGAEHVNNSYECDIPIGAGICASYQTQTNSPRRARSVASQSIIAYTMSLGAENSVAYSNNSIAIPTNFTISVTTEILPVSMTKTSVDCTMYICGDSTECSNLLLQYGSFCTQLNRALTGIAVEQDKNTQEVFAQVKQIYKTPPIKDFGGFNFSQILPDPSKPSKRSFIEDLLFNKVTLADAGFIKQYGDCLGDIAARDLICAQKFNGLTVLPPLLTDEMIAQYTSALLAGTITSGWTFGAGAALQIPFAMQMAYRFNGIGVTQNVLYENQKLIANQFNSAIGKIQDSLSSTASALGKLQDVVNQNAQALNTLVKQLSSNCGAISSVLNDILSRLDKVEAEVQIDRLITCRLQSLQTYVTQQLIRAAEIRASANLAATKMSECVLGQSKRVDFCGKGYHLMSFPQSAPHGVVFLHVTYVPAQEKNFTTAPAICHDGKAHFPREGVFVSNGTHWFVTQRNFYEPQIITTDNTFVSGNCDVVIGIVNNTVYDPLQPELDSFKEELDKYFKNHTSPDVDLGDISGINASVVNIQKEIDRLNEVAKNLNESLIDLQELGKYEQYIKGGGGSDIIKLLNEQVNKEMQSSNLYMSMSSWCYTHSLDGAGLFLFDHAAEEYEHAKKLIIFLNENNVPVQLTSISAPEHKFEGLTQIFQKAYEHEQHISESINNIVDHAIKSKDHATFNFLQWYVAEQHEEEVLFKDILDKIELIGNENHGLYLADQYVKGIAKSRKS

SEQ ID NO: 5407 - protein, 1379 aa, Artificial Sequence
  SARS-CoV-2/Iceland/192/2020__EPI_ISL_417819 spike protein (1-1211)(F970C_G999C) Ferritin construct
MFVFFVLLPLVSSQCVNLTTRTQLPPAYTNSFTRGVYYPDKVFRSSVLHSTQDLFLPFFSNVTWFHAIHVSGTNGTKRFDNPVLPFNDGVYFASTEKSNIIRGWIFGTTLDSKTQSLLIVNNATNVVIKVCEFQFCNDPFLGVYYHKNNKSWMESEFRVYSSANNCTFEYVSQPFLMDLEGKQGNFKNLREFVFKNIDGYFKIYSKHTPINLVRDLPQGFSALEPLVDLPIGINITRFQTLLALHRSYLTPGDSSSGWTAGAAAYYVGYLQPRTFLLKYNENGTITDAVDCALDPLSETKCTLKSFTVEKGIYQTSNFRVQPTESIVRFPNITNLCPFGEVFNATRFASVYAWNRKRISNCVADYSVLYNSASFSTFKCYGVSPTKLNDLCFTNVYADSFVIRGDEVRQIAPGQTGKIADYNYKLPDDFTGCVIAWNSNNLDSKVGGNYNYLYRLFRKSNLKPFERDISTEIYQAGSTPCNGVEGFNCYFPLQSYGFQPTNGVGYQPYRVVVLSFELLHAPATVCGPKKSTNLVKNKCVNFNFNGLTGTGVLTESNKKFLPFQQFGRDIADTTDAVRDPQTLEILDITPCSFGGVSVITPGTNTSNQVAVLYQGVNCTEVPVAIHADQLTPTWRVYSTGSNVFQTRAGCLIGAEHVNNSYECDIPIGAGICASYQTQTNSPRRARSVASQSIIAYTMSLGAENSVAYSNNSIAIPTNFTISVTTEILPVSMTKTSVDCTMYICGDSTECSNLLLQYGSFCTQLNRALTGIAVEQDKNTQEVFAQVKQIYKTPPIKDFGGFNFSQILPDPSKPSKRSFIEDLLFNKVTLADAGFIKQYGDCLGDIAARDLICAQKFNGLTVLPPLLTDEMIAQYTSALLAGTITSGWTFGAGAALQIPFAMQMAYRFNGIGVTQNVLYENQKLIANQFNSAIGKIQDSLSSTASALGKLQDVVNQNAQALNTLVKQLSSNCGAISSVLNDILSRLDKVEAEVQIDRLITCRLQSLQTYVTQQLIRAAEIRASANLAATKMSECVLGQSKRVDFCGKGYHLMSFPQSAPHGVVFLHVTYVPAQEKNFTTAPAICHDGKAHFPREGVFVSNGTHWFVTQRNFYEPQIITTDNTFVSGNCDVVIGIVNNTVYDPLQPELDSFKEELDKYFKNHTSPDVDLGDISGINASVVNIQKEIDRLNEVAKNLNESLIDLQELGKYEQYIKGGGGSDIIKLLNEQVNKEMQSSNLYMSMSSWCYTHSLDGAGLFLFDHAAEEYEHAKKLIIFLNENNVPVQLTSISAPEHKFEGLTQIFQKAYEHEQHISESINNIVDHAIKSKDHATFNFLQWYVAEQHEEEVLFKDILDKIELIGNENHGLYLADQYVKGIAKSRKS

SEQ ID NO: 5408 - protein, 1379 aa, Artificial Sequence
  SARS-CoV-2/Belgium/ULG-6939/2020__EPI_ISL_417020 spike protein (1-1211)(F970C_G999C) Ferritin construct
MFVFLVLLPLVSSQCVNLTTRTQLPPAYTNSFTRGVYYPDKVFRSSVLHSTQDLFLPFFSNVTWFHAIHVSGTNGTKRFDNPVLPFNDGVYFASTEKSNIIRGWIFGTTLDSKTQSLLIVNNATNVVIKVCEFQFCNDPFLGVYYHKNNKSWMESEFRVYSSANNCTFEYVSQPFLMDLEGKQGNFKNLREFVFKNIDGYFKIYSKHTPINLVRDLPQGFSALEPLVDLPIGINITRFQTLLALHRSYLTPGDSSSGWTAGAAAYYVGYLQPRTFLLKYNENGTITDAVDCALDPLSETKCTLKSFTVEKGIYQTSNFRVQPTESIVRFPNITNLCPFGEVFNATRFASVYAWNRKRISNCVADYSVLYNSASFSTFKCYGVSPTKLNDLCFTNVYADSFVIRGDEVRQIAPGQTGKIADYNYKLPDDFTGCVIAWNSNNLDSKVGGNYNYLYRLFRKSNLKPFERDISTEIYQAGSTPCNGVEGFNCYFPLQSYGFQPTNGVGYQPYRVVVLSFELLHAPATVCGPKKSTNLVKNKCVNFNFNGLTGTGVLTESNKKFLPFQQFGRDIADTTDAVRDPQTLEILDITPCSFGGVSVITPGTNTSNQVAVLYQGVNCTEVPVAIHADQLTPTWRVYSTGSNVFQTRAGCLIGAEHVNNSYECDIPIGAGICASYQTQTNSPRRARSVASQSIIAYTMSLGAENSVVYSNNSIAIPTNFTISVTTEILPVSMTKTSVDCTMYICGDSTECSNLLLQYGSFCTQLNRALTGIAVEQDKNTQEVFAQVKQIYKTPPIKDFGGFNFSQILPDPSKPSKRSFIEDLLFNKVTLADAGFIKQYGDCLGDIAARDLICAQKFNGLTVLPPLLTDEMIAQYTSALLAGTITSGWTFGAGAALQIPFAMQMAYRFNGIGVTQNVLYENQKLIANQFNSAIGKIQDSLSSTASALGKLQDVVNQNAQALNTLVKQLSSNCGAISSVLNDILSRLDKVEAEVQIDRLITCRLQSLQTYVTQQLIRAAEIRASANLAATKMSECVLGQSKRVDFCGKGYHLMSFPQSAPHGVVFLHVTYVPAQEKNFTTAPAICHDGKAHFPREGVFVSNGTHWFVTQRNFYEPQIITTDNTFVSGNCDVVIGIVNNTVYDPLQPELDSFKEELDKYFKNHTSPDVDLGDISGINASVVNIQKEIDRLNEVAKNLNESLIDLQELGKYEQYIKGGGGSDIIKLLNEQVNKEMQSSNLYMSMSSWCYTHSLDGAGLFLFDHAAEEYEHAKKLIIFLNENNVPVQLTSISAPEHKFEGLTQIFQKAYEHEQHISESINNIVDHAIKSKDHATFNFLQWYVAEQHEEEVLFKDILDKIELIGNENHGLYLADQYVKGIAKSRKS

SEQ ID NO: 5409 - protein, 1379 aa, Artificial Sequence
  SARS-CoV-2/France/HF2496/2020__EPI_ISL_418231 spike protein (1-1211)(F970C_G999C) Ferritin construct
MFVFLVLLPLVSSQCVNLTTRTQLPPAYTNSFTRGVYYPDKVFRSSVLHSTQDLFLPFFSNVTWFHAIHVSGTNGTKRFDNPVLPFNDGVYFASTEKSNIIRGWIFGTTLDSKTQSLLIVNNATNVVIKVCEFQFCNDPFLGVYYHKNNKSWMESEFRVYSSANNCTFEYVSQPFLMDLEGKQGNFKNLREFVFKNIDGYFKIYSKHTPINLVRDLPQGFSALEPLVDLPIGINITRFQTLLALHRSYLTPGDSSSGWTAGAAAYYVGYLQPRTFLLKYNENGTITDAVDCALDPLSETKCTLKSFTVEKGIYQTSNFRVQPTESIVRFPNITNLCPFGEVFNATRFASVYAWNRKRISNCVADYSVLYNSASFSTFKCYGVSPTKLNDLCFTNVYADSFVIRGDEVRQIAPGQTGKIADYNYKLPDDFTGCVIAWNSNNLDSKVGGNYNYLYRLFRKSNLKPFERDISTEIYQAGSTPCNGVEGFNCYFPLQSYGFQPTNGVGYQPYRVVVLSFELLHAPATVCGPKKSTNLVKNKCVNFNFNGLTGTGVLTESNKKFLPFQQFGRDIADTTDAVRDPQTLEILDITPCSFGGVSVITPGTNTSNQVAVLYQGVNCTEVPVAIHADQLTPTWRVYSTGSNVFQTRAGCLIGAEHVNNSYECDIPIGAGICASYQTQTNSPRRARSVASQSIIAYTMSLGAENSVAYSNNSIAIPTNFTISVTTEILPVSMTKTSVDCTMYICGDSTECSNLLLQYGSFCTQLNRALTGIAVEQDKNTQEVFAQVKQIYKTPPIKDFGGFNFSQILPDPSKPSKRSFIEDLLFNKVTLADAGFIKQYGDCLGDIVARDLICAQKFNGLTVLPPLLTDEMIAQYTSALLAGTITSGWTFGAGAALQIPFAMQMAYRFNGIGVTQNVLYENQKLIANQFNSAIGKIQDSLSSTASALGKLQDVVNQNAQALNTLVKQLSSNCGAISSVLNDILSRLDKVEAEVQIDRLITCRLQSLQTYVTQQLIRAAEIRASANLAATKMSECVLGQSKRVDFCGKGYHLMSFPQSAPHGVVFLHVTYVPAQEKNFTTAPAICHDGKAHFPREGVFVSNGTHWFVTQRNFYEPQIITTDNTFVSGNCDVVIGIVNNTVYDPLQPELDSFKEELDKYFKNHTSPDVDLGDISGINASVVNIQKEIDRLNEVAKNLNESLIDLQELGKYEQYIKGGGGSDIIKLLNEQVNKEMQSSNLYMSMSSWCYTHSLDGAGLFLFDHAAEEYEHAKKLIIFLNENNVPVQLTSISAPEHKFEGLTQIFQKAYEHEQHISESINNIVDHAIKSKDHATFNFLQWYVAEQHEEEVLFKDILDKIELIGNENHGLYLADQYVKGIAKSRKS

SEQ ID NO: 5410 - protein, 1379 aa, Artificial Sequence
  SARS-CoV-2/USA/WA-UW291/2020__EPI_ISL_418076 spike protein (1-1211)(F970C_G999C) Ferritin construct
MFVFLVLLPLVSSQCVNLTTRTQLPPAYTNSFTRGVYYPDKVFRSSVLHSTQDLFLPFFSNVTWFHAIHVSGTNGTKRFDNPVLPFNDGVYFASTEKSNIIRGWIFGTTLDSKTQSLLIVNNATNVVIKVCEFQFCNDPFLGVYYHKNNKSWMESEFRVYSSANNCTFEYVSQPFLMDLEGKQGNFKNLREFVFKNIDGYFKIYSKHTPINLVRDLPQGFSALEPLVDLPIGINITRFQTLLALHRSYLTPGDSSSGWTAGAAAYYVGYLQPRTFLLKYNENGTITDAVDCALDPLSETKCTLKSFTVEKGIYQTSNFRVQPTESIVRFPNITNLCPFGEVFNATRFASVYAWNRKRISNCVADYSVLYNSASFSTFKCYGVSPTKLNDLCFTNVYADSFVIRGDEVRQIAPGQTGKIADYNYKLPDDFTGCVIAWNSNNLDSKVGGNYNYLYRLFRKSNLKPFERDISTEIYQAGSTPCNGVEGFNCYFPLQSYGFQPTNGVGYQPYRVVVLSFELLHAPATVCGPKKSTNLVKNKCVNFNFNGLTGTGVLTESNKKFLPFQQFGRDIADTTDAVRDPQTLEILDITPCSFGGVSVITPGTNTSNQVAVLYQGVNCTEVPVAIHADQLTPTWRVYSTGSNVFQTRAGCLIGAEHVNNSYECDIPIGAGICASYQTQTNSPRRARSVASQSIIAYTMSLGAENSVAYSNNSIAIPTNFTISVTTEILPVSMTKTSVDCTMYICGDSTECSNLLLQYGSFCTQLNRALTGIAVEQDKNTQEVFAQVKQIYKTPPIKDFGGFNFSQILPDPSKPSKRSFIEDLLFNKVTLADAGFIKQYGDCLGDIAARDLICAQKFNGLTVLPPLLTDEMIAQYTSALLAGTITSGWTFGAGAALQIPFAMQMAYRFNGIGVTQNVLYENQKLIANQFNSAIGKIQYSLSSTASALGKLQDVVNQNAQALNTLVKQLSSNCGAISSVLNDILSRLDKVEAEVQIDRLITCRLQSLQTYVTQQLIRAAEIRASANLAATKMSECVLGQSKRVDFCGKGYHLMSFPQSAPHGVVFLHVTYVPAQEKNFTTAPAICHDGKAHFPREGVFVSNGTHWFVTQRNFYEPQIITTDNTFVSGNCDVVIGIVNNTVYDPLQPELDSFKEELDKYFKNHTSPDVDLGDISGINASVVNIQKEIDRLNEVAKNLNESLIDLQELGKYEQYIKGGGGSDIIKLLNEQVNKEMQSSNLYMSMSSWCYTHSLDGAGLFLFDHAAEEYEHAKKLIIFLNENNVPVQLTSISAPEHKFEGLTQIFQKAYEHEQHISESINNIVDHAIKSKDHATFNFLQWYVAEQHEEEVLFKDILDKIELIGNENHGLYLADQYVKGIAKSRKS

SEQ ID NO: 5411 - protein, 1379 aa, Artificial Sequence; identical to SEQ ID NO: 5374
  SARS-CoV-2/Portugal/PT0034/2020__EPI_ISL_418019 spike protein (1-1211)(F970C_G999C) Ferritin construct

SEQ ID NO: 5412 - protein, 1379 aa, Artificial Sequence
  SARS-CoV-2/Iceland/202/2020__EPI_ISL_417750 spike protein (1-1211)(F970C_G999C) Ferritin construct
MFVFLVLLPLVSSQCVNLTTRTQLPPAYTNSFTRGVYYPDKVFRSSVLHSTQDLFLPFFSNVTWFHAIHVSGTNGTKRFDNPVLPFNDGVYFASTEKSNIIRGWIFGTTLDSKTQSLLIVNNATNVVIKVCEFQFCNDPFLGVYYHKNNKSWMESEFRVYSSANNCTFEYVSQPFLMDLEGKQGNFKNLREFVFKNIDGYFKIYSKHTPINLVRDLPQGFSALEPLVDLPIGINITRFQTLLALHRSYLTPGDSSSGWTAGAAAYYVGYLQPRTFLLKYNENGTITDAVDCALDPLSETKCTLKSFTVEKGIYQTSNFRVQPTESIVRFPNITNLCPFGEVFNATRFASVYAWNRKRISNCVADYSVLYNSASFSTFKCYGVSPTKLNDLCFTNVYADSFVIRGDEVRQIAPGQTGKIADYNYKLPDDFTGCVIAWNSNNLDSKVGGNYNYLYRLFRKSNLKPFERDISTEIYQAGSTPCNGVEGFNCYFPLQSYGFQPTNGVGYQPYRVVVLSFELLHAPATVCGPKKSTNLVKNKCVNFNFNGLTGTGVLTESNKKFLPFQQFGRDIADTTDAVRDPQTLEILDITPCSFGGVSVITPGTNTSNQVAVLYQDVNCTEVPVAIHADQLTPTWRVYSTGSNVFQTRAGCLIGAEHVNNSYECDIPIGAGICASYQTQTNSPRRARSVASQSIIAYTMSLGAENSVAYSNNSIAIPTNFTISVTTEILPVSMTKTSVDCTMYICGDSTECSNLLLQYGSFCTQLNRALTGIAVEQDKNTQEVFAQVKQIYKTPPIKDFGGFNFSQILPDPSKPSKRSFIEDLLFNKVTLADAGFIKQYGDCLGDIAARDLICAQKFNGLTVLPPLLTDEMIAQYTSALLAGTITSGWTFGAGAALQIPFAMQMAYRFNGIGVTQNVLYENQKLIANQFNSAIGKIQDSLSSTASALGKLQDVVNQNAQALNTLVKQLSSNCGAISSVLNDILSRLDKVEAEVQIDRLITCRLQSLQTYVTQQLIRAAEIRASANLAATKMSECVLGQSKRVDFCGKGYHLMSFPQSAPHGVVFLHVTYVPAQEKNFTTAPAICHDGKAHFPREGVFVSNGTHWFVTQRNFYEPQIITTDNTFVSGNCDVVIGIVNNTVYDPLQPELDSFKEELDKYFKNHTSPDVDLGDIPGINASVVNIQKEIDRLNEVAKNLNESLIDLQELGKYEQYIKGGGGSDIIKLLNEQVNKEMQSSNLYMSMSSWCYTHSLDGAGLFLFDHAAEEYEHAKKLIIFLNENNVPVQLTSISAPEHKFEGLTQIFQKAYEHEQHISESINNIVDHAIKSKDHATFNFLQWYVAEQHEEEVLFKDILDKIELIGNENHGLYLADQYVKGIAKSRKS

SEQ ID NO: 5413 - protein, 1379 aa, Artificial Sequence
  SARS-CoV-2/USA/WA-UW261/2020__EPI_ISL_418046 spike protein (1-1211)(F970C_G999C) Ferritin construct
MFVFLVLLPLVSSQCVNLTTRTQLPPAYTNSFTRGVYYPDKVFRSSVLHSTQDLFLPFFSNVTWFHAIHVSGTNGTKRFDNPVLPFNDGVYFASTEKSNIIRGWIFGTTLDSKTQSLLIVNNATNVVIKVCEFQFCNDPFLGVYYHKNNKSWMESEFRVYSSANNCTFEYVSQPFLMDLEGKQGNFKNLREFVFKNIDGYFKIYSKHTPINLVRDLPQGFSALEPLVDLPIGINITRFQTLLALHRSYLTPGDSSSGWTAGAAAYYVGYLQPRTFLLKYNENGTITDAVDCALDPLSETKCTLKSFTVEKGIYQTSNFRVQPTESIVRFPNITNLCPFGEVFNATRFTSVYAWNRKRISNCVADYSVLYNSASFSTFKCYGVSPTKLNDLCFTNVYADSFVIRGDEVRQIAPGQTGKIADYNYKLPDDFTGCVIAWNSNNLDSKVGGNYNYLYRLFRKSNLKPFERDISTEIYQAGSTPCNGVEGFNCYFPLQSYGFQPTNGVGYQPYRVVVLSFELLHAPATVCGPKKSTNLVKNKCVNFNFNGLTGTGVLTESNKKFLPFQQFGRDIADTTDAVRDPQTLEILDITPCSFGGVSVITPGTNTSNQVAVLYQDVNCTEVPVAIHADQLTPTWRVYSTGSNVFQTRAGCLIGAEHVNNSYECDIPIGAGICASYQTQTNSPRRARSVASQSIIAYTMSLGAENSVAYSNNSIAIPTNFTISVTTEILPVSMTKTSVDCTMYICGDSTECSNLLLQYGSFCTQLNRALTGIAVEQDKNTQEVFAQVKQIYKTPPIKDFGGFNFSQILPDPSKPSKRSFIEDLLFNKVTLADAGFIKQYGDCLGDIAARDLICAQKFNGLTVLPPLLTDEMIAQYTSALLAGTITSGWTFGAGAALQIPFAMQMAYRFNGIGVTQNVLYENQKLIANQFNSAIGKIQDSLSSTASALGKLQDVVNQNAQALNTLVKQLSSNCGAISSVLNDILSRLDKVEAEVQIDRLITCRLQSLQTYVTQQLIRAAEIRASANLAATKMSECVLGQSKRVDFCGKGYHLMSFPQSAPHGVVFLHVTYVPAQEKNFTTAPAICHDGKAHFPREGVFVSNGTHWFVTQRNFYEPQIITTDNTFVSGNCDVVIGIVNNTVYDPLQPELDSFKEELDKYFKNHTSPDVDLGDISGINASVVNIQKEIDRLNEVAKNLNESLIDLQELGKYEQYIKGGGGSDIIKLLNEQVNKEMQSSNLYMSMSSWCYTHSLDGAGLFLFDHAAEEYEHAKKLIIFLNENNVPVQLTSISAPEHKFEGLTQIFQKAYEHEQHISESINNIVDHAIKSKDHATFNFLQWYVAEQHEEEVLFKDILDKIELIGNENHGLYLADQYVKGIAKSRKS

SEQ ID NO: 5414 - protein, 1379 aa, Artificial Sequence
  SARS-CoV-2/Portugal/PT0035/2020__EPI_ISL_418020 spike protein (1-1211)(F970C_G999C) Ferritin construct
MFVFLVLLPLVSSQCVNLTTRTQLPPAYTNSFTRGVYYPDKVFRSSVLHSTQDLFLPFFSNVTWFHAIHVSGTNGTKRFDNPVLPFNDGVYFASTEKSNIIRGWIFGTTLDSKTQSLLIVNNATNVVIKVCEFQFCNDPFLGVYYHKNNKSWMESEFRVYSSANNCTFEYVSQPFLMDLEGKQGNFKNLREFVFKNIDGYFKIYSKHTPINLVRDLPQGFSALEPLVDLPIGINITRFQTLLALHRSYLTPGDSSSGWTAGAAAYYVGYLQPRTFLLKYNENGTITDAVDCALDPLSETKCTLKSFTVEKGIYQTSNFRVQPTESIVRFPNITNLCPFGEVFNATRFASVYAWNRKRISNCVADYSVLYNSASFSTFKCYGVSPTKLNDLCFTNVYADSFVIRGDEVRQIAPGQTGKIADYNYKLPDDFTGCVIAWNSNNLDSKVGGNYNYLYRLFRKSNLKPFERDISTEIYQAGSTPCNGVEGFNCYFPLQSYGFQPTNGVGYQPYRVVVLSFELLHAPATVCGPKKSTNLVKNKCVNFNFNGLTGTGVLTESNKKFLPFQQFGRDIADTTDAVRDPQTLEILDITPCSFGGVSVITPGTNTSNQVAVLYQDVNCTEVPVAIHADQLTPTWRVYSTGSNVFQTRAGCLIGAEHVNNSYECDIPIGAGICASYQTQTNSPRRARSVASQSIIAYTMSLGAENSVAYSNNSIAIPTNFTISVTTEILPVSMTKTSVDCTMYICGDSTECSNLLLQYGSFCTQLNRALTGIAVEQDKNTQEVFAQVKQIYKTPPIKDFGGFNFSQILPDPSKPSKRSFIEDLLFNKVTLADAGFIKQYGDCLGDISARDLICAQKFNGLTVLPPLLTDEMIAQYTSALLAGTITSGWTFGAGAALQIPFAMQMAYRFNGIGVTQNVLYENQKLIANQFNSAIGKIQDSLSSTASALGKLQDVVNQNAQALNTLVKQLSSNCGAISSVLNDILSRLDKVEAEVQIDRLITCRLQSLQTYVTQQLIRAAEIRASANLAATKMSECVLGQSKRVDFCGKGYHLMSFPQSAPHGVVFLHVTYVPAQEKNFTTAPAICHDGKAHFPREGVFVSNGTHWFVTQRNFYEPQIITTDNTFVSGNCDVVIGIVNNTVYDPLQPELDSFKEELDKYFKNHTSPDVDLGDISGINASVVNIQKEIDRLNEVAKNLNESLIDLQELGKYEQYIKGGGGSDIIKLLNEQVNKEMQSSNLYMSMSSWCYTHSLDGAGLFLFDHAAEEYEHAKKLIIFLNENNVPVQLTSISAPEHKFEGLTQIFQKAYEHEQHISESINNIVDHAIKSKDHATFNFLQWYVAEQHEEEVLFKDILDKIELIGNENHGLYLADQYVKGIAKSRKS

SEQ ID NO: 5415 - protein, 1379 aa, Artificial Sequence
  SARS-CoV-2/USA/NY-NYUMC7/2020__EPI_ISL_418192 spike protein (1-1211)(F970C_G999C) Ferritin construct
MFVFLVLLPLVSSQCVNLTTRTQLPPAYTNSFTRGVYYPDKVFRSSVLHSTQDLFLPFFSNVTWFHAIHVSGTNGTKRFDNPVLPFNDGVYFASTEKSNIIRGWIFGTTLDSKTQSLLIVNNATNVVIKVCEFQFCNDPFLGVYHHKNNKSWMESEFRVYSSANNCTFEYVSQPFLMDLEGKQGNFKNLREFVFKNIDGYFKIYSKHTPINLVRDLPQGFSALEPLVDLPIGINITRFQTLLALHRSYLTPGDSSSGWTAGAAAYYVGYLQPRTFLLKYNENGTITDAVDCALDPLSETKCTLKSFTVEKGIYQTSNFRVQPTESIVRFPNITNLCPFGEVFNATRFASVYAWNRKRISNCVADYSVLYNSASFSTFKCYGVSPTKLNDLCFTNVYADSFVIRGDEVRQIAPGQTGKIADYNYKLPDDFTGCVIAWNSNNLDSKVGGNYNYLYRLFRKSNLKPFERDISTEIYQAGSTPCNGVEGFNCYFPLQSYGFQPTNGVGYQPYRVVVLSFELLHAPATVCGPKKSTNLVKNKCVNFNFNGLTGTGVLTESNKKFLPFQQFGRDIADTTDAVRDPQTLEILDITPCSFGGVSVITPGTNTSNQVAVLYQGVNCTEVPVAIHADQLTPTWRVYSTGSNVFQTRAGCLIGAEHVNNSYECDIPIGAGICASYQTQTNSPRRARSVASQSIIAYTMSLGAENSVAYSNNSIAIPTNFTISVTTEILPVSMTKTSVDCTMYICGDSTECSNLLLQYGSFCTQLNRALTGIAVEQDKNTQEVFAQVKQIYKTPPIKDFGGFNFSQILPDPSKPSKRSFIEDLLFNKVTLADAGFIKQYGDCLGDIAARDLICAQKFNGLTVLPPLLTDEMIAQYTSALLAGTITSGWTFGAGAALQIPFAMQMAYRFNGIGVTQNVLYENQKLIANQFNSAIGKIQDSLSSTASALGKLQDVVNQNAQALNTLVKQLSSNCGAISSVLNDILSRLDKVEAEVQIDRLITCRLQSLQTYVTQQLIRAAEIRASANLAATKMSECVLGQSKRVDFCGKGYHLMSFPQSAPHGVVFLHVTYVPAQEKNFTTAPAICHDGKAHFPREGVFVSNGTHWFVTQRNFYEPQIITTDNTFVSGNCDVVIGIVNNTVYDPLQPELDSFKEELDKYFKNHTSPDVDLGDISGINASVVNIQKEIDRLNEVAKNLNESLIDLQELGKYEQYIKGGGGSDIIKLLNEQVNKEMQSSNLYMSMSSWCYTHSLDGAGLFLFDHAAEEYEHAKKLIIFLNENNVPVQLTSISAPEHKFEGLTQIFQKAYEHEQHISESINNIVDHAIKSKDHATFNFLQWYVAEQHEEEVLFKDILDKIELIGNENHGLYLADQYVKGIAKSRKS

SEQ ID NO: 5416 - protein, 1379 aa, Artificial Sequence
  SARS-CoV-2/Iceland/189/2020__EPI_ISL_417709 spike protein (1-1211)(F970C_G999C) Ferritin construct
MFVFLVLLPLVSSQCVNLTTRTQLPPAYTNSFTRGVYYPDKVFRSSVLHSTQDLFLPFFSNVTWFHAIHVSGTNGTKRFDNPVLPFNDGVYFASTEKSNIIRGWIFGTTLDSKTQSLLIVNNATNVVIKVCEFQFCNDPFLGVYYHKNNKSWMESEFRVYSSANNCTFEYVSQPFLMDLEGKQGNFKNLREFVFKNIDGYFKIYSKHTPINLVRDLPQGFSALEPLVDLPIGINITRFQTLLALHRSYLTPGDSSSGWTAGAAAYYVGYLQPRTFLLKYNENGTITDAVDCALDPLSETKCTLKSFTVEKGIYQTSNFRVQPTESIVRFPNITNLCPFGEVFNATRFASVYAWNRKRISNCVADYSVLYNSASFSTFKCYGVSPTKLNDLCFTNVYADSFVIRGDEVRQIAPGQTGKIADYNYKLPDDFTGCVIAWNSNNLDSKVGGNYNYLYRLFRKSNLKPFERDISTEIYQAGSTPCNGVEGFNCYFPLQSYGFQPTNGVGYQPYRVVVLSFELLHAPATVCGPKKSTNLVKNKCVNFNFNGLTGTGVLTESNKKFLPFQQFGRDIADTTDAVRDPQTLEILDITPCSFGGVSVITPGTNTSNQVAVLYQGVNCTEVPVAIHADQLTPTWRVYSTGSNVFQTRAGCLIGAEHVNNSYECDIPIGAGICASYQTQTNSPRRARSVASQSIIAYTMSLGAENSVAYSNNSIAIPTNFTISVTTEILPVSMTKTSVDCTMYICGDSTECSNLLLQYGSFCTQLNRALTGIAVEQDKNTQEVFAQVKQIYKTPPIKDFGGFNFSQILPDPSKPSKRSFIEDLLFNKVTLADAGFTKQYGDCLGDIAARDLICAQKFNGLTVLPPLLTDEMIAQYTSALLAGTITSGWTFGAGAALQIPFAMQMAYRFNGIGVTQNVLYENQKLIANQFNSAIGKIQDSLSSTASALGKLQDVVNQNAQALNTLVKQLSSNCGAISSVLNDILSRLDKVEAEVQIDRLITCRLQSLQTYVTQQLIRAAEIRASANLAATKMSECVLGQSKRVDFCGKGYHLMSFPQSAPHGVVFLHVTYVPAQEKNFTTAPAICHDGKAHFPREGVFVSNGTHWFVTQRNFYEPQIITTDNTFVSGNCDVVIGIVNNTVYDPLQPELDSFKEELDKYFKNHTSPDVDLGDISGINASVVNIQKEIDRLNEVAKNLNESLIDLQELGKYEQYIKGGGGSDIIKLLNEQVNKEMQSSNLYMSMSSWCYTHSLDGAGLFLFDHAAEEYEHAKKLIIFLNENNVPVQLTSISAPEHKFEGLTQIFQKAYEHEQHISESINNIVDHAIKSKDHATFNFLQWYVAEQHEEEVLFKDILDKIELIGNENHGLYLADQYVKGIAKSRKS

SEQ ID NO: 5417 - protein, 1379 aa, Artificial Sequence
  SARS-CoV-2/Australia/NSW56/2020__EPI_ISL_417408 spike protein (1-1211)(F970C_G999C) Ferritin construct
MFVFLVLLPLVSSQCVNLTTRTQLPPAYTNSFTRGVYYPDKVFRSSVLHSTQDLFLPFFSNVTWFHAIHVSGTNGTKRFDNPVLPFNDGVYFASTEKSNIIRGWIFGTTLDSKTQSLLIVNNATNVVIKVCEFQFCNDPFLGVYYHKNNKSWMESEFRVYSSANNCTFEYVSQPFLMDLEGKQGNFKNLREFVFKNIDGYFKIYSKHTPINLVRDLPQGFSALEPLVDLPIGINITRFQTLLALHRSYLTPGDSSSGWTAGAAAYYVGYLQPRTFLLKYNENGTITDAVDCALDPLSETKCTLKSFTVEKGIYQTSNFRVQPTESIVRFPNITNLCPFGEVFNATRFASVYAWNRKRISNCVADYSVLYNSASFSTFKCYGVSPTKLNDLCFTNVYADSFVIRGDEVRQIAPGQTGKIADYNYKLPDDFTGCVIAWNSNNLDSKVGGNYNYLYRLFRKSNLKPFERDISTEIYQAGSTPCNGVEGFNCYFPLQSYGFQPTNGVGYQPYRVVVLSFELLHAPATVCGPKKSTNLVKNKCVNFNFNGLTGTGVLTESNKKFLPFQQFGRDIADTTDAVRDPQTLEILDITPCSFGGVSVITPGTNTSNQVAVLYQDVNCTEVPVAIHADQLTPTWRVYSTGSNVFQTRAGCLIGAEHVNNSYECDIPIGAGICASYQTQTNSPRRARSVASQSIIAYTMSLGAENSVAYSNNSIAIPTNFTISVTTEILPVSMTKTSVDCTMYICGDSTECSNLLLQYGSFCTQLNRALTGIAVEQDKNTQEVFAQVKQIYKTPPIKDFGGFNFSQILPDSSKPSKRSFIEDLLFNKVTLADAGFIKQYGDCLGDIAARDLICAQKFNGLTVLPPLLTDEMIAQYTSALLAGTITSGWTFGAGAALQIPFAMQMAYRFNGIGVTQNVLYENQKLIANQFNSAIGKIQDSLSSTASALGKLQDVVNQNAQALNTLVKQLSSNCGAISSVLNDILSRLDKVEAEVQIDRLITCRLQSLQTYVTQQLIRAAEIRASANLAATKMSECVLGQSKRVDFCGKGYHLMSFPQSAPHGVVFLHVTYVPAQEKNFTTAPAICHDGKAHFPREGVFVSNGTHWFVTQRNFYEPQIITTDNTFVSGNCDVVIGIVNNTVYDPLQPELDSFKEELDKYFKNHTSPDVDLGDISGINASVVNIQKEIDRLNEVAKNLNESLIDLQELGKYEQYIKGGGGSDIIKLLNEQVNKEMQSSNLYMSMSSWCYTHSLDGAGLFLFDHAAEEYEHAKKLIIFLNENNVPVQLTSISAPEHKFEGLTQIFQKAYEHEQHISESINNIVDHAIKSKDHATFNFLQWYVAEQHEEEVLFKDILDKIELIGNENHGLYLADQYVKGIAKSRKS

SEQ ID NO: 5418 - protein, 1379 aa, Artificial Sequence
  SARS-CoV-2/Iceland/280/2020__EPI_ISL_417608 spike protein (1-1211)(F970C_G999C) Ferritin construct
MFVFLVLLPLVSSQCVNLTTRTQLPPAYTNSFTRGVYYPDKVFRSSVLHSTQDLFLPFFSNVTWFHAIHVSGTNGTKRFDNPVLPFNDGVYFASTEKSNIIRGWIFGTTLDSKTQSLLIVNNATNVVIKVCEFQFCNDPFLGVYYHKNNKSWMESEFRVYSSANNCTFEYVSQPFLMDLEGKQGNFKNLREFVFKNIDGYFKIYSKHTPINLVRDLPQGFSALEPLVDLPIGINITRFQTLLALHRSYLTPGDSSSGWTAGAAAYYVGYLQPRTFLLKYNENGTITDAVDCALDPLSETKCTLKSFTVEKGIYQTSNFRVQPTESIVRFPNITNLCPFGEVFNATRFASVYAWNRKRISNCVADYSVLYNSASFSTFKCYGVSPTKLNDLCFTNVYADSFVIRGDEVRQIAPGQTGKIADYNYKLPDDFTGCVIAWNSNNLDSKVGGNYNYLYRLFRKSNLKPFERDISTEIYQAGSTPCNGVEGFNCYFPLQSYGFQPTNGVGYQPYRVVVLSFELLHAPATVCGPKKSTNLVKNKCVNFNFNGLTGTGVLTESNKKFLPFQQFGRDIADTTDAVRDPQTLEILDITPCSFGGVSVITPGTNTSNQVAVLYQGVNCTEVPVAIHADQLTPTWRVYSTGSNVFQTRAGCLIGAEHVNNSYECDIPIGAGICASYHTQTNSPRRARSVASQSIIAYTMSLGAENSVAYSNNSIAIPTNFTISVTTEILPVSMTKTSVDCTMYICGDSTECSNLLLQYGSFCTQLNRALTGIAVEQDKNTQEVFAQVKQIYKTPPIKDFGGFNFSQILPDPSKPSKRSFIEDLLFNKVTLADAGFIKQYGDCLGDIAARDLICAQKFNGLTVLPPLLTDEMIAQYTSALLAGTITSGWTFGAGAALQIPFAMQMAYRFNGIGVTQNVLYENQKLIANQFNSAIGKIQDSLSSTASALGKLQDVVNQNAQALNTLVKQLSSNCGAISSVLNDILSRLDKVEAEVQIDRLITCRLQSLQTYVTQQLIRAAEIRASANLAATKMSECVLGQSKRVDFCGKGYHLMSFPQSAPHGVVFLHVTYVPAQEKNFTTAPAICHDGKAHFPREGVFVSNGTHWFVTQRNFYEPQIITTDNTFVSGNCDVVIGIVNNTVYDPLQPELDSFKEELDKYFKNHTSPDVDLGDISGINASVVNIQKEIDRLNEVAKNLNESLIDLQELGKYEQYIKGGGGSDIIKLLNEQVNKEMQSSNLYMSMSSWCYTHSLDGAGLFLFDHAAEEYEHAKKLIIFLNENNVPVQLTSISAPEHKFEGLTQIFQKAYEHEQHISESINNIVDHAIKSKDHATFNFLQWYVAEQHEEEVLFKDILDKIELIGNENHGLYLADQYVKGIAKSRKS

SEQ ID NO: 5419 - protein, 1379 aa, Artificial Sequence; identical to SEQ ID NO: 5374
  SARS-CoV-2/Iceland/247/2020__EPI_ISL_417575 spike protein (1-1211)(F970C_G999C) Ferritin construct

SEQ ID NO: 5420 - protein, 1379 aa, Artificial Sequence
  SARS-CoV-2/Iceland/238/2020__EPI_ISL_417566 spike protein (1-1211)(F970C_G999C) Ferritin construct
MFVFLVLLPLVSSQCVNLTTRTQLPPAYTNSFTRGVYYPDKVFRSSVLHSTQDLFLPFFSNVTWFHAIHVSGTNGTKRFDNPVLPFNDGVYFASTEKSNIIRGWIFGTTLDSKTQSLLIVNNATNVVIKVCEFQFCNDPFLGVYYHKNNKSWMESEFRVYSSANNCTFEYVSQPFLMDLEGKQGNFKNLREFVFKNIDGYFKIYSKHTPINLVRDLPQGFSALEPLVDLPIGINITRFQTLLALHRSYLTPGDSSSGWTAGAAAYYVGYLQPRTFLLKYNENGTITDAVDCALDPLSETKCTLKSFTVEKGIYQTSNFRVQPTESIVRFPNITNLCPFGEVFNATRFASVYAWNRKRISNCVADYSVLYNSASFSTFKCYGVSPTKLNDLCFTNVYADSFVIRGDEVRQIAPGQTGKIADYNYKLPDDFTGCVIAWNSNNLDSKVGGNYNYLYRLFRKSNLKPFERDISTEIYQAGSTPCNGVEGFNCYFPLQSYGFQPTNGVGYQPYRVVVLSFELLHAPATVCGPKKSTNLVKNKCVNFNFNGLTGTGVLTESNKKFLPFQQFGRDIADTTDAVRDPQTLEILDITPCSFGGVSVITPGTNTSNQVAVLYQGVNCTEVPVAIHADQLTPTWRVYSTGSNVFQTRAGCLIGAEHVNNSYECDIPIGAGICASYQTQTNSPRRARSVASQSIIAYTMSLGAENSVAYSNNSIAIPTNFTISVTTEILPVSMTKTSVDCTMYICGDSTECSNLLLQYGSFCTQLNRALTGIAVEQDKNTQEVFAQVKQIYKTPPIKDFGGFNFSQILPDPSKPSKRSFIEDLLFNKVTLADVGFIKQYGDCLGDIAARDLICAQKFNGLTVLPPLLTDEMIAQYTSALLAGTITSGWTFGAGAALQIPFAMQMAYRFNGIGVTQNVLYENQKLIANQFNSAIGKIQDSLSSTASALGKLQDVVNQNAQALNTLVKQLSSNCGAISSVLNDILSRLDKVEAEVQIDRLITCRLQSLQTYVTQQLIRAAEIRASANLAATKMSECVLGQSKRVDFCGKGYHLMSFPQSAPHGVVFLHVTYVPAQEKNFTTAPAICHDGKAHFPREGVFVSNGTHWFVTQRNFYEPQIITTDNTFVSGNCDVVIGIVNNTVYDPLQPELDSFKEELDKYFKNHTSPDVDLGDISGINASVVNIQKEIDRLNEVAKNLNESLIDLQELGKYEQYIKGGGGSDIIKLLNEQVNKEMQSSNLYMSMSSWCYTHSLDGAGLFLFDHAAEEYEHAKKLIIFLNENNVPVQLTSISAPEHKFEGLTQIFQKAYEHEQHISESINNIVDHAIKSKDHATFNFLQWYVAEQHEEEVLFKDILDKIELIGNENHGLYLADQYVKGIAKSRKS

SEQ ID NO: 5421 - protein, 1379 aa, Artificial Sequence
  SARS-CoV-2/Greece/16/2020__EPI_ISL_418265 spike protein (1-1211)(F970C_G999C) Ferritin construct
MFVFLVLLPLVSSQCVNLTTRTQLPPAYTNSFTRGVYYPDKVFRSSVLHSTQDLFLPFFSNVTWFHAIHVSGTNGTKRFDNPVLPFNDGVYFASTEKSNIIRGWIFGTTLDSKTQSLLIVNNATNVVIKVCEFQFCNDPFLGVYYHKNNKSWMESEFRVYSSANNCTFEYVSQPFLMDLEGKQGNFKNLREFVFKNVDGYFKIYSKHTPINLVRDLPQGFSALEPLVDLPIGINITRFQTLLALHRSYLTPGDSSSGWTAGAAAYYVGYLQPRTFLLKYNENGTITDAVDCALDPLSETKCTLKSFTVEKGIYQTSNFRVQPTESIVRFPNITNLCPFGEVFNATRFASVYAWNRKRISNCVADYSVLYNSASFSTFKCYGVSPTKLNDLCFTNVYADSFVIRGDEVRQIAPGQTGKIADYNYKLPDDFTGCVIAWNSNNLDSKVGGNYNYLYRLFRKSNLKPFERDISTEIYQAGSTPCNGVEGFNCYFPLQSYGFQPTNGVGYQPYRVVVLSFELLHAPATVCGPKKSTNLVKNKCVNFNFNGLTGTGVLTESNKKFLPFQQFGRDIADTTDAVRDPQTLEILDITPCSFGGVSVITPGTNTSNQVAVLYQDVNCTEVPVAIHADQLTPTWRVYSTGSNVFQTRAGCLIGAEHVNNSYECDIPIGAGICASYQTQTNSPRRARSVASQSIIAYTMSLGAENSVAYSNNSIAIPTNFTISVTTEILPVSMTKTSVDCTMYICGDSTECSNLLLQYGSFCTQLNRALTGIAVEQDKNTQEVFAQVKQIYKTPPIKDFGGFNFSQILPDPSKPSKRSFIEDLLFNKVTLADAGFIKQYGDCLGDIAARDLICAQKFNGLTVLPPLLTDEMIAQYTSALLAGTITSGWTFGAGAALQIPFAMQMAYRFNGIGVTQNVLYENQKLIANQFNSAIGKIQDSLSSTASALGKLQDVVNQNAQALNTLVKQLSSNCGAISSVLNDILSRLDKVEAEVQIDRLITCRLQSLQTYVTQQLIRAAEIRASANLAATKMSECVLGQSKRVDFCGKGYHLMSFPQSAPHGVVFLHVTYVPAQEKNFTTAPAICHDGKAHFPREGVFVSNGTHWFVTQRNFYEPQIITTDNTFVSGNCDVVIGIVNNTVYDPLQPELDSFKEELDKYFKNHTSPDVDLGDISGINASVVNIQKEIDRLNEVAKNLNESLIDLQELGKYEQYIKGGGGSDIIKLLNEQVNKEMQSSNLYMSMSSWCYTHSLDGAGLFLFDHAAEEYEHAKKLIIFLNENNVPVQLTSISAPEHKFEGLTQIFQKAYEHEQHISESINNIVDHAIKSKDHATFNFLQWYVAEQHEEEVLFKDILDKIELIGNENHGLYLADQYVKGIAKSRKS

SEQ ID NO: 5422 - protein, 1379 aa, Artificial Sequence
  SARS-CoV-2/Iceland/319/2020__EPI_ISL_417648 spike protein (1-1211)(F970C_G999C) Ferritin construct
MFVFLVLLPLVSSQCVNLTTRTQLPPAYTNSFTRGVYYPDKVFRSSVLHSTQDLFLPFFSNVTWFHAIHVSGTNGTKRFDNPVLPFNDGVYFASTEKSNIIRGWIFGTTLDSKTQSLLIVNNATNVVIKVCEFQFCNDPFLGVYYHKNNKSWMESEFRVYSSANNCTFEYVSQPFLIDLEGKQGNFKNLREFVFKNIDGYFKIYSKHTPINLVRDLPQGFSALEPLVDLPIGINITRFQTLLALHRSYLTPGDSSSGWTAGAAAYYVGYLQPRTFLLKYNENGTITDAVDCALDPLSETKCTLKSFTVEKGIYQTSNFRVQPTESIVRFPNITNLCPFGEVFNATRFASVYAWNRKRISNCVADYSVLYNSASFSTFKCYGVSPTKLNDLCFTNVYADSFVIRGDEVRQIAPGQTGKIADYNYKLPDDFTGCVIAWNSNNLDSKVGGNYNYLYRLFRKSNLKPFERDISTEIYQAGSTPCNGVEGFNCYFPLQSYGFQPTNGVGYQPYRVVVLSFELLHAPATVCGPKKSTNLVKNKCVNFNFNGLTGTGVLTESNKKFLPFQQFGRDIADTTDAVRDPQTLEILDITPCSFGGVSVITPGTNTSNQVAVLYQGVNCTEVPVAIHADQLTPTWRVYSTGSNVFQTRAGCLIGAEHVNNSYECDIPIGAGICASYQTQTNSPRRARSVASQSIIAYTMSLGAENSVAYSNNSIAIPTNFTISVTTEILPVSMTKTSVDCTMYICGDSTECSNLLLQYGSFCTQLNRALTGIAVEQDKNTQEVFAQVKQIYKTPPIKDFGGFNFSQILPDPSKPSKRSFIEDLLFNKVTLADAGFIKQYGDCLGDIAARDLICAQKFNGLTVLPPLLTDEMIAQYTSALLAGTITSGWTFGAGAALQIPFAMQMAYRFNGIGVTQNVLYENQKLIANQFNSAIGKIQDSLSSTASALGKLQDVVNQNAQALNTLVKQLSSNCGAISSVLNDILSRLDKVEAEVQIDRLITCRLQSLQTYVTQQLIRAAEIRASANLAATKMSECVLGQSKRVDFCGKGYHLMSFPQSAPHGVVFLHVTYVPAQEKNFTTAPAICHDGKAHFPREGVFVSNGTHWFVTQRNFYEPQIITTDNTFVSGNCDVVIGIVNNTVYDPLQPELDSFKEELDKYFKNHTSPDVDLGDISGINASVVNIQKEIDRLNEVAKNLNESLIDLQELGKYEQYIKGGGGSDIIKLLNEQVNKEMQSSNLYMSMSSWCYTHSLDGAGLFLFDHAAEEYEHAKKLIIFLNENNVPVQLTSISAPEHKFEGLTQIFQKAYEHEQHISESINNIVDHAIKSKDHATFNFLQWYVAEQHEEEVLFKDILDKIELIGNENHGLYLADQYVKGIAKSRKS

SEQ ID NO: 5423 - protein, 1379 aa, Artificial Sequence
  SARS-CoV-2/Congo/94/2020__EPI_ISL_417947 spike protein (1-1211)(F970C_G999C) Ferritin construct
MFVFLVLLPLVSSQCVNLTTRTQLPPAYTNSFTRGVYYPDKVFRSSVLHSTQDLFLPFFSNVTWFHAIHVSGTNGTKRFDNPVLPFNDGVYFASTEKSNIIRGWIFGTTLDSKTQSLLIVNNATNVVIKVCEFQFCNDPFLGVYYHKNNKSWMESEFRVYSSANNCTFEYVSQPFLMDLEGKQGNFKNLREFVFKNIDGYFKIYSKHTPINLVRDLPQGFSALEPLVDLPIGINITRFQTLLALHRSYLTPGDSSSGWTAGAAAYYVGYLQPRTFLLKYNENGTITDAVDCALDPLSETKCTLKSFTVEKGIYQTSNFRVQPTESIVRFPNITNLCPFGEVFNATRFASVYAWNRKRISNCVADYSVLYNSASFSTFKCYGVSPTKLNDLCFTNVYADSFVIRGDEVRQIAPGQTGKIADYNYKLPDDFTGCVIAWNSNNLDSKVGGNYNYLYRLFRKSNLKPFERDISTEIYQAGSTPCNGVEGFNCYFPLQSYGFQPTNGVGYQPYRVVVLSFELLHAPATVCGPKKSTNLVKNKCVNFNFNGLTGTGVLTESNKKFLPFQQFGRDIADTTDAVRDPQTLEILDITPCSFGGVSVITPGTNTSNQVAVLYQGVNCTEVPVAIHADQLTPTWRVYSTGSNVFQTRAGCLIGAEHVNNSYECDIPIGAGICASYQTQTNSPRRARSVASQSIIAYTMSLGAENSVAYSNNSIAIPTNFTISVTTEILPVSMTKTSVDCTMYICGDSTECSNLLLQYGSFCTQLNRALTGIAVEQDKNTQEVFAQVKQIYKTPPIKDFGGFNFSQILPDPSKPSKRSFIEDILFNKVTLADAGFIKQYGDCLGDIAARDLICAQKFNGLTVLPPLLTDEMIAQYTSALLAGTITSGWTFGAGAALQIPFAMQMAYRFNGIGVTQNVLYENQKLIANQFNSAIGKIQDSLSSTASALGKLQDVVNQNAQALNTLVKQLSSNCGAISSVLNDILSRLDKVEAEVQIDRLITCRLQSLQTYVTQQLIRAAEIRASANLAATKMSECVLGQSKRVDFCGKGYHLMSFPQSAPHGVVFLHVTYVPAQEKNFTTAPAICHDGKAHFPREGVFVSNGTHWFVTQRNFYEPQIITTDNTFVSGNCDVVIGIVNNTVYDPLQPELDSFKEELDKYFKNHTSPDVDLGDISGINASVVNIQKEIDRLNEVAKNLNESLIDLQELGKYEQYIKGGGGSDIIKLLNEQVNKEMQSSNLYMSMSSWCYTHSLDGAGLFLFDHAAEEYEHAKKLIIFLNENNVPVQLTSISAPEHKFEGLTQIFQKAYEHEQHISESINNIVDHAIKSKDHATFNFLQWYVAEQHEEEVLFKDILDKIELIGNENHGLYLADQYVKGIAKSRKS

SEQ ID NO: 5424 - protein, 1379 aa, Artificial Sequence
  SARS-CoV-2/Congo/158/2020__EPI_ISL_417950 spike protein (1-1211)(F970C_G999C) Ferritin construct
MFVFLVLLPLVSSQCVNLTTRTQLPPAYTNSFTRGVYYPDKVFRSSVLHSTQDLFLPFFSNVTWFHAIHVSGTNGTKRFDNPVLPFNDGVYFASTEKSNIIRGWIFGTTLDSKTQSLLIVNNATNVVIKVCEFQFCNDPFLGVYYHKNNKSWMESEFRVYSSANNCTFEYVSQPFLMDLEGKQGNFKNLREFVFKNIDGYFKIYSKHTPINLVRDLPQGFSALEPLVDLPIGINITRFQTLLALHRSYLTPGDSSSGWTAGAAAYYVGYLQPRTFLLKYNENGTITDAVDCALDPLSETKCTLKSFTVEKGIYQTSNFRVQPTESIVRFPNITNLCPFGEVFNATRFASVYAWNRKRISNCVADYSVLYNSASFSTFKCYGVSPTKLNDLCFTNVYADSFVIRGDEVRQIAPGQTGKIADYNYKLPDDFTGCVIAWNSNNLDSKVGGNYNYLYRLFRKSNLKPFERDISTEIYQAGSTPCNGVEGFNCYFPLQSYGFQPTNGVGYQPYRVVVLSFELLHAPATVCGPKKSTNLVKNKCVNFNFNGLTGTGVLTESNKKFLPFQQFGRDIADTTDAVRDPQTLEILDITPCSFGGVSVITPGTNTSNQVAVLYQDVNCTEVPVAIHADQLTPTWRVYSTGSNVFQTRAGCLIGAEHVNNSYECDIPIGAGICASYQTQTNSPRRARSVASQSIIAYTMSLGAENSVAYSNNSIAIPTNFTISVTTEILPVSMTKTSVDCTMYICGDSTECSNLLLQYGSFCTQLNRALTGIAVEQDKNTQEVFAQVKQIYKTPPIKDFGGFNFSQILPDPSKPSKRSFIEDLLFNKVTLADAGFIKQYGDCLGDIAARDLICAQKFNGLTVLPPLLTDEMIAQYTSALLAGTITSGWTFGAGAALQIPFAMQMAYRFNGIGVTQNVLYENQKLIANQFNSAIGKIQDSLSSTASALGKLQDVVNQNAQALNTLVKQLSSNCGAISSVLNDILSRLDKVEAEVQIDRLITCRLQSLQTYVTQQLIRAAEIRASANLAATKMSECVLGQSKRVDFCGKGYHLMSFPQSAPHGVVFLHVTYVPAQEKNFTTAPAICHDGKAHFPREGVFVSNGTHWFVTQRNFYEPQIITTDNTFLSGNCDVVIGIVNNTVYDPLQPELDSFKEELDKYFKNHTSPDVDLGDISGINASVVNIQKEIDRLNEVAKNLNESLIDLQELGKYEQYIKGGGGSDIIKLLNEQVNKEMQSSNLYMSMSSWCYTHSLDGAGLFLFDHAAEEYEHAKKLIIFLNENNVPVQLTSISAPEHKFEGLTQIFQKAYEHEQHISESINNIVDHAIKSKDHATFNFLQWYVAEQHEEEVLFKDILDKIELIGNENHGLYLADQYVKGIAKSRKS

SEQ ID NO: 5425 - protein, 1379 aa, Artificial Sequence
  SARS-CoV-2/USA/UT-00034/2020__EPI_ISL_417977 spike protein (1-1211)(F970C_G999C) Ferritin construct
MFVFLVLLPLVSSQCVNLTTRTQLPPAYTNSFTRGVYYPDKVFRSSVLHSTQDLFLPFFSNVTWFHAIHVSGTNGTKRFDNPVLPFNDGVYFASTEKSNIIRGWIFGTTLDSKTQSLLIVNNATNVVIKVCEFQFCNDPFLGVYYYKNNKSWMESEFRVYSSANNCTFEYVSQPFLMDLEGKQGNFKNLREFVFKNIDGYFKIYSKHTPINLVRDLPQGFSALEPLVDLPIGINITRFQTLLALHRSYLTPGDSSSGWTAGAAAYYVGYLQPRTFLLKYNENGTITDAVDCALDPLSETKCTLKSFTVEKGIYQTSNFRVQPTESIVRFPNITNLCPFGEVFNATRFASVYAWNRKRISNCVADYSVLYNSASFSTFKCYGVSPTKLNDLCFTNVYADSFVIRGDEVRQIAPGQTGKIADYNYKLPDDFTGCVIAWNSNNLDSKVGGNYNYLYRLFRKSNLKPFERDISTEIYQAGSTPCNGVEGFNCYFPLQSYGFQPTNGVGYQPYRVVVLSFELLHAPATVCGPKKSTNLVKNKCVNFNFNGLTGTGVLTESNKKFLPFQQFGRDIADTTDAVRDPQTLEILDITPCSFGGVSVITPGTNTSNQVAVLYQGVNCTEVPVAIHADQLTPTWRVYSTGSNVFQTRAGCLIGAEHVNNSYECDIPIGAGICASYQTQTNSPRRARSVASQSIIAYTMSLGAENSVAYSNNSIAIPTNFTISVTTEILPVSMTKTSVDCTMYICGDSTECSNLLLQYGSFCTQLNRALTGIAVEQDKNTQEVFAQVKQIYKTPPIKDFGGFNFSQILPDPSKPSKRSFIEDLLFNKVTLADAGFIKQYGDCLGDIAARDLICAQKFNGLTVLPPLLTDEMIAQYTSALLAGTITSGWTFGAGAALQIPFAMQMAYRFNGIGVTQNVLYENQKLIANQFNSAIGKIQDSLSSTASALGKLQDVVNQNAQALNTLVKQLSSNCGAISSVLNDILSRLDKVEAEVQIDRLITCRLQSLQTYVTQQLIRAAEIRASANLAATKMSECVLGQSKRVDFCGKGYHLMSFPQSAPHGVVFLHVTYVPAQEKNFTTAPAICHDGKAHFPREGVFVSNGTHWFVTQRNFYEPQIITTDNTFVSGNCDVVIGIVNNTVYDPLQPELDSFKEELDKYFKNHTSPDVDLGDISGINASVVNIQKEIDRLNEVAKNLNESLIDLQELGKYEQYIKGGGGSDIIKLLNEQVNKEMQSSNLYMSMSSWCYTHSLDGAGLFLFDHAAEEYEHAKKLIIFLNENNVPVQLTSISAPEHKFEGLTQIFQKAYEHEQHISESINNIVDHAIKSKDHATFNFLQWYVAEQHEEEVLFKDILDKIELIGNENHGLYLADQYVKGIAKSRKS

SEQ ID NO: 5426 - protein, 1379 aa, Artificial Sequence
  SARS-CoV-2/USA/UT-00033/2020__EPI_ISL_417976 spike protein (1-1211)(F970C_G999C) Ferritin construct
MFVFLVLLPLVSSQCVNLTTRTQLPPAYTNSFTRGVYYPDKVFRSSVLHSTQDLFLPFFSNVTWFHAIHVSGTNGTKRFDNPVLPFNDGVYFASTEKSNIIRGWIFGTTLDSKTQSLLIVNNATNVVIKVCEFQFCNDPFLGVYYHKNNKSWMESEFRVYSSANNCTFEYVSQPFLMDLEGKQGNFKNLREFVFKNIDGYFKIYSKHTPINLVRDLPQGFSALEPLVDLPIGINITRFQTLLALHRSYLTPGDSSSGLTAGAAAYYVGYLQPRTFLLKYNENGTITDAVDCALDPLSETKCTLKSFTVEKGIYQTSNFRVQPTESIVRFPNITNLCPFGEVFNATRFASVYAWNRKRISNCVADYSVLYNSASFSTFKCYGVSPTKLNDLCFTNVYADSFVIRGDEVRQIAPGQTGKIADYNYKLPDDFTGCVIAWNSNNLDSKVGGNYNYLYRLFRKSNLKPFERDISTEIYQAGSTPCNGVEGFNCYFPLQSYGFQPTNGVGYQPYRVVVLSFELLHAPATVCGPKKSTNLVKNKCVNFNFNGLTGTGVLTESNKKFLPFQQFGRDIADTTDAVRDPQTLEILDITPCSFGGVSVITPGTNTSNQVAVLYQGVNCTEVPVAIHADQLTPTWRVYSTGSNVFQTRAGCLIGAEHVNNSYECDIPIGAGICASYQTQTNSPRRARSVASQSIIAYTMSLGAENSVAYSNNSIAIPTNFTISVTTEILPVSMTKTSVDCTMYICGDSTECSNLLLQYGSFCTQLNRALTGIAVEQDKNTQEVFAQVKQIYKTPPIKDFGGFNFSQILPDPSKPSKRSFIEDLLFNKVTLADAGFIKQYGDCLGDIAARDLICAQKFNGLTVLPPLLTDEMIAQYTSALLAGTITSGWTFGAGAALQIPFAMQMAYRFNGIGVTQNVLYENQKLIANQFNSAIGKIQDSLSSTASALGKLQDVVNQNAQALNTLVKQLSSNCGAISSVLNDILSRLDKVEAEVQIDRLITCRLQSLQTYVTQQLIRAAEIRASANLAATKMSECVLGQSKRVDFCGKGYHLMSFPQSAPHGVVFLHVTYVPAQEKNFTTAPAICHDGKAHFPREGVFVSNGTHWFVTQRNFYEPQIITTDNTFVSGNCDVVIGIVNNTVYDPLQPELDSFKEELDKYFKNHTSPDVDLGDISGINASVVNIQKEIDRLNEVAKNLNESLIDLQELGKYEQYIKGGGGSDIIKLLNEQVNKEMQSSNLYMSMSSWCYTHSLDGAGLFLFDHAAEEYEHAKKLIIFLNENNVPVQLTSISAPEHKFEGLTQIFQKAYEHEQHISESINNIVDHAIKSKDHATFNFLQWYVAEQHEEEVLFKDILDKIELIGNENHGLYLADQYVKGIAKSRKS

SEQ ID NO: 5427 - protein, 1379 aa, Artificial Sequence
  SARS-CoV-2/USA/WI-13/2020__EPI_ISL_417516 spike protein (1-1211)(F970C_G999C) Ferritin construct
MFVFLVLLPLVSSQCVNLTTRTQLPPAYTNSFTRGVYYPDKVFRSSVLHSTQDLFLPFFSNVTWFHAIHVSGTNGTKRFDNPVLPFNDGVYFASTEKSNIIRGWIFGTTLDSKTQSLLIVNNATNVVIKVCEFQFCNDPFLGVYYHKNNKSWMESEFRVYSSANNCTFEYVSQPFLMDLEGKQGNFKNLREFVFKNIDGYFKIYSKHTPINLVRDLPQGFSALEPLVDLPIGINITRFQTLLALHRSYLTPGDSSSGWTAGAAAYYVGYLQPRTFLLKYNENGTITDAVDCALDPLSETKCTLKSFTVEKGIYQTSNFRVLPTESIVRFPNITNLCPFGEVFNATRFASVYAWNRKRISNCVADYSVLYNSASFSTFKCYGVSPTKLNDLCFTNVYADSFVIRGDEVRQIAPGQTGKIADYNYKLPDDFTGCVIAWNSNNLDSKVGGNYNYLYRLFRKSNLKPFERDISTEIYQAGSTPCNGVEGFNCYFPLQSYGFQPTNGVGYQPYRVVVLSFELLHAPATVCGPKKSTNLVKNKCVNFNFNGLTGTGVLTESNKKFLPFQQFGRDIADTTDAVRDPQTLEILDITPCSFGGVSVITPGTNTSNQVAVLYQGVNCTEVPVAIHADQLTPTWRVYSTGSNVFQTRAGCLIGAEHVNNSYECDIPIGAGICASYQTQTNSPRRARSVASQSIIAYTMSLGAENSVAYSNNSIAIPTNFTISVTTEILPVSMTKTSVDCTMYICGDSTECSNLLLQYGSFCTQLNRALTGIAVEQDKNTQEVFAQVKQIYKTPPIKDFGGFNFSQILPDPSKPSKRSFIEDLLFNKVTLADAGFIKQYGDCLGDIAARDLICAQKFNGLTVLPPLLTDEMIAQYTSALLAGTITSGWTFGAGAALQIPFAMQMAYRFNGIGVTQNVLYENQKLIANQFNSAIGKIQDSLSSTASALGKLQDVVNQNAQALNTLVKQLSSNCGAISSVLNDILSRLDKVEAEVQIDRLITCRLQSLQTYVTQQLIRAAEIRASANLAATKMSECVLGQSKRVDFCGKGYHLMSFPQSAPHGVVFLHVTYVPAQEKNFTTAPAICHDGKAHFPREGVFVSNGTHWFVTQRNFYEPQIITTDNTFVSGNCDVVIGIVNNTVYDPLQPELDSFKEELDKYFKNHTSPDVDLGDISGINASVVNIQKEIDRLNEVAKNLNESLIDLQELGKYEQYIKGGGGSDIIKLLNEQVNKEMQSSNLYMSMSSWCYTHSLDGAGLFLFDHAAEEYEHAKKLIIFLNENNVPVQLTSISAPEHKFEGLTQIFQKAYEHEQHISESINNIVDHAIKSKDHATFNFLQWYVAEQHEEEVLFKDILDKIELIGNENHGLYLADQYVKGIAKSRKS

SEQ ID NO: 5428 - protein, 1378 aa, Artificial Sequence
  SARS-CoV-2/India/1-27/2020__EPI_ISL_413522 spike protein (1-1210)(F969C_G998C) Ferritin construct
MFVFLVLLPLVSSQCVNLTTRTQLPPAYTNSFTRGVYYPDKVFRSSVLHSTQDLFLPFFSNVTWFHAIHVSGTNGTKRFDNPVLPFNDGVYFASTEKSNIIRGWIFGTTLDSKTQSLLIVNNATNVVIKVCEFQFCNDPFLGVYHKNNKSWMESEFRVYSSANNCTFEYVSQPFLMDLEGKQGNFKNLREFVFKNIDGYFKIYSKHTPINLVRDLPQGFSALEPLVDLPIGINITRFQTLLALHRSYLTPGDSSSGWTAGAAAYYVGYLQPRTFLLKYNENGTITDAVDCALDPLSETKCTLKSFTVEKGIYQTSNFRVQPTESIVRFPNITNLCPFGEVFNATRFASVYAWNRKRISNCVADYSVLYNSASFSTFKCYGVSPTKLNDLCFTNVYADSFVIRGDEVIQIAPGQTGKIADYNYKLPDDFTGCVIAWNSNNLDSKVGGNYNYLYRLFRKSNLKPFERDISTEIYQAGSTPCNGVEGFNCYFPLQSYGFQPTNGVGYQPYRVVVLSFELLHAPATVCGPKKSTNLVKNKCVNFNFNGLTGTGVLTESNKKFLPFQQFGRDIADTTDAVRDPQTLEILDITPCSFGGVSVITPGTNTSNQVAVLYQDVNCTEVPVAIHADQLTPTWRVYSTGSNVFQTRAGCLIGAEHVNNSYECDIPIGAGICASYQTQTNSPRRARSVASQSIIAYTMSLGAENSVAYSNNSIAIPTNFTISVTTEILPVSMTKTSVDCTMYICGDSTECSNLLLQYGSFCTQLNRALTGIAVEQDKNTQEVFAQVKQIYKTPPIKDFGGFNFSQILPDPSKPSKRSFIEDLLFNKVTLADAGFIKQYGDCLGDIAARDLICAQKFNGLTVLPPLLTDEMIAQYTSALLAGTITSGWTFGAGAALQIPFAMQMAYRFNGIGVTQNVLYENQKLIANQFNSAIGKIQDSLSSTASALGKLQDVVNQNAQALNTLVKQLSSNCGAISSVLNDILSRLDKVEAEVQIDRLITCRLQSLQTYVTQQLIRAAEIRASANLAATKMSECVLGQSKRVDFCGKGYHLMSFPQSAPHGVVFLHVTYVPAQEKNFTTAPAICHDGKAHFPREGVFVSNGTHWFVTQRNFYEPQIITTDNTFVSGNCDVVIGIVNNTVYDPLQPELDSFKEELDKYFKNHTSPDVDLGDISGINASVVNIQKEIDRLNEVAKNLNESLIDLQELGKYEQYIKGGGGSDIIKLLNEQVNKEMQSSNLYMSMSSWCYTHSLDGAGLFLFDHAAEEYEHAKKLIIFLNENNVPVQLTSISAPEHKFEGLTQIFQKAYEHEQHISESINNIVDHAIKSKDHATFNFLQWYVAEQHEEEVLFKDILDKIELIGNENHGLYLADQYVKGIAKSRKS

SEQ ID NO: 5429 - protein, 1373 aa, Artificial Sequence
  SARS-CoV-2/pangolin/Guangxi/P4L/2017__EPI_ISL_410538 spike protein (1-1205)(F964C_G993C) Ferritin construct
MFVFLFVLPLVSSQCVNLTTRTGIPPGYTNSSTRGVYYPDKVFRSSILHLTQDLFLPFFSNVTWFNTINYQGGFKKFDNPVLPFNDGVYFASTEKSNIIRGWIFGTTLDARTQSLLIVNNATNVVIKVCEFQFCTDPFLGVYYHNNNKTWVENEFRVYSSANNCTFEYISQPFLMDLEGKQGNFKNLREFVFKNVDGYFKIYSKHTPIDLVRDLPRGFAALEPLVDLPIGINITRFQTLLALHRSYLTPGNLESGWTTGAAAYYVGYLQQRTFLLSYNQNGTITDAVDCSLDPLSETKCTLKSLTVEKGIYQTSNFRVQPTISIVRFPNITNLCPFGEVFNASKFASVYAWNRKRISNCVADYSVLYNSTSFSTFKCYGVSPTKLNDLCFTNVYADSFVVKGDEVRQIAPGQTGVIADYNYKLPDDFTGCVIAWNSVKQDALTGGNYGYLYRLFRKSKLKPFERDISTEIYQAGSTPCNGQVGLNCYYPLERYGFHPTTGVNYQPFRVVVLSFELLNGPATVCGPKLSTTLVKDKCVNFNFNGLTGTGVLTTSKKQFLPFQQFGRDISDTTDAVRDPQTLEILDITPCSFGGVSVITPGTNTSNQVAVLYQDVNCTEVPMAIHAEQLTPAWRVYSAGANVFQTRAGCLVGAEHVNNSYECDIPVGAGICASYHSMSSLRSVNQRSIIAYTMSLGAENSVAYSNNSIAIPTNFTISVTTEILPVSMTKTSVDCTMYICGDSIECSNLLLQYGSFCTQLNRALTGIAVEQDKNTQEVFAQVKQIYKTPPIKDFGGFNFSQILPDPSKPSKRSFIEDLLFNKVTLADAGFIKQYGDCLGDIAARDLICAQKFNGLTVLPPLLTDEMIAQYTSALLAGTITSGWTFGAGAALQIPFAMQMAYRFNGIGVTQNVLYENQKLIANQFNSAIGKIQDSLSSTASALGKLQDVVNQNAQALNTLVKQLSSNCGAISSVLNDILSRLDKVEAEVQIDRLITCRLQSLQTYVTQQLIRAAEIRASANLAATKMSECVLGQSKRVDFCGKGYHLMSFPQSAPHGVVFLHVTYVPAQEKNFTTAPAICHEGKAHFPREGVFVSNGTHWFITQRNFYEPQIITTDNTFVSGSCDVVIGIVNNTVYDPLQPELDSFKEELDKYFKNHTSPDVDLGDISGINASVVNIQKEIDRLNEVAKNLNESPIDLQELGKYEQYIKGGGGSDIIKLLNEQVNKEMQSSNLYMSMSSWCYTHSLDGAGLFLFDHAAEEYEHAKKLIIFLNENNVPVQLTSISAPEHKFEGLTQIFQKAYEHEQHISESINNIVDHAIKSKDHATFNFLQWYVAEQHEEEVLFKDILDKIELIGNENHGLYLADQYVKGIAKSRKS

SEQ ID NO: 5430 - protein, 1373 aa, Artificial Sequence
  SARS-CoV-2/pangolin/Guangxi/P5L/2017__EPI_ISL_410540 spike protein (1-1205)(F964C_G993C) Ferritin construct
MFVFLFVLPLVSSQCVNLTTRTGIPPGYTNSSTRGVYYPDKVFRSSILHLTQDLFLPFFSNVTWFNTINYQGGFKKFDNPVLPFNDGVYFASTEKSNIIRGWIFGTTLDARTQSLLIVNNATNVVIKVCEFQFCTDPFLGVYYHNNNKTWVENEFRVYSSANNCTFEYISQPFLMDLEGKQGNFKNLREFVFKNVDGYFKIYSKHTPIDLVRDLPRGFAALEPLVDLPIGINITRFQTLLALHRSYLTPGKLESGWTTGAAAYYVGYLQQRTFLLSYNQNGTITDAVDCSLDPLSETKCTLKSLTVEKGIYQTSNFRVQPTISIVRFPNITNLCPFGEVFNASKFASVYAWNRKRISNCVADYSVLYNSTSFSTFKCYGVSPTKLNDLCFTNVYADSFVVKGDEVRQIAPGQTGVIADYNYKLPDDFTGCVIAWNSVKQDALTGGNYGYLYRLFRKSKLKPFERDISTEIYQAGSTPCNGQVGLNCYYPLERYGFHPTTGVNYQPFRVVVLSFELLNGPATVCGPKLSTTLVKDKCVNFNFNGLTGTGVLTTSKKQFLPFQQFGRDISDTTDAVRDPQTLEILDITPCSFGGVSVITPGTNTSNQVAVLYQDVNCTEVPMAIHAEQLTPAWRVYSAGANVFQTRAGCLVGAEHVNNSYECDIPVGAGICASYHSMSSFRSVNQRSIIAYTMSLGAENSVAYSNNSIAIPTNFTISVTTEILPVSMTKTSVDCTMYICGDSIECSNLLLQYGSFCTQLNRALTGIAVEQDKNTQEVFAQVKQIYKTPPIKDFGGFNFSQILPDPSKPSKRSFIEDLLFNKVTLADAGFIKQYGDCLGDIAARDLICAQKFNGLTVLPPLLTDEMIAQYTSALLAGTITSGWTFGAGAALQIPFAMQMAYRFNGIGVTQNVLYENQKLIANQFNSAIGKIQDSLSSTASALGKLQDVVNQNAQALNTLVKQLSSNCGAISSVLNDILSRLDKVEAEVQIDRLITCRLQSLQTYVTQQLIRAAEIRASANLAATKMSECVLGQSKRVDFCGKGYHLMSFPQSAPHGVVFLHVTYVPAQEKNFTTAPAICHEGKAHFPREGVFVSNGTHWFITQRNFYEPQIITTDNTFVSGSCDVVIGIVNNTVYDPLQPELDSFKEELDKYFKNHTSPDVDLGDISGINASVVNIQKEIDRLNEVAKNLNESLIDLQELGKYEQYIKGGGGSDIIKLLNEQVNKEMQSSNLYMSMSSWCYTHSLDGAGLFLFDHAAEEYEHAKKLIIFLNENNVPVQLTSISAPEHKFEGLTQIFQKAYEHEQHISESINNIVDHAIKSKDHATFNFLQWYVAEQHEEEVLFKDILDKIELIGNENHGLYLADQYVKGIAKSRKS

SEQ ID NO: 5431 - protein, 1373 aa, Artificial Sequence
  SARS-CoV-2/pangolin/Guangxi/P5E/2017__EPI_ISL_410541 spike protein (1-1205)(F964C_G993C) Ferritin construct
MFVFLFVLPLVSSQCVNLTTRTGIPPGYTNSSTRGVYYPDKVFRSSILHLTQDLFLPFFSNVTWFNTITYQGGSKKFDNPVLPFNDGVYFASTEKSNIIRGWIFGTTLDARTQSLLIVNNATNVVIKVCEFQFCTDPFLGVYYHNNNKTWVENEFRVYSSANNCTFEYISQPFLMDLEGKQGNFKNLREFVFKNVDGYFKIYSKHTPIDLVRDLPRGFAALEPLVDLPIGINITRFQTLLALHRSYLTPGKLESGWTTGAAAYYVGYLQQRTFLLSYNQNGTITDAVDCSLDPLSETKCTLKSLTVEKGIYQTSNFRVQPTISIVRFPNITNLCPFGEVFNASKFASVYAWNRKRISNCVADYSVLYNSTSFSTFKCYGVSPTKLNDLCFTNVYADSFVVKGDEVRQIAPGQTGVIADYNYKLPDDFTGCVIAWNSVKQDALTGDNYGYLYRLFRKSKLKPFERDISTEIYQAGSTPCNGQVGLNCYYPLERYGFHPTTGVNYQPFRVVVLSFELLNGPATVCGPKLSTTLVKDKCVNFNFNGLTGTGVLTTSKKQFLPFQQFGRDISDTTDAVRDPQTLEILDITPCSFGGVSVITPGTNTSNQVAVLYQDVNCTEVPMAIHAEQLTPAWRVYSAGANVFQTRAGCLVGAEHVNNSYECDIPVGAGICASYHSMSSFRSVNQRSIIAYTMSLGAENSVAYSNNSIAIPTNFTISVTTEILPVSMTKTSVDCTMYICGDSIECSNLLLQYGSFCTQLNRALTGIAVEQDKNTQEVFAQVKQIYKTPPIKDFGGFNFSQILPDPSKPSKRSFIEDLLFNKVTLADAGFIKQYGDCLGDIAARDLICAQKFNGLTVLPPLLTDEMIAQYTSALLAGTITSGWTFGAGAALQIPFAMQMAYRFNGIGVTQNVLYENQKLIANQFNSAIGKIQDSLSSTASALGKLQDVVNQNAQALNTLVKQLSSNCGAISSVLNDILSRLDKVEAEVQIDRLITCRLQSLQTYVTQQLIRAAEIRASANLAATKMSECVLGQSKRVDFCGKGYHLMSFPQSAPHGVVFLHVTYVPAQEKNFTTAPAICHEGKAHFPREGVFVSNGTHWFITQRNFYEPQIITTDNTFVSGSCDVVIGIVNNTVYDPLQPELDSFKEELDKYFKNHTSPDVDLGDISGINASVVNIQKEIDRLNEVAKNLNESLIDLQELGKYEQYIKGGGGSDIIKLLNEQVNKEMQSSNLYMSMSSWCYTHSLDGAGLFLFDHAAEEYEHAKKLIIFLNENNVPVQLTSISAPEHKFEGLTQIFQKAYEHEQHISESINNIVDHAIKSKDHATFNFLQWYVAEQHEEEVLFKDILDKIELIGNENHGLYLADQYVKGIAKSRKS

SEQ ID NO: 5432 - protein, 1371 aa, Artificial Sequence
  SARS-CoV-2/pangolin/Guangxi/P1E/2017__EPI_ISL_410539 spike protein (1-1203)(F962C_G991C) Ferritin construct
MFVFLFVLPLVSSQCVNLTTRTGIQPGYTNSSTRGVYYPDKVFRSSILHLTQDLFLPFFSNVTWFNTINYQGGFKKFDNPVLPFNDGVYFASTEKSNIIRGWIFGTTLDARTQSLLIVNNATNVVIKVCEFQFCTDPFLGVYYHNNNKTWVENEFRVYSSANNCTFEYISQPFLMDLEGKQGNFKNLREFVFKNVDGYFKIYSKHTPIDLVRDLPRGFAALEPLVDLPIGINITRFQTLLALHRSYLTPGKLESGWTTGAAAYYVGYLQQRTFLLSYNQNGTITDAVDCSLDPLSETKCTLKSLTVEKGIYQTSNFRVQPTISIVRFPNITNLCPFGEVFNASKFASVYAWNRKRISNCVADYSVLYNSTSFSTFKCYGVSPTKLNDLCFTNVYADSFVVKGDEVRQIAPGQTGVIADYNYKLPDDFTGCVIAWNSVKQDALTGGNYLYRLFRKSKLKPFERDISTEIYQAGSTPCNGQVGLNCYYPLERYGFHPTTGVNYQPFRVVVLSFELLNGPATVCGPKLSTTLVKDKCVNFNFNGLTGTGVLTTSKKQFLPFQQFGRDISDTTDAVRDPQTLEILDITPCSFGGVSVITPGTNTSNQVAVLYQDVNCTEVPMAIHAEQLTPAWRVYSAGANVFQTRAGCLVGAEHVNNSYECDIPVGAGICASYHSMSSLRSVNQRSIIAYTMSLGAENSVAYSNNSIAIPTNFTISVTTEILPVSMTKTSVDCTMYICGDSIECSNLLLQYGSFCTQLNRALTGIAVEQDKNTQEVFAQVKQIYKTPPIKDFGGFNFSQILPDPSKPSKRSFIEDLLFNKVTLADAGFIKQYGDCLGDIAARDLICAQKFNGLTVLPPLLTDEMIAQYTSALLAGTITSGWTFGAGAALQIPFAMQMAYRFNGIGVTQNVLYENQKLIANQFNSAIGKIQDSLSSTASALGKLQDVVNQNAQALNTLVKQLSSNCGAISSVLNDILSRLDKVEAEVQIDRLITCRLQSLQTYVTQQLIRAAEIRASANLAATKMSECVLGQSKRVDFCGKGYHLMSFPQSAPHGVVFLHVTYVPAQEKNFTTAPAICHEGKAHFPREGVFVSNGTHWFITQRNFYEPQIITTDNTFVSGSCDVVIGIVNNTVYDPLQPELDSFKEELDKYFKNHTSPDVDLGDISGINASVVNIQKEIDRLNEVAKNLNESLIDLQELGKYEQYIKGGGGSDIIKLLNEQVNKEMQSSNLYMSMSSWCYTHSLDGAGLFLFDHAAEEYEHAKKLIIFLNENNVPVQLTSISAPEHKFEGLTQIFQKAYEHEQHISESINNIVDHAIKSKDHATFNFLQWYVAEQHEEEVLFKDILDKIELIGNENHGLYLADQYVKGIAKSRKS

SEQ ID NO: 5433 - protein, 1379 aa, Artificial Sequence
  SARS-CoV-2/Wuhan/WIV05/2019__EPI_ISL_402128 spike protein (1-1211)(A972C_R995C) Ferritin construct
MFVFLVLLPLVSSQCVNLTTRTQLPPAYTNSFTRGVYYPDKVFRSSVLHSTQDLFLPFFSNVTWFHAIHVSGTNGTKRFDNPVLPFNDGVYFASTEKSNIIRGWIFGTTLDSKTQSLLIVNNATNVVIKVCEFQFCNDPFLGVYYHKNNKSWMESEFRVYSSANNCTFEYVSQPFLMDLEGKQGNFKNLREFVFKNIDGYFKIYSKHTPINLVRDLPQGFSALEPLVDLPIGINITRFQTLLALHRSYLTPGDSSSGWTAGAAAYYVGYLQPRTFLLKYNENGTITDAVDCALDPLSETKCTLKSFTVEKGIYQTSNFRVQPTESIVRFPNITNLCPFGEVFNATRFASVYAWNRKRISNCVADYSVLYNSASFSTFKCYGVSPTKLNDLCFTNVYADSFVIRGDEVRQIAPGQTGKIADYNYKLPDDFTGCVIAWNSNNLDSKVGGNYNYLYRLFRKSNLKPFERDISTEIYQAGSTPCNGVEGFNCYFPLQSYGFQPTNGVGYQPYRVVVLSFELLHAPATVCGPKKSTNLVKNKCVNFNFNGLTGTGVLTESNKKFLPFQQFGRDIADTTDAVRDPQTLEILDITPCSFGGVSVITPGTNTSNQVAVLYQDVNCTEVPVAIHADQLTPTWRVYSTGSNVFQTRAGCLIGAEHVNNSYECDIPIGAGICASYQTQTNSPRRARSVASQSIIAYTMSLGAENSVAYSNNSIAIPTNFTISVTTEILPVSMTKTSVDCTMYICGDSTECSNLLLQYGSFCTQLNRALTGIAVEQDKNTQEVFAQVKQIYKTPPIKDFGGFNFSQILPDPSKPSKRSFIEDLLFNKVTLADAGFIKQYGDCLGDIAARDLICAQKFNGLTVLPPLLTDEMIAQYTSALLAGTITSGWTFGAGAALQIPFAMQMAYRFNGIGVTQNVLYENQKLIANQFNSAIGKIQDSLSSTASALGKLQDVVNQNAQALNTLVKQLSSNFGCISSVLNDILSRLDKVEAEVQIDCLITGRLQSLQTYVTQQLIRAAEIRASANLAATKMSECVLGQSKRVDFCGKGYHLMSFPQSAPHGVVFLHVTYVPAQEKNFTTAPAICHDGKAHFPREGVFVSNGTHWFVTQRNFYEPQIITTDNTFVSGNCDVVIGIVNNTVYDPLQPELDSFKEELDKYFKNHTSPDVDLGDISGINASVVNIQKEIDRLNEVAKNLNESLIDLQELGKYEQYIKGGGGSDIIKLLNEQVNKEMQSSNLYMSMSSWCYTHSLDGAGLFLFDHAAEEYEHAKKLIIFLNENNVPVQLTSISAPEHKFEGLTQIFQKAYEHEQHISESINNIVDHAIKSKDHATFNFLQWYVAEQHEEEVLFKDILDKIELIGNENHGLYLADQYVKGIAKSRKS

SEQ ID NO: 5434 - protein, 1375 aa, Artificial Sequence
  SARS-CoV-2/bat/Yunnan/RaTG13/2013__EPI_ISL_402131 spike protein (1-1207)(A968C_R991C) Ferritin construct
MFVFLVLLPLVSSQCVNLTTRTQLPPAYTNSSTRGVYYPDKVFRSSVLHLTQDLFLPFFSNVTWFHAIHVSGTNGIKRFDNPVLPFNDGVYFASTEKSNIIRGWIFGTTLDSKTQSLLIVNNATNVVIKVCEFQFCNDPFLGVYYHKNNKSWMESEFRVYSSANNCTFEYVSQPFLMDLEGKQGNFKNLREFVFKNIDGYFKIYSKHTPINLVRDLPPGFSALEPLVDLPIGINITRFQTLLALHRSYLTPGDSSSGWTAGAAAYYVGYLQPRTFLLKYNENGTITDAVDCALDPLSETKCTLKSFTVEKGIYQTSNFRVQPTDSIVRFPNITNLCPFGEVFNATTFASVYAWNRKRISNCVADYSVLYNSTSFSTFKCYGVSPTKLNDLCFTNVYADSFVITGDEVRQIAPGQTGKIADYNYKLPDDFTGCVIAWNSKHIDAKEGGNFNYLYRLFRKANLKPFERDISTEIYQAGSKPCNGQTGLNCYYPLYRYGFYPTDGVGHQPYRVVVLSFELLNAPATVCGPKKSTNLVKNKCVNFNFNGLTGTGVLTESNKKFLPFQQFGRDIADTTDAVRDPQTLEILDITPCSFGGVSVITPGTNASNQVAVLYQDVNCTEVPVAIHADQLTPTWRVYSTGSNVFQTRAGCLIGAEHVNNSYECDIPIGAGICASYQTQTNSRSVASQSIIAYTMSLGAENSVAYSNNSIAIPTNFTISVTTEILPVSMTKTSVDCTMYICGDSTECSNLLLQYGSFCTQLNRALTGIAVEQDKNTQEVFAQVKQIYKTPPIKDFGGFNFSQILPDPSKPSKRSFIEDLLFNKVTLADAGFIKQYGDCLGDIAARDLICAQKFNGLTVLPPLLTDEMIAQYTSALLAGTITSGWTFGAGAALQIPFAMQMAYRFNGIGVTQNVLYENQKLIANQFNSAIGKIQDSLSSTASALGKLQDVVNQNAQALNTLVKQLSSNFGCISSVLNDILSRLDKVEAEVQIDCLITGRLQSLQTYVTQQLIRAAEIRASANLAATKMSECVLGQSKRVDFCGKGYHLMSFPQSAPHGVVFLHVTYVPAQEKNFTTAPAICHDGKAHFPREGVFVSNGTHWFVTQRNFYEPQIITTDNTFVSGSCDVVIGIVNNTVYDPLQPELDSFKEELDKYFKNHTSPDVDLGDISGINASVVNIQKEIDRLNEVAKNLNESLIDLQELGKYEQYIKGGGGSDIIKLLNEQVNKEMQSSNLYMSMSSWCYTHSLDGAGLFLFDHAAEEYEHAKKLIIFLNENNVPVQLTSISAPEHKFEGLTQIFQKAYEHEQHISESINNIVDHAIKSKDHATFNFLQWYVAEQHEEEVLFKDILDKIELIGNENHGLYLADQYVKGIAKSRKS

SEQ ID NO: 5435 - protein, 1379 aa, Artificial Sequence
  SARS-CoV-2/Wuhan/HBCDC-HB-01/2019__EPI_ISL_402132 spike protein (1-1211)(A972C_R995C) Ferritin construct
MFVFLVLLPLVSSQCVNLTTRTQLPPAYTNSITRGVYYPDKVFRSSVLHSTQDLFLPFFSNVTWFHAIHVSGTNGTKRFDNPVLPFNDGVYFASTEKSNIIRGWIFGTTLDSKTQSLLIVNNATNVVIKVCEFQFCNDPFLGVYYHKNNKSWMESEFRVYSSANNCTFEYVSQPFLMDLEGKQGNFKNLREFVFKNIDGYFKIYSKHTPINLVRDLPQGFSALEPLVDLPIGINITRFQTLLALHRSYLTPGDSSSGWTAGAAAYYVGYLQPRTFLLKYNENGTITDAVDCALDPLSETKCTLKSFTVEKGIYQTSNFRVQPTESIVRFPNITNLCPFGEVFNATRFASVYAWNRKRISNCVADYSVLYNSASFSTFKCYGVSPTKLNDLCFTNVYADSFVIRGDEVRQIAPGQTGKIADYNYKLPDDFTGCVIAWNSNNLDSKVGGNYNYLYRLFRKSNLKPFERDISTEIYQAGSTPCNGVEGFNCYFPLQSYGFQPTNGVGYQPYRVVVLSFELLHAPATVCGPKKSTNLVKNKCVNFNFNGLTGTGVLTESNKKFLPFQQFGRDIADTTDAVRDPQTLEILDITPCSFGGVSVITPGTNTSNQVAVLYQDVNCTEVPVAIHADQLTPTWRVYSTGSNVFQTRAGCLIGAEHVNNSYECDIPIGAGICASYQTQTNSPRRARSVASQSIIAYTMSLGAENSVAYSNNSIAIPTNFTISVTTEILPVSMTKTSVDCTMYICGDSTECSNLLLQYGSFCTQLNRALTGIAVEQDKNTQEVFAQVKQIYKTPPIKDFGGFNFSQILPDPSKPSKRSFIEDLLFNKVTLADAGFIKQYGDCLGDIAARDLICAQKFNGLTVLPPLLTDEMIAQYTSALLAGTITSGWTFGAGAALQIPFAMQMAYRFNGIGVTQNVLYENQKLIANQFNSAIGKIQDSLSSTASALGKLQDVVNQNAQALNTLVKQLSSNFGCISSVLNDILSRLDKVEAEVQIDCLITGRLQSLQTYVTQQLIRAAEIRASANLAATKMSECVLGQSKRVDFCGKGYHLMSFPQSAPHGVVFLHVTYVPAQEKNFTTAPAICHDGKAHFPREGVFVSNGTHWFVTQRNFYEPQIITTDNTFVSGNCDVVIGIVNNTVYDPLQPELDSFKEELDKYFKNHTSPDVDLGDISGINASVVNIQKEIDRLNEVAKNLNESLIDLQELGKYEQYIKGGGGSDIIKLLNEQVNKEMQSSNLYMSMSSWCYTHSLDGAGLFLFDHAAEEYEHAKKLIIFLNENNVPVQLTSISAPEHKFEGLTQIFQKAYEHEQHISESINNIVDHAIKSKDHATFNFLQWYVAEQHEEEVLFKDILDKIELIGNENHGLYLADQYVKGIAKSRKS

SEQ ID NO: 5436 - protein, 1379 aa, Artificial Sequence
  SARS-CoV-2/Guangdong/20SF028/2020__EPI_ISL_403936 spike protein (1-1211)(A972C_R995C) Ferritin construct
MFVFLVLLPLVSSQCVNLTTRTQLPPAYTNSFTRGVYYPDKVFRSSVLYSTQDLFLPFFSNVTWFHAIHVSGTNGTKRFDNPVLPFNDGVYFASTEKSNIIRGWIFGTTLDSKTQSLLIVNNATNVVIKVCEFQFCNDPFLGVYYHKNNKSWMESEFRVYSSANNCTFEYVSQPFLMDLEGKQGNFKNLREFVFKNIDGYFKIYSKHTPINLVRDLPQGFSALEPLVDLPIGINITRFQTLLALHRSYLTPGDSSSGWTAGAAAYYVGYLQPRTFLLKYNENGTITDAVDCALDPLSETKCTLKSFTVEKGIYQTSNFRVQPTESIVRFPNITNLCPFGEVFNATRFASVYAWNRKRISNCVADYSVLYNSASFSTFKCYGVSPTKLNDLCFTNVYADSFVIRGDEVRQIAPGQTGKIADYNYKLPDDFTGCVIAWNSNNLDSKVGGNYNYLYRLFRKSNLKPFERDISTEIYQAGSTPCNGVEGFNCYFPLQSYGFQPTNGVGYQPYRVVVLSFELLHAPATVCGPKKSTNLVKNKCVNFNFNGLTGTGVLTESNKKFLPFQQFGRDIADTTDAVRDPQTLEILDITPCSFGGVSVITPGTNTSNQVAVLYQDVNCTEVPVAIHADQLTPTWRVYSTGSNVFQTRAGCLIGAEHVNNSYECDIPIGAGICASYQTQTNSPRRARSVASQSIIAYTMSLGAENSVAYSNNSIAIPTNFTISVTTEILPVSMTKTSVDCTMYICGDSTECSNLLLQYGSFCTQLNRALTGIAVEQDKNTQEVFAQVKQIYKTPPIKDFGGFNFSQILPDPSKPSKRSFIEDLLFNKVTLADAGFIKQYGDCLGDIAARDLICAQKFNGLTVLPPLLTDEMIAQYTSALLAGTITSGWTFGAGAALQIPFAMQMAYRFNGIGVTQNVLYENQKLIANQFNSAIGKIQDSLSSTASALGKLQDVVNQNAQALNTLVKQLSSNFGCISSVLNDILSRLDKVEAEVQIDCLITGRLQSLQTYVTQQLIRAAEIRASANLAATKMSECVLGQSKRVDFCGKGYHLMSFPQSAPHGVVFLHVTYVPAQEKNFTTAPAICHDGKAHFPREGVFVSNGTHWFVTQRNFYEPQIITTDNTFVSGNCDVVIGIVNNTVYDPLQPELDSFKEELDKYFKNHTSPDVDLGDISGINASVVNIQKEIDRLNEVAKNLNESLIDLQELGKYEQYIKGGGGSDIIKLLNEQVNKEMQSSNLYMSMSSWCYTHSLDGAGLFLFDHAAEEYEHAKKLIIFLNENNVPVQLTSISAPEHKFEGLTQIFQKAYEHEQHISESINNIVDHAIKSKDHATFNFLQWYVAEQHEEEVLFKDILDKIELIGNENHGLYLADQYVKGIAKSRKS

SEQ ID NO: 5437 - protein, 1379 aa, Artificial Sequence
  SARS-CoV-2/Shenzhen/SZTH-001/2020__EPI_ISL_406592 spike protein (1-1211)(A972C_R995C) Ferritin construct
MFVFLVLLPLVSSQCVNLTTRTQLPPAYTNSFTRGVYYPDKVFRSSVLHSTQDLFLPFFSNVTWFHAIHVSGTNGTKRFDNPVLPFNDGVYFASTEKSNIIRGWIFGTTLDSKTQSLLIVNNATNVVIKVCEFQFCNDPFLGVYYHKNNKSWMESEFRVYSSANNCTFEYVSQPFLMDLEGKQGNFKNLREFVFKNIDGYFKIYSKHTPINLVRDLPQGFSALEPLVDLPIGINITRFQTLLALHRSYLTPGDSSSGWTAGAAAYYVGYLQPRTFLLKYNENGTITDAVDCALDPLSETKCTLKSFTVEKGIYQTSNFRVQPTESIVRFPNITNLCPFGEVFNATRFASVYAWNRKRISNCVADYSVLYNSASFSTFKCYGVSPTKLNDLCFTNVYADSFVIRGDEVRQIAPGQTGKIADYNYKLPDDFTGCVIAWNSNNLDSKVGGNYNYLYRLFRKSNLKPFERDISTEIYQAGSTPCNGVEGFNCYFPLQSYGFQPTNGVGYQPYRVVVLSFELLHAPATVCGPKKSTNLVKNKCVNFNFNGLTGTGVLTESNKKFLPFQQFGRDIADTTDAVRDPQTLEILDITPCSFGGVSVITPGTNTSNQVAVLYQDVNCTEVPVAIHADQLTPTWRVYSTGSNVFQTRAGCLIGAEHVNNSYECDIPIGAGICASYQTQTNSPRRARSVASQSIIAYTMSLGAENSVAYSNNSIAIPTNFTISVTTEILPVSMTKTSVDCTMYICGDSTECSNLLLQYGSFCTQLNRALTGIAVEQDKNTQEVFAQVKQIYKTPPIKDFGGFNFSQILPDPSKPSKRSFIEDLLFNKVTLADAGFIKQYGDCLGDIAARDLICAQKFNGLTVLPPLLTDEMIAQYTSALLAGTITSGWTFGAGAALQIPFAMQMAYRFNGIGVTQNVLYENQKLIANQFNSAIGKIQDSLSSTASALGKLQDVVNQNAQALNTLVKQLSSNFGCISSVLNDILSRLDKVEAEVQIDCLITGRLQSLQTYVTQQLIRAAEIRASANLAATKMSECVLGQSKRVDFCGKGYHLMSFPQSAPHGVVFLHVTYVPAQEKNFTTAPAICHDGKAHFPREGVFVSNGTHWFVTQRNFYEPQIITTDNTFVSGNCDVLIGIVNNTVYDPLQPELDSFKEELDKYFKNHTSPDVDLGDISGINASVVNIQKEIDRLNEVAKNLNESLIDLQELGKYEQYIKGGGGSDIIKLLNEQVNKEMQSSNLYMSMSSWCYTHSLDGAGLFLFDHAAEEYEHAKKLIIFLNENNVPVQLTSISAPEHKFEGLTQIFQKAYEHEQHISESINNIVDHAIKSKDHATFNFLQWYVAEQHEEEVLFKDILDKIELIGNENHGLYLADQYVKGIAKSRKS

SEQ ID NO: 5438 - protein, 1379 aa, Artificial Sequence
  SARS-CoV-2/Shenzhen/SZTH-004/2020__EPI_ISL_406595 spike protein (1-1211)(A972C_R995C) Ferritin construct
MFVFLVLLPLVSSQCVNLTTRTQLPPAYTNSFTRGVYYPDKVFRSSVLHSTQDLFLPFFSNVTWFHAIHVSGTNGTKRFDNPVLPFNDGVYFASTEKSNIIRGWIFGTTLDSKTQSLLIVNNATNVVIKVCEFQFCNDPFLGVYYHKNNKSWMESEFRVYSSANNCTFEYVSQPFLMDLEGKQGNFKNLREFVFKNIDGYFKIYSKHTPINLVRDLPQGFSALEPLVDLPIGINITRFQTLLALHRSYLTPGDSSSGWTAGAAAYYVGYLQPRTFLLKYNENGTITDAVDCALDPLSETKCTLKSFTVEKGIYQTSNFRVQPTESIVRFPNITNLCPFGEVFNATRFASVYAWDRKRISNCVAYYSVLYNSASFSTFKCYGVSPTKLNDLCFTNVYADSFVIRGDEVRQIAPGQTGKIADYNYKLPDDFTGCVIAWNSNNLDSKVGGNYNYLYRLFRKSNLKPFERDISTEIYQAGSTPCNGVEGFNCYFPLQSYGFQPTNGVGYQPYRVVVLSFELLHAPATVCGPKKSTNLVKNKCVNFNFNGLTGTGVLTESNKKFLPFQQFGRDIADTTDAVRDPQTLEILDITPCSFGGVSVITPGTNTSNQVAVLYQDVNCTEVPVAIHADQLTPTWRVYSTGSNVFQTRAGCLIGAEHVNNSYECDIPIGAGICASYQTQTNSPRRARSVASQSIIAYTMSLGAENSVAYSNNSIAIPTNFTISVTTEILPVSMTKTSVDCTMYICGDSTECSNLLLQYGSFCTQLNRALTGIAVEQDKNTQEVFAQVKQIYKTPPIKDFGGFNFSQILPDPSKPSKRSFIEDLLFNKVTLADAGFIKQYGDCLGDIAARDLICAQKFNGLTVLPPLLTDEMIAQYTSALLAGTITSGWTFGAGAALQIPFAMQMAYRFNGIGVTQNVLYENQKLIANQFNSAIGKIQDSLSSTASALGKLQDVVNQNAQALNTLVKQLSSNFGCISSVLNDILSRLDKVEAEVQIDCLITGRLQSLQTYVTQQLIRAAEIRASANLAATKMSECVLGQSKRVDFCGKGYHLMSFPQSAPHGVVFLHVTYVPAQEKNFTTAPAICHDGKAHFPREGVFVSNGTHWFVTQRNFYEPQIITTDNTFVSGNCDVVIGIVNNTVYDPLQPELDSFKEELDKYFKNHTSPDVDLGDISGINASVVNIQKEIDRLNEVAKNLNESLIDLQELGKYEQYIKGGGGSDIIKLLNEQVNKEMQSSNLYMSMSSWCYTHSLDGAGLFLFDHAAEEYEHAKKLIIFLNENNVPVQLTSISAPEHKFEGLTQIFQKAYEHEQHISESINNIVDHAIKSKDHATFNFLQWYVAEQHEEEVLFKDILDKIELIGNENHGLYLADQYVKGIAKSRKS

SEQ ID NO: 5439 - protein, 1379 aa, Artificial Sequence
  SARS-CoV-2/France/IDF0372/2020__EPI_ISL_406596 spike protein (1-1211)(A972C_R995C) Ferritin construct
MFVFLVLLPLVSSQCVNLTTRTQLPPAYTNSFTRGVYYPDKVFRSSVLHSTQDLFLPFFSNVTWFHAIHVSGTNGTKRFDNPVLPFNDGVYFASTEKSNIIRGWIFGTTLDSKTQSLLIVNNATNVVIKVCEFQFCNDPFLGVYYHKNNKSWMESEFRVYSSANNCTFEYVSQPFLMDLEGKQGNFKNLREFVFKNIDGYFKIYSKHTPINLVRDLPQGFSALEPLVDLPIGINITRFQTLLALHRSYLTPGDSSSGWTAGAAAYYVGYLQPRTFLLKYNENGTITDAVDCALDPLSETKCTLKSFTVEKGIYQTSNFRVQPTESIVRFPNITNLCPFGEVFNATRFASVYAWNRKRISNCVADYSFLYNSASFSTFKCYGVSPTKLNDLCFTNVYADSFVIRGDEVRQIAPGQTGKIADYNYKLPDDFTGCVIAWNSNNLDSKVGGNYNYLYRLFRKSNLKPFERDISTEIYQAGSTPCNGVEGFNCYFPLQSYGFQPTNGVGYQPYRVVVLSFELLHAPATVCGPKKSTNLVKNKCVNFNFNGLTGTGVLTESNKKFLPFQQFGRDIADTTDAVRDPQTLEILDITPCSFGGVSVITPGTNTSNQVAVLYQDVNCTEVPVAIHADQLTPTWRVYSTGSNVFQTRAGCLIGAEHVNNSYECDIPIGAGICASYQTQTNSPRRARSVASQSIIAYTMSLGAENSVAYSNNSIAIPTNFTISVTTEILPVSMTKTSVDCTMYICGDSTECSNLLLQYGSFCTQLNRALTGIAVEQDKNTQEVFAQVKQIYKTPPIKDFGGFNFSQILPDPSKPSKRSFIEDLLFNKVTLADAGFIKQYGDCLGDIAARDLICAQKFNGLTVLPPLLTDEMIAQYTSALLAGTITSGWTFGAGAALQIPFAMQMAYRFNGIGVTQNVLYENQKLIANQFNSAIGKIQDSLSSTASALGKLQDVVNQNAQALNTLVKQLSSNFGCISSVLNDILSRLDKVEAEVQIDCLITGRLQSLQTYVTQQLIRAAEIRASANLAATKMSECVLGQSKRVDFCGKGYHLMSFPQSAPHGVVFLHVTYVPAQEKNFTTAPAICHDGKAHFPREGVFVSNGTHWFVTQRNFYEPQIITTDNTFVSGNCDVVIGIVNNTVYDPLQPELDSFKEELDKYFKNHTSPDVDLGDISGINASVVNIQKEIDRLNEVAKNLNESLIDLQELGKYEQYIKGGGGSDIIKLLNEQVNKEMQSSNLYMSMSSWCYTHSLDGAGLFLFDHAAEEYEHAKKLIIFLNENNVPVQLTSISAPEHKFEGLTQIFQKAYEHEQHISESINNIVDHAIKSKDHATFNFLQWYVAEQHEEEVLFKDILDKIELIGNENHGLYLADQYVKGIAKSRKS

SEQ ID NO: 5440 - protein, 1379 aa, Artificial Sequence
  SARS-CoV-2/Australia/VIC01/2020__EPI_ISL_406844 spike protein (1-1211)(A972C_R995C) Ferritin construct
MFVFLVLLPLVSSQCVNLTTRTQLPPAYTNSFTRGVYYPDKVFRSSVLHSTQDLFLPFFSNVTWFHAIHVSGTNGTKRFDNPVLPFNDGVYFASTEKSNIIRGWIFGTTLDSKTQSLLIVNNATNVVIKVCEFQFCNDPFLGVYYHKNNKSWMESEFRVYSSANNCTFEYVSQPFLMDLEGKQGNFKNLREFVFKNIDGYFKIYSKHTPINLVRDLPQGFSALEPLVDLPIGINITRFQTLLALHRRYLTPGDSSSGWTAGAAAYYVGYLQPRTFLLKYNENGTITDAVDCALDPLSETKCTLKSFTVEKGIYQTSNFRVQPTESIVRFPNITNLCPFGEVFNATRFASVYAWNRKRISNCVADYSVLYNSASFSTFKCYGVSPTKLNDLCFTNVYADSFVIRGDEVRQIAPGQTGKIADYNYKLPDDFTGCVIAWNSNNLDSKVGGNYNYLYRLFRKSNLKPFERDISTEIYQAGSTPCNGVEGFNCYFPLQSYGFQPTNGVGYQPYRVVVLSFELLHAPATVCGPKKSTNLVKNKCVNFNFNGLTGTGVLTESNKKFLPFQQFGRDIADTTDAVRDPQTLEILDITPCSFGGVSVITPGTNTSNQVAVLYQDVNCTEVPVAIHADQLTPTWRVYSTGSNVFQTRAGCLIGAEHVNNSYECDIPIGAGICASYQTQTNSPRRARSVASQSIIAYTMSLGAENSVAYSNNSIAIPTNFTISVTTEILPVSMTKTSVDCTMYICGDSTECSNLLLQYGSFCTQLNRALTGIAVEQDKNTQEVFAQVKQIYKTPPIKDFGGFNFSQILPDPSKPSKRSFIEDLLFNKVTLADAGFIKQYGDCLGDIAARDLICAQKFNGLTVLPPLLTDEMIAQYTSALLAGTITSGWTFGAGAALQIPFAMQMAYRFNGIGVTQNVLYENQKLIANQFNSAIGKIQDSLSSTASALGKLQDVVNQNAQALNTLVKQLSSNFGCISSVLNDILSRLDKVEAEVQIDCLITGRLQSLQTYVTQQLIRAAEIRASANLAATKMSECVLGQSKRVDFCGKGYHLMSFPQSAPHGVVFLHVTYVPAQEKNFTTAPAICHDGKAHFPREGVFVSNGTHWFVTQRNFYEPQIITTDNTFVSGNCDVVIGIVNNTVYDPLQPELDSFKEELDKYFKNHTSPDVDLGDISGINASVVNIQKEIDRLNEVAKNLNESLIDLQELGKYEQYIKGGGGSDIIKLLNEQVNKEMQSSNLYMSMSSWCYTHSLDGAGLFLFDHAAEEYEHAKKLIIFLNENNVPVQLTSISAPEHKFEGLTQIFQKAYEHEQHISESINNIVDHAIKSKDHATFNFLQWYVAEQHEEEVLFKDILDKIELIGNENHGLYLADQYVKGIAKSRKS

SEQ ID NO: 5441 - protein, 1379 aa, Artificial Sequence
  SARS-CoV-2/Germany/BavPat1/2020__EPI_ISL_406862 spike protein (1-1211)(A972C_R995C) Ferritin construct
MFVFLVLLPLVSSQCVNLTTRTQLPPAYTNSFTRGVYYPDKVFRSSVLHSTQDLFLPFFSNVTWFHAIHVSGTNGTKRFDNPVLPFNDGVYFASTEKSNIIRGWIFGTTLDSKTQSLLIVNNATNVVIKVCEFQFCNDPFLGVYYHKNNKSWMESEFRVYSSANNCTFEYVSQPFLMDLEGKQGNFKNLREFVFKNIDGYFKIYSKHTPINLVRDLPQGFSALEPLVDLPIGINITRFQTLLALHRSYLTPGDSSSGWTAGAAAYYVGYLQPRTFLLKYNENGTITDAVDCALDPLSETKCTLKSFTVEKGIYQTSNFRVQPTESIVRFPNITNLCPFGEVFNATRFASVYAWNRKRISNCVADYSVLYNSASFSTFKCYGVSPTKLNDLCFTNVYADSFVIRGDEVRQIAPGQTGKIADYNYKLPDDFTGCVIAWNSNNLDSKVGGNYNYLYRLFRKSNLKPFERDISTEIYQAGSTPCNGVEGFNCYFPLQSYGFQPTNGVGYQPYRVVVLSFELLHAPATVCGPKKSTNLVKNKCVNFNFNGLTGTGVLTESNKKFLPFQQFGRDIADTTDAVRDPQTLEILDITPCSFGGVSVITPGTNTSNQVAVLYQGVNCTEVPVAIHADQLTPTWRVYSTGSNVFQTRAGCLIGAEHVNNSYECDIPIGAGICASYQTQTNSPRRARSVASQSIIAYTMSLGAENSVAYSNNSIAIPTNFTISVTTEILPVSMTKTSVDCTMYICGDSTECSNLLLQYGSFCTQLNRALTGIAVEQDKNTQEVFAQVKQIYKTPPIKDFGGFNFSQILPDPSKPSKRSFIEDLLFNKVTLADAGFIKQYGDCLGDIAARDLICAQKFNGLTVLPPLLTDEMIAQYTSALLAGTITSGWTFGAGAALQIPFAMQMAYRFNGIGVTQNVLYENQKLIANQFNSAIGKIQDSLSSTASALGKLQDVVNQNAQALNTLVKQLSSNFGCISSVLNDILSRLDKVEAEVQIDCLITGRLQSLQTYVTQQLIRAAEIRASANLAATKMSECVLGQSKRVDFCGKGYHLMSFPQSAPHGVVFLHVTYVPAQEKNFTTAPAICHDGKAHFPREGVFVSNGTHWFVTQRNFYEPQIITTDNTFVSGNCDVVIGIVNNTVYDPLQPELDSFKEELDKYFKNHTSPDVDLGDISGINASVVNIQKEIDRLNEVAKNLNESLIDLQELGKYEQYIKGGGGSDIIKLLNEQVNKEMQSSNLYMSMSSWCYTHSLDGAGLFLFDHAAEEYEHAKKLIIFLNENNVPVQLTSISAPEHKFEGLTQIFQKAYEHEQHISESINNIVDHAIKSKDHATFNFLQWYVAEQHEEEVLFKDILDKIELIGNENHGLYLADQYVKGIAKSRKS

SEQ ID NO: 5442 - protein, 1379 aa, Artificial Sequence
  SARS-CoV-2/Wuhan/HBCDC-HB-02/2020__EPI_ISL_412978 spike protein (1-1211)(A972C_R995C) Ferritin construct
MFVFLVLLPLVSSQCVNLTTRTQLPPAYTNSFTRGVYYPDKVFRSSVLHSTQDLFLPFFSNVTWFHAIHVSGTNGTKRFDNPVLPFNDGVYFASTEKSNIIRGWIFGTTLDSKTQSLLIVNNATNVVIKVCEFQFCNDPFLGVYYHKNNKSWMESEFRVYSSANNCTFEYVSQPFLMDLEGKQGNFKNLREFVFKNIDGYFKIYSKHTPINLVRDLPQGFSALEPLVDLPIGINITRFQTLLALHRSYLTPGDSSSGWTAGAAAYYVGYLQPRTFLLKYNENGTITDAVDCALDPLSETKCTLKSFTVEKGIYQTSNFRVQPTESIVRFPNITNLCPFGEVFNATRFASVYAWNRKRISNCVADYSVLYNSASFSTFKCYGVSPTKLNDLCFTNVYADSFVIRGDEVRQIAPGQTGKIADYNYKLPDDFTGCVIAWNSNNLDSKVGGNYNYLYRLFRKSNLKPFERDISTEIYQAGSTPCNGVEGFNCYFPLQSYGFQPTNGVGYQPYRVVVLSFELLHAPATVCGPKKSTNLVKNKCVNFNFNGLTGTGVLTESNKKFLPFQQFGRDIADTTDAVRDPQTLEILDITPCSFGGVSVITPGTNTSNQVAVLYQDVNCTEVPVAIHADQLTPTWRVYSTGSNVFQTRAGCLIGAEHVNNSYECDIPIGAGICASYQTQTNSPRRARSVASQSIIAYTMSLGAENSVAYSNNSIAIPTNFTISVTTEILPVSMTKTSVDCTMYICGDSTECSNFLLQYGSFCTQLNRALTGIAVEQDKNTQEVFAQVKQIYKTPPIKDFGGFNFSQILPDPSKPSKRSFIEDLLFNKVTLADAGFIKQYGDCLGDIAARDLICAQKFNGLTVLPPLLTDEMIAQYTSALLAGTITSGWTFGAGAALQIPFAMQMAYRFNGIGVTQNVLYENQKLIANQFNSAIGKIQDSLSSTASALGKLQDVVNQNAQALNTLVKQLSSNFGCISSVLNDILSRLDKVEAEVQIDCLITGRLQSLQTYVTQQLIRAAEIRASANLAATKMSECVLGQSKRVDFCGKGYHLMSFPQSAPHGVVFLHVTYVPAQEKNFTTAPAICHDGKAHFPREGVFVSNGTHWFVTQRNFYEPQIITTDNTFVSGNCDVVIGIVNNTVYDPLQPELDSFKEELDKYFKNHTSPDVDLGDISGINASVVNIQKEIDRLNEVAKNLNESLIDLQELGKYEQYIKGGGGSDIIKLLNEQVNKEMQSSNLYMSMSSWCYTHSLDGAGLFLFDHAAEEYEHAKKLIIFLNENNVPVQLTSISAPEHKFEGLTQIFQKAYEHEQHISESINNIVDHAIKSKDHATFNFLQWYVAEQHEEEVLFKDILDKIELIGNENHGLYLADQYVKGIAKSRKS

SEQ ID NO: 5443 - protein, 1379 aa, Artificial Sequence
  SARS-CoV-2/Australia/QLD02/2020__EPI_ISL_407896 spike protein (1-1211)(A972C_R995C) Ferritin construct
MFVFLVLLPLVSSQCVNLTTRTQLPPAYTNSFTRGVYYPDKVFRSSVLHSTQDLFLPFFSNVTWFHAIHVSGTNGTKRFDNPVLPFNDGVYFASTEKSNIIRGWIFGTTLDSKTQSLLIVNNATNVVIKVCEFQFCNDPFLGVYYHKNNKSWMESEFRVYSSANNCTFEYVSQPFLMDLEGKQGNFKNLREFVFKNIDGYFKIYSKHTPINLVRDLPQGFSALEPLVDLPIGINITRFQTLLALHRSYLTPGDSSSGWTAGAAAYYVGYLQPRTFLLKYNENGTITDAVDCALDPLSETKCTLKSFTVEKGIYQTSNFRVQPTESIVRFPNITNLCPFGEVFNATRFASVYAWNRKRISNCVADYSVLYNSASFSTFKCYGVSPTKLNDLCFTNVYADSFVIRGDEVRQIAPGQTGKIADYNYKLPDDFTGCVIAWNSNNLDSKVGGNYNYLYRLFRKSNLKPFERDISTEIYQAGSTPCNGVEGFNCYFPLQSYGFQPTNGVGYQPYRVVVLSFELLHAPATVCGPKKSTNLVKNKCVNFNFNGLTGTGVLTESNKKFLPFQQFGRDIADTTDAVRDPQTLEILDITPCSFGGVSVITPGTNTSNQVAVLYQDVNCTEVPVAIHADQLTPTWRVYSTGSNVFQTRAGCLIGAEHVNNSYECDIPIGAGICASYQTQTNSPRRARSVASQSIIAYTMSLGAENSVAYSNNSIAIPTNFTISVTTEILPVSMTKTSVDCTMYICGDSTECSNLLLQYGSFCTQLNRALTGIAVEQDKNTQEVFAQVKQIYKTPPIKDFGGFNFSQILPDPSKPSKRSFIEDLLFNKVTLADAGFIKQYGDCLGDIAARDLICAQKFNGLTVLPPLLTDEMIAQYTSALLAGTITSGWTFGAGAALQIPFAMQMAYRFNGIGVTQNVLYENQKLIANQFNSAIGKIQDSLSSTASALGKLQDVVNQNAQALNTLVKQLSSNFGCISSVLNDILSRLDKVEAEVQIDCLITGRLQSLQTYVTQQLIRAAEIRASANLAATKMSECVLGQSKRVDFCGKGYHLMSFPQSAPHGVVFLHVTYVPAQEKNFTTAPAICHDGKAHFPREGVFVSNGTHWFVTQRNFYEPQIITTDNTFVSGNCDVVIGIVNNTVYDPLQLELDSFKEELDKYFKNHTSPDVDLGDISGINASVVNIQKEIDRLNEVAKNLNESLIDLQELGKYEQYIKGGGGSDIIKLLNEQVNKEMQSSNLYMSMSSWCYTHSLDGAGLFLFDHAAEEYEHAKKLIIFLNENNVPVQLTSISAPEHKFEGLTQIFQKAYEHEQHISESINNIVDHAIKSKDHATFNFLQWYVAEQHEEEVLFKDILDKIELIGNENHGLYLADQYVKGIAKSRKS

SEQ ID NO: 5444 - protein, 1379 aa, Artificial Sequence
  SARS-CoV-2/India/1-31/2020__EPI_ISL_413523 spike protein (1-1211)(A972C_R995C) Ferritin construct
MFVFLVLLPLVSSQCVNLTTRTQLPPAYTNSFTRGVYYPDKVFRSSVLHSTQDLFLPFFSNVTWFHAIHVSGTNGTKRFDNPVLPFNDGVYFASTEKSNIIRGWIFGTTLDSKTQSLLIVNNATNVVIKVCEFQFCNDPFLGVYYHKNNKSWMESEFRVYSSANNCTFEYVSQPFLMDLEGKQGNFKNLREFVFKNIDGYFKIYSKHTPINLVRDLPQGFSALEPLVDLPIGINITRFQTLLALHRSYLTPGDSSSGWTAGAAAYYVGYLQPRTFLLKYNENGTITDAVDCALDPLSETKCTLKSFTVEKGIYQTSNFRVQPTESIVRFPNITNLCPFGEVFNATRFASVYAWNRKRISNCVADYSVLYNSASFSTFKCYGVSPTKLNDLCFTNVYADSFVIRGDEVRQIAPGQTGKIADYNYKLPDDFTGCVIAWNSNNLDSKVGGNYNYLYRLFRKSNLKPFERDISTEIYQAGSTPCNGVEGFNCYFPLQSYGFQPTNGVGYQPYRVVVLSFELLHAPATVCGPKKSTNLVKNKCVNFNFNGLTGTGVLTESNKKFLPFQQFGRDIADTTDAVRDPQTLEILDITPCSFGGVSVITPGTNTSNQVAVLYQDVNCTEVPVAIHADQLTPTWRVYSTGSNVFQTRAGCLIGAEHVNNSYECDIPIGAGICASYQTQTNSPRRARSVASQSIIAYTMSLGAENSVAYSNNSIAIPTNFTISVTTEILPVSMTKTSVDCTMYICGDSTECSNLLLQYGSFCTQLNRALTGIAVEQDKNTQEVFAQVKQIYKTPPIKDFGGFNFSQILPDPSKPSKRSFIEDLLFNKVTLADAGFIKQYGDCLGDIAARDLICAQKFNGLTVLPPLLTDEMIAQYTSALLAGTITSGWTFGAGAALQIPFAMQMAYRFNGIGVTQNVLYENQKLIANQFNSVIGKIQDSLSSTASALGKLQDVVNQNAQALNTLVKQLSSNFGCISSVLNDILSRLDKVEAEVQIDCLITGRLQSLQTYVTQQLIRAAEIRASANLAATKMSECVLGQSKRVDFCGKGYHLMSFPQSAPHGVVFLHVTYVPAQEKNFTTAPAICHDGKAHFPREGVFVSNGTHWFVTQRNFYEPQIITTDNTFVSGNCDVVIGIVNNTVYDPLQPELDSFKEELDKYFKNHTSPDVDLGDISGINASVVNIQKEIDRLNEVAKNLNESLIDLQELGKYEQYIKGGGGSDIIKLLNEQVNKEMQSSNLYMSMSSWCYTHSLDGAGLFLFDHAAEEYEHAKKLIIFLNENNVPVQLTSISAPEHKFEGLTQIFQKAYEHEQHISESINNIVDHAIKSKDHATFNFLQWYVAEQHEEEVLFKDILDKIELIGNENHGLYLADQYVKGIAKSRKS

SEQ ID NO: 5445 - protein, 1379 aa, Artificial Sequence
  SARS-CoV-2/Guangdong/GD2020087-P0008/2020__EPI_ISL_413863 spike protein (1-1211)(A972C_R995C) Ferritin construct
MFVFLVLLPLVSSQCVNLTTRTQLPPAYTNSFTRGVYYPDKVFRSSVLHSTQDLFLPFFSNVTWFHAIHVSGTNGTKRFDNPVLPFNDGVYFASTEKSNIIRGWIFGTTLDSKTQSLLIVNNATNVVIKVCEFQFCNDPFLGVYYHKNNKSWMESEFRVYSSANNCTFEYVSQPFLMDLEGKQGNFKNLREFVFKNIDGYFKIYSKHTPINLVRDLPQGFSALEPLVDLPIGINITRFQTLLALHRSYLTPGDSSSGWTAGAAAYYVGYLQPRTFLLKYNENGTITDAVDCALDPLSETKCTLKSFTVEKGIYQTSNFRVQPTESIVRFPNITNLCPFGEVFNATRFASVYAWNRKRISNCVADYSVLYNSASFSTFKCYGVSPTKLNDLCFTNVYADSFVIRGDEVREIAPGQTGKIADYNYKLPDDFTGCVIAWNSNNLDSKVGGNYNYLYRLFRKSNLKPFERDISTEIYQAGSTPCNGVEGFNCYFPLQSYGFQPTNGVGYQPYRVVVLSFELLHAPATVCGPKKSTNLVKNKCVNFNFNGLTGTGVLTESNKKFLPFQQFGRDIADTTDAVRDPQTLEILDITPCSFGGVSVITPGTNTSNQVAVLYQDVNCTEVPVAIHADQLTPTWRVYSTGSNVFQTRAGCLIGAEHVNNSYECDIPIGAGICASYQTQTNSPRRARSVASQSIIAYTMSLGAENSVAYSNNSIAIPTNFTISVTTEILPVSMTKTSVDCTMYICGDSTECSNLLLQYGSFCTQLNRALTGIAVEQDKNTQEVFAQVKQIYKTPPIKDFGGFNFSQILPDPSKPSKRSFIEDLLFNKVTLADAGFIKQYGDCLGDIAARDLICAQKFNGLTVLPPLLTDEMIAQYTSALLAGTITSGWTFGAGAALQIPFAMQMAYRFNGIGVTQNVLYENQKLIANQFNSAIGKIQDSLSSTASALGKLQDVVNQNAQALNTLVKQLSSNFGCISSVLNDILSRLDKVEAEVQIDCLITGRLQSLQTYVTQQLIRAAEIRASANLAATKMSECVLGQSKRVDFCGKGYHLMSFPQSAPHGVVFLHVTYVPAQEKNFTTAPAICHDGKAHFPREGVFVSNGTHWFVTQRNFYEPQIITTDNTFVSGNCDVVIGIVNNTVYDPLQPELDSFKEELDKYFKNHTSPDVDLGDISGINASVVNIQKEIDRLNEVAKNLNESLIDLQELGKYEQYIKGGGGSDIIKLLNEQVNKEMQSSNLYMSMSSWCYTHSLDGAGLFLFDHAAEEYEHAKKLIIFLNENNVPVQLTSISAPEHKFEGLTQIFQKAYEHEQHISESINNIVDHAIKSKDHATFNFLQWYVAEQHEEEVLFKDILDKIELIGNENHGLYLADQYVKGIAKSRKS

SEQ ID NO: 5446 - protein, 1379 aa, Artificial Sequence
  SARS-CoV-2/Sweden/01/2020__EPI_ISL_411951 spike protein (1-1211)(A972C_R995C) Ferritin construct
MFVFLVLLPLVSSQCVNLTTRTQLPPAYTNSFTRGVYYPDKVFRSSVLHSTQDLFLPFFSNVTWFHAIHVSGTNGTKRFDNPVLPFNDGVYFASTEKSNIIRGWIFGTTLDSKTQSLLIVNNATNVVIKVCEFQFCNDPFLGVYYHKNNKSWMESEFRVYSSANNCTFEYVSQPFLMDLEGKQGNFKNLREFVFKNIDGYFKIYSKHTPINLVRDLPQGFSALEPLVDLPIGINITRFQTLLALHRSYLTPGDSSSGWTAGAAAYYVGYLQPRTFLLKYNENGTITDAVDCALDPLSETKCTLKSFTVEKGIYQTSNFRVQPTESIVRFPNITNLCPFGEVFNATRFASVYAWNRKRISNCVADYSVLYNSASFSTFKCYGVSPTKLNDLCFTNVYADSFVIRGDEVRQIAPGQTGKIADYNYKLPDDFTGCVIAWNSNNLDSKVGGNYNYLYRLFRKSNLKPFERDISTEIYQAGSTPCNGVEGFNCYFPLQSYGFQPTNGVGYQPYRVVVLSFELLHAPATVCGPKKSTNLVKNKCVNFNFNGLTGTGVLTESNKKFLPFQQFGRDIADTTDAVRDPQTLEILDITPCSFGGVSVITPGTNTSNQVAVLYQDVNCTEVPVAIHADQLTPTWRVYSTGSNVFQTRAGCLIGAEHVNNSYECDIPIGAGICASYQTQTNSPRRARSVASQSIIAYTMSLGAENSVAYSNNSIAIPTNFTISVTTEILPVSMTKTSVDCTMYICGDSTECSNLLLQYGSFCTQLNRALTGIAVEQDKNTQEVFAQVKQIYKTPPIKDCGGFNFSQILPDPSKPSKRSFIEDLLFNKVTLADAGFIKQYGDCLGDIAARDLICAQKFNGLTVLPPLLTDEMIAQYTSALLAGTITSGWTFGAGAALQIPFAMQMAYRFNGIGVTQNVLYENQKLIANQFNSAIGKIQDSLSSTASALGKLQDVVNQNAQALNTLVKQLSSNFGCISSVLNDILSRLDKVEAEVQIDCLITGRLQSLQTYVTQQLIRAAEIRASANLAATKMSECVLGQSKRVDFCGKGYHLMSFPQSAPHGVVFLHVTYVPAQEKNFTTAPAICHDGKAHFPREGVFVSNGTHWFVTQRNFYEPQIITTDNTFVSGNCDVVIGIVNNTVYDPLQPELDSFKEELDKYFKNHTSPDVDLGDISGINASVVNIQKEIDRLNEVAKNLNESLIDLQELGKYEQYIKGGGGSDIIKLLNEQVNKEMQSSNLYMSMSSWCYTHSLDGAGLFLFDHAAEEYEHAKKLIIFLNENNVPVQLTSISAPEHKFEGLTQIFQKAYEHEQHISESINNIVDHAIKSKDHATFNFLQWYVAEQHEEEVLFKDILDKIELIGNENHGLYLADQYVKGIAKSRKS

SEQ ID NO: 5447 - protein, 1379 aa, Artificial Sequence
  SARS-CoV-2/Tianmen/HBCDC-HB-07/2020__EPI_ISL_412983 spike protein (1-1211)(A972C_R995C) Ferritin construct
MFVFLVLLPLVSSQCVNLTTRTQLPPAYTNSFTRGVYYPDKVFRSSVLHSTQDLFLPFFSNVTWFHAIHVSGTNGTKRFDNPVLPFNDGVYFASTEKSNIIRGWIFGTTLDSKTQSLLIVNNATNVVIKVCEFQFCNDPFLGVYYHKNNKSWMESEFRVYSSANNCTFEYVSQPFLMDLEGKQGNFKNLREFVFKNIDGYFKIYSKHTPINLVRDLPQGFSALEPLVDLPIGINITRFQTLLALHRSYLTPGDSSSGWTAGAAAYYVGYLQPRTFLLKYNENGTITDAVDCALDPLSETKCTLKSFTVEKGIYQTSNFRVQPTESIVRFPNITNLCPFGEVFNATRFASVYAWNRKRISNCVADYSVLYNSASFSTFKCYGVSPTKLNDLCFTNVYADSFVIRGDEVRQIAPGQTGKIADYNYKLPDDFTGCVIAWNSNNLDSKVGGNYNYLYRLFRKSNLKPFERDISTEIYQAGSTPCNGVEGFNCYFPLQSYGFQPTNGVGYQPYRVVVLSFELLHAPATVCGPKKSTNLVKNKCVNFNFNGLTGTGVLTESNKKFLPFQQFGRDIADTTDAVRDPQTLEILDITPCSFGGVSVITPGTNTSNQVAVLYQDLNCTEVPVAIHADQLTPTWRVYSTGSNVFQTRAGCLIGAEHVNNSYECDIPIGAGICASYQTQTNSPRRARSVASQSIIAYTMSLGAENSVAYSNNSIAIPTNFTISVTTEILPVSMTKTSVDCTMYICGDSTECSNLLLQYGSFCTQLNRALTGIAVEQDKNTQEVFAQVKQIYKTPPIKDFGGFNFSQILPDPSKPSKRSFIEDLLFNKVTLADAGFIKQYGDCLGDIAARDLICAQKFNGLTVLPPLLTDEMIAQYTSALLAGTITSGWTFGAGAALQIPFAMQMAYRFNGIGVTQNVLYENQKLIANQFNSAIGKIQDSLSSTASALGKLQDVVNQNAQALNTLVKQLSSNFGCISSVLNDILSRLDKVEAEVQIDCLITGRLQSLQTYVTQQLIRAAEIRASANLAATKMSECVLGQSKRVDFCGKGYHLMSFPQSAPHGVVFLHVTYVPAQEKNFTTAPAICHDGKAHFPREGVFVSNGTHWFVTQRNFYEPQIITTDNTFVSGNCDVVIGIVNNTVYDPLQPELDSFKEELDKYFKNHTSPDVDLGDISGINASVVNIQKEIDRLNEVAKNLNESLIDLQELGKYEQYIKGGGGSDIIKLLNEQVNKEMQSSNLYMSMSSWCYTHSLDGAGLFLFDHAAEEYEHAKKLIIFLNENNVPVQLTSISAPEHKFEGLTQIFQKAYEHEQHISESINNIVDHAIKSKDHATFNFLQWYVAEQHEEEVLFKDILDKIELIGNENHGLYLADQYVKGIAKSRKS

SEQ ID NO: 5448 - protein, 1379 aa, Artificial Sequence
  SARS-CoV-2/Hong Kong/case42_VM20002493/2020__EPI_ISL_414527 spike protein (1-1211)(A972C_R995C) Ferritin construct
MFVFLVLLPLVSSQCVNLTTRTQLPPAYTNSFTRGVYYPDKVFRSSVLHSTQDLFLPFFSNVTWFHAIHVSGTNGTKRFDNPVLPFNDGVYFASTEKSNIIRGWIFGTTLDSKTQSLLIVNNATNVVIKVCEFQFCNDPFLGVYYHKNNKSWMESEFRVYSSANNCTFEYVSQPFLMDLEGKQGNFKNLREFVFKNIDGYFKIYSKHTPINLVRDLPQGFSALEPLVDLPIGINITRFQTLLALHRSYLTPGDSSSGWTAGAAAYYVGYLQPRTFLLKYNENGTITDAVDCALDPLSETKCTLKSFTVEKGIYQTSNFRVQPTESIVRFPNITNLCPFGEVFNATRFASVYAWNRKRISNCVADYSVLYNSASFSTFKCYGVSPTKLNDLCFTNVYADSFVIRGDEVRQIAPGQTGKIADYNYKLPDDFTGCVIAWNSNNLDSKVGGNYNYLYRLFRKSNLKPFERDISTEIYQAGSTPCNGVEGFNCYFPLQSYGFQPTNGVGYQPYRVVVLSFELLHAPATVCGPKKSTNLVKNKCVNFNFNGLTGTGVLTESNKKFLPFQQFGRDIADTTDAVRDPQTLEILDITPCSFGGVSVITPGTNTSNQVAVLYQDVNCTEVPVAIHADQLTPTWRVYSTGSNVFQTRAGCLIGAEHVNNSYECDIPIGAGICASYQTQTNSPRRARSVASQSIIAYTMSLGAENSVAYSNNSIAIPTNFAISVTTEILPVSMTKTSVDCTMYICGDSTECSNLLLQYGSFCTQLNRALTGIAVEQDKNTQEVFAQVKQIYKTPPIKDFGGFNFSQILPDPSKPSKRSFIEDLLFNKVTLADAGFIKQYGDCLGDIAARDLICAQKFNGLTVLPPLLTDEMIAQYTSALLAGTITSGWTFGAGAALQIPFAMQMAYRFNGIGVTQNVLYENQKLIANQFNSAIGKIQDSLSSTASALGKLQDVVNQNAQALNTLVKQLSSNFGCISSVLNDILSRLDKVEAEVQIDCLITGRLQSLQTYVTQQLIRAAEIRASANLAATKMSECVLGQSKRVDFCGKGYHLMSFPQSAPHGVVFLHVTYVPAQEKNFTTAPAICHDGKAHFPREGVFVSNGTHWFVTQRNFYEPQIITTDNTFVSGNCDVVIGIVNNTVYDPLQPELDSFKEELDKYFKNHTSPDVDLGDISGINASVVNIQKEIDRLNEVAKNLNESLIDLQELGKYEQYIKGGGGSDIIKLLNEQVNKEMQSSNLYMSMSSWCYTHSLDGAGLFLFDHAAEEYEHAKKLIIFLNENNVPVQLTSISAPEHKFEGLTQIFQKAYEHEQHISESINNIVDHAIKSKDHATFNFLQWYVAEQHEEEVLFKDILDKIELIGNENHGLYLADQYVKGIAKSRKS

SEQ ID NO: 5449 - protein, 1379 aa, Artificial Sequence
  SARS-CoV-2/USA/CruiseA-23/2020__EPI_ISL_414482 spike protein (1-1211)(A972C_R995C) Ferritin construct
MFVFLVLLPLVSSQCVNLTTRTQLPPAYTNSFTRGVYYPDKVFRSSVLHSTQDLFLPFFSNVTWFHAIHVSGTNGTKRFDNPVLPFNDGVYFASTEKSNIIRGWIFGTTLDSKTQSLLIVNNATNVVIKVCEFQFCNDPFLGVYYHKNNKSWMESEFRVYSSANNCTFEYVSQPFLMDLEVKQGNFKNLREFVFKNIDGYFKIYSKHTPINLVRDLPQGFSALEPLVDLPIGINITRFQTLLALHRSYLTPGDSSSGWTAGAAAYYVGYLQPRTFLLKYNENGTITDAVDCALDPLSETKCTLKSFTVEKGIYQTSNFRVQPTESIVRFPNITNLCPFGEVFNATRFASVYAWNRKRISNCVADYSVLYNSASFSTFKCYGVSPTKLNDLCFTNVYADSFVIRGDEVRQIAPGQTGKIADYNYKLPDDFTGCVIAWNSNNLDSKVGGNYNYLYRLFRKSNLKPFERDISTEIYQAGSTPCNGVEGFNCYFPLQSYGFQPTNGVGYQPYRVVVLSFELLHAPATVCGPKKSTNLVKNKCVNFNFNGLTGTGVLTESNKKFLPFQQFGRDIADTTDAVRDPQTLEILDITPCSFGGVSVITPGTNTSNQVAVLYQDVNCTEVPVAIHADQLTPTWRVYSTGSNVFQTRAGCLIGAEHVNNSYECDIPIGAGICASYQTQTNSPRRARSVASQSIIAYTMSLGAENSVAYSNNSIAIPTNFTISVTTEILPVSMTKTSVDCTMYICGDSTECSNLLLQYGSFCTQLNRALTGIAVEQDKNTQEVFAQVKQIYKTPPIKDFGGFNFSQILPDPSKPSKRSFIEDLLFNKVTLADAGFIKQYGDCLGDIAARDLICAQKFNGLTVLPPLLTDEMIAQYTSALLAGTITSGWTFGAGAALQIPFAMQMAYRFNGIGVTQNVLYENQKLIANQFNSAIGKIQDSLSSTASALGKLQDVVNQNAQALNTLVKQLSSNFGCISSVLNDILSRLDKVEAEVQIDCLITGRLQSLQTYVTQQLIRAAEIRASANLAATKMSECVLGQSKRVDFCGKGYHLMSFPQSAPHGVVFLHVTYVPAQEKNFTTAPAICHDGKAHFPREGVFVSNGTHWFVTQRNFYEPQIITTDNTFVSGNCDVVIGIVNNTVYDPLQPELDSFKEELDKYFKNHTSPDVDLGDISGINASVVNIQKEIDRLNEVAKNLNESLIDLQELGKYEQYIKGGGGSDIIKLLNEQVNKEMQSSNLYMSMSSWCYTHSLDGAGLFLFDHAAEEYEHAKKLIIFLNENNVPVQLTSISAPEHKFEGLTQIFQKAYEHEQHISESINNIVDHAIKSKDHATFNFLQWYVAEQHEEEVLFKDILDKIELIGNENHGLYLADQYVKGIAKSRKS

SEQ ID NO: 5450 - protein, 1379 aa, Artificial Sequence
  SARS-CoV-2/Hong Kong/case85_VM20002868/2020__EPI_ISL_414519 spike protein (1-1211)(A972C_R995C) Ferritin construct
MFVFLVLVPLVSSQCVNLTTRTQLPPAYTNSFTRGVYYPDKVFRSSVLHSTQDLFLPFFSNVTWFHAIHVSGTNGTKRFDNPVLPFNDGVYFASTEKSNIIRGWIFGTTLDSKTQSLLIVNNATNVVIKVCEFQFCNDPFLGVYYHKNNKSWMESEFRVYSSANNCTFEYVSQPFLMDLEGKQGNFKNLREFVFKNIDGYFKIYSKHTPINLVRDLPQGFSALEPLVDLPIGINITRFQTLLALHRSYLTPGDSSSGWTAGAAAYYVGYLQPRTFLLKYNENGTITDAVDCALDPLSETKCTLKSFTVEKGIYQTSNFRVQPTESIVRFPNITNLCPFGEVFNATRFASVYAWNRKRISNCVADYSVLYNSASFSTFKCYGVSPTKLNDLCFTNVYADSFVIRGDEVRQIAPGQTGKIADYNYKLPDDFTGCVIAWNSNNLDSKVGGNYNYLYRLFRKSNLKPFERDISTEIYQAGSTPCNGVEGFNCYFPLQSYGFQPTNGVGYQPYRVVVLSFELLHAPATVCGPKKSTNLVKNKCVNFNFNGLTGTGVLTESNKKFLPFQQFGRDIADTTDAVRDPQTLEILDITPCSFGGVSVITPGTNTSNQVAVLYQDVNCTEVPVAIHADQLTPTWRVYSTGSNVFQTRAGCLIGAEHVNNSYECDIPIGAGICASYQTQTNSPRRARSVASQSIIAYTMSLGAENSVAYSNNSIAIPTNFTISVTTEILPVSMTKTSVDCTMYICGDSTECSNLLLQYGSFCTQLNRALTGIAVEQDKNTQEVFAQVKQIYKTPPIKDFGGFNFSQILPDPSKPSKRSFIEDLLFNKVTLADAGFIKQYGDCLGDIAARDLICAQKFNGLTVLPPLLTDEMIAQYTSALLAGTITSGWTFGAGAALQIPFAMQMAYRFNGIGVTQNVLYENQKLIANQFNSAIGKIQDSLSSTASALGKLQDVVNQNAQALNTLVKQLSSNFGCISSVLNDILSRLDKVEAEVQIDCLITGRLQSLQTYVTQQLIRAAEIRASANLAATKMSECVLGQSKRVDFCGKGYHLMSFPQSAPHGVVFLHVTYVPAQEKNFTTAPAICHDGKAHFPREGVFVSNGTHWFVTQRNFYEPQIITTDNTFVSGNCDVVIGIVNNTVYDPLQPELDSFKEELDKYFKNHTSPDVDLGDISGINASVVNIQKEIDRLNEVAKNLNESLIDLQELGKYEQYIKGGGGSDIIKLLNEQVNKEMQSSNLYMSMSSWCYTHSLDGAGLFLFDHAAEEYEHAKKLIIFLNENNVPVQLTSISAPEHKFEGLTQIFQKAYEHEQHISESINNIVDHAIKSKDHATFNFLQWYVAEQHEEEVLFKDILDKIELIGNENHGLYLADQYVKGIAKSRKS

SEQ ID NO: 5451 - protein, 1379 aa, Artificial Sequence; identical to SEQ ID NO: 5441
  SARS-CoV-2/England/200990660/2020__EPI_ISL_414523 spike protein (1-1211)(A972C_R995C) Ferritin construct

SEQ ID NO: 5452 - protein, 1379 aa, Artificial Sequence
  SARS-CoV-2/Australia/NSW09/2020__EPI_ISL_413595 spike protein (1-1211)(A972C_R995C) Ferritin construct
MFVFLVLLPLVSSQCVNLTTRTQLPPAYTNSFTRGVYYPDKVFRSSVLHSTQDLFLPFFSNVTWFHAIHVSGTNGTKRFDNPVLPFNDGVYFASTEKSNIIRGWIFGTTLDSKTQSLLIVNNATNVVIKVCEFQFCNDPFLGVYYHKNNKSWMESEFRVYSSANNCTFEYVSQPFLMDLEGKQGNFKNLREFVFKNIDGYFKIYSKHTPINLVRDLPQGFSALEPLVDLPIGINITRFQTLLALHRSYLTPGDSSSGWTAGAAAYYVGYLQPRTFLLKYNENGTITDAVDCALDPLSETKCTLKSFTVEKGIYQTSNFRVQPTESIVRFPNITNLCPFGEVFNATRFASVYAWNRKRISNCVADYSVLYNSASFSTFKCYGVSPTKLNDLCFTNVYADSFVIRGDEVRQIAPGQTGKIADYNYKLPDDFTGCVIAWNSNNLDSKVGGNYNYLYRLFRKSNLKPFERDISTEIYQAGSTPCNGVEGFNCYFPLQSYGFQPTNGVGYQPYRVVVLSFELLHAPATVCGPKKSTNLVKNKCVNFNFNGLTGTGVLTESNKKFLPFQQFGRDIADTTDAVRDPQTLEILDITPCSFGGVSVITPGTNTSNQVAVLYQDVNCTEVPVAIHADQLTPTWRVYSTGSNVFQTRAGCLIGAEHVNNSYECDIPIGAGICASYQTQTNSPRRARSVASQSIIAYTMSLGAENSVAYSNNSIAIPTNFTISVTTEILPVSMTKTSVDCTMYICGDSTECSNLLLQYGSFCTQLNRALTGIAVEQDKNTQEVFAQVKQIYKTPPIKDFGGFNFSQILPDPSKPSKRSFIEDLLFNKVTLADAGFIKQYGDCLGDIAARDLICAQKFNGLTVLPPLLTDEMIAQYTSALLAGTITSGWTFGAGAALQIPFAMQMAYRFNGIGVTQNVLYENQKLIANQFNSAIGKIQDSLSFTASALGKLQDVVNQNAQALNTLVKQLSSNFGCISSVLNDILSRLDKVEAEVQIDCLITGRLQSLQTYVTQQLIRAAEIRASANLAATKMSECVLGQSKRVDFCGKGYHLMSFPQSAPHGVVFLHVTYVPAQEKNFTTAPAICHDGKAHFPREGVFVSNGTHWFVTQRNFYEPQIITTDNTFVSGNCDVVIGIVNNTVYDPLQPELDSFKEELDKYFKNHTSPDVDLGDISGINASVVNIQKEIDRLNEVAKNLNESLIDLQELGKYEQYIKGGGGSDIIKLLNEQVNKEMQSSNLYMSMSSWCYTHSLDGAGLFLFDHAAEEYEHAKKLIIFLNENNVPVQLTSISAPEHKFEGLTQIFQKAYEHEQHISESINNIVDHAIKSKDHATFNFLQWYVAEQHEEEVLFKDILDKIELIGNENHGLYLADQYVKGIAKSRKS

SEQ ID NO: 5453 - protein, 1379 aa, Artificial Sequence; identical to SEQ ID NO: 5433
  SARS-CoV-2/Australia/NSW10/2020__EPI_ISL_413596 spike protein (1-1211)(A972C_R995C) Ferritin construct

SEQ ID NO: 5454 - protein, 1379 aa, Artificial Sequence
  SARS-CoV-2/Switzerland/1000477797/2020__EPI_ISL_413023 spike protein (1-1211)(A972C_R995C) Ferritin construct
MFVFLVLLPLVSSQCVNLTTRTQLPPAYTNSFTRGVYYPDKVFRSSVLHSTQDLFLPFFSNVTWFHAIHVSGTNGTKRFDNPVLPFNDGVYFASTEKSNIIRGWIFGTTLDSKTQSLLIVNNATNVVIKVCEFQFCNDPFLGVYYHKNNKSWMESEFRVYSSANNCTFEYVSQPFLMDLEGKQGNFKNLREFVFKNIDGYFNIYSKHTPINLVRDLPQGFSALEPLVDLPIGINITRFQTLLALHRSYLTPGDSSSGWTAGAAAYYVGYLQPRTFLLKYNENGTITDAVDCALDPLSETKCTLKSFTVEKGIYQTSNFRVQPTESIVRFPNITNLCPFGEVFNATRFASVYAWNRKRISNCVADYSVLYNSASFSTFKCYGVSPTKLNDLCFTNVYADSFVIRGDEVRQIAPGQTGKIADYNYKLPDDFTGCVIAWNSNNLDSKVGGNYNYLYRLFRKSNLKPFERDISTEIYQAGSTPCNGVEGFNCYFPLQSYGFQPTNGVGYQPYRVVVLSFELLHAPATVCGPKKSTNLVKNKCVNFNFNGLTGTGVLTESNKKFLPFQQFGRDIADTTDAVRDPQTLEILDITPCSFGGVSVITPGTNTSNQVAVLYQGVNCTEVPVAIHADQLTPTWRVYSTGSNVFQTRAGCLIGAEHVNNSYECDIPIGAGICASYQTQTNSPRRARSVASQSIIAYTMSLGAENSVAYSNNSIAIPTNFTISVTTEILPVSMTKTSVDCTMYICGDSTECSNLLLQYGSFCTQLNRALTGIAVEQDKNTQEVFAQVKQIYKTPPIKDFGGFNFSQILPDPSKPSKRSFIEDLLFNKVTLADAGFIKQYGDCLGDIAARDLICAQKFNGLTVLPPLLTDEMIAQYTSALLAGTITSGWTFGAGAALQIPFAMQMAYRFNGIGVTQNVLYENQKLIANQFNSAIGKIQDSLSSTASALGKLQDVVNQNAQALNTLVKQLSSNFGCISSVLNDILSRLDKVEAEVQIDCLITGRLQSLQTYVTQQLIRAAEIRASANLAATKMSECVLGQSKRVDFCGKGYHLMSFPQSAPHGVVFLHVTYVPAQEKNFTTAPAICHDGKAHFPREGVFVSNGTHWFVTQRNFYEPQIITTDNTFVSGNCDVVIGIVNNTVYDPLQPELDSFKEELDKYFKNHTSPDVDLGDISGINASVVNIQKEIDRLNEVAKNLNESLIDLQELGKYEQYIKGGGGSDIIKLLNEQVNKEMQSSNLYMSMSSWCYTHSLDGAGLFLFDHAAEEYEHAKKLIIFLNENNVPVQLTSISAPEHKFEGLTQIFQKAYEHEQHISESINNIVDHAIKSKDHATFNFLQWYVAEQHEEEVLFKDILDKIELIGNENHGLYLADQYVKGIAKSRKS

SEQ ID NO: 5455 - protein, 1379 aa, Artificial Sequence
  SARS-CoV-2/Belgium/BA-02291/2020__EPI_ISL_415159 spike protein (1-1211)(A972C_R995C) Ferritin construct
MFVFLVLLPLVSSQCVNLTTRTQLPPAYTNSFTRGVYYPDKVFRSSVLHSTQDLFLPFFSNVTWFHAIHVSGTNGTKRFDNPVLPFNDGVYFASTEKSNIIRGWIFGTTLDSKTQSLLIVNNATNVVIKVCEFQFCNDPFLGVYYHKNNKSWMESEFRVYSSANNCTFEYVSQPFLMDLEGKQGNFKNLREFVFKNIDGYFKIYSKHTPINLVRDLPQGFSALEPLVDLPIGINITRFQTLLALHRSYLTPGDSSSGWTAGAAAYYVGYLQPRTFLLKYNENGTITDAVDCALDPLSETKCTLKSFTVEKGIYQTSNFRVQPTESIVRFPNITNLCPFGEVFNATRFASVYAWNRKRISNCVADYSVLYNSASFSTFKCYGVSPTKLNDLCFTNVYADSFVIRGDEVRQIAPGQTGKIADYNYKLPDDFTGCVIAWNSNNLDSKVGGNYNYLYRLFRRSNLKPFERDISTEIYQAGSTPCNGVEGFNCYFPLQSYGFQPTNGVGYQPYRVVVLSFELLPAPATVCGPKKSTNLVKNKCVNFNFNGLTGTGVLTESNKKFLPFQQFGRDIADTTDAVRDPQTLEILDITPCSFGGVSVITPGTNTSNQVAVLYQGVNCTEVPVAIHADQLTPTWRVYSTGSNVFQTRAGCLIGAEHVNNSYECDIPIGAGICASYQTQTNSPRRARSVASQSIIAYTMSLGAENSVAYSNNSIAIPTNFTISVTTEILPVSMTKTSVDCTMYICGDSTECSNLLLQYGSFCTQLNRALTGIAVEQDKNTQEVFAQVKQIYKTPPIKDFGGFNFSQILPDPSKPSKRSFIEDLLFNKVTLADAGFIKQYGDCLGDIAARDLICAQKFNGLTVLPPLLTDEMIAQYTSALLAGTITSGWTFGAGAALQIPFAMQMAYRFNGIGVTQNVLYENQKLIANQFNSAIGKIQDSLSSAAPALGKLQDVVNQNAQALNTLVKQLSSNFGCISSVLNDILSRLDKVEAEVQIDCLITGRLQSLQTYVTQQLIRAAEIRASANLAATKMSECVLGQSKRVDFCGKGYHLMSFPQSAPHGVVFLHVTYVPAQEKNFTTAPAICHDGKAHFPREGVFVSNGTHWFVTQRNFYEPQIITTDNTFVSGNCDVVIGIVNNTVYDPLQPELDSFKEELDKYFKNHTSPDVDLGDISGINASVVNIQKEIDRLNEVAKNLNESLIDLQELGKYEQYIKGGGGSDIIKLLNEQVNKEMQSSNLYMSMSSWCYTHSLDGAGLFLFDHAAEEYEHAKKLIIFLNENNVPVQLTSISAPEHKFEGLTQIFQKAYEHEQHISESINNIVDHAIKSKDHATFNFLQWYVAEQHEEEVLFKDILDKIELIGNENHGLYLADQYVKGIAKSRKS

SEQ ID NO: 5456 - protein, 1379 aa, Artificial Sequence
  SARS-CoV-2/USA/WA8-UW5/2020__EPI_ISL_413486 spike protein (1-1211)(A972C_R995C) Ferritin construct
MFVFLVLLPLVSSQCVNLTTRTQLPPAYTNSFTRGVYYPDKVFRSSVLHSTQDLFLPFFSNVTWFHAIHVSGTNGTKRFDNPVLPFNDGVYFASTEKSNIIRGWIFGTTLDSKTQSLLIVNNATNVVIKVCEFQFCNDPFLGVYYHKNNKSWMESEFRVYSSANNCTFEYVSQPFLMDLEGKQGNFKNLREFVFKNIDGYFKIYSKHTPINLVRDLPQGFSALEPLVDLPIGINITRFQTLLALHRSYLTPGDSSSGWTAGAAAYYVGYLQPRTFLLKYNENGTITDAVDCALDPLSETKCTLKSFTVEKGIYQTSNFRVQPTESIVRFPNITNLCPFGEVFNATRFASVYAWNRKRISNCVADYSVLYNSASFSTFKCYGVSPTKLNDLCFTNVYADSFVIRGDEVRQIAPGQTGKIADYNYKLPDDFTGCVIAWNSNNLDSKVGGNYNYLYRLFRKSNLKPFERDISTEIYQAGSTPCNGVEGFNCYFPLQSYGFQPTNGVGYQPYRVVVLSFELLHAPATVCGPKKSTNLVKNKCVNFNFNGLTGTGVLTESNKKFLPFQQFGRDIADTTDAVRDPQTLEILDITPCSFGGVSVITPGTNTSNQVAVLYQDVNCTEVPVAIHADQLTPTWRVYSTGSNVFQTRAGCLIGAEYVNNSYECDIPIGAGICASYQTQTNSPRRARSVASQSIIAYTMSLGAENSVAYSNNSIAIPTNFTISVTTEILPVSMTKTSVDCTMYICGDSTECSNLLLQYGSFCTQLNRALTGIAVEQDKNTQEVFAQVKQIYKTPPIKDFGGFNFSQILPDPSKPSKRSFIEDLLFNKVTLADAGFIKQYGDCLGDIAARDLICAQKFNGLTVLPPLLTDEMIAQYTSALLAGTITSGWTFGAGAALQIPFAMQMAYRFNGIGVTQNVLYENQKLIANQFNSAIGKIQDSLSSTASALGKLQDVVNQNAQALNTLVKQLSSNFGCISSVLNDILSRLDKVEAEVQIDCLITGRLQSLQTYVTQQLIRAAEIRASANLAATKMSECVLGQSKRVDFCGKGYHLMSFPQSAPHGVVFLHVTYVPAQEKNFTTAPAICHDGKAHFPREGVFVSNGTHWFVTQRNFYEPQIITTDNTFVSGNCDVVIGIVNNTVYDPLQPELDSFKEELDKYFKNHTSPDVDLGDISGINASVVNIQKEIDRLNEVAKNLNESLIDLQELGKYEQYIKGGGGSDIIKLLNEQVNKEMQSSNLYMSMSSWCYTHSLDGAGLFLFDHAAEEYEHAKKLIIFLNENNVPVQLTSISAPEHKFEGLTQIFQKAYEHEQHISESINNIVDHAIKSKDHATFNFLQWYVAEQHEEEVLFKDILDKIELIGNENHGLYLADQYVKGIAKSRKS

SEQ ID NO: 5457 - protein, 1379 aa, Artificial Sequence
  SARS-CoV-2/England/20102000506/2020__EPI_ISL_415147 spike protein (1-1211)(A972C_R995C) Ferritin construct
MFVFLVLLPLVSSQCVNLTTRTQLPPAYTNSFTRGVYYPDKVFRSSVLHSTQDLFLPFFSNVTWFHAIHVSGTNGTKRFDNPVLPFNDGVYFASTEKSNIIRGWIFGTTLDSKTQSLLIVNNATNVVIKVCEFQFCNDPFLGVYYHKNNKSWMESEFRVYSSANNCTFEYVSQPFLMDLEGKQGNFKNLREFVFKNIDGYFKIYSKHTPINLVRDLPQGFSALEPLVDLPIGINITRFQTLLALHRSYLTPGDSSSGWTAGAAAYYVGYLQPRTFLLKYNENGTITDAVDCALDPLSETKCTLKSFTVEKGIYQTSNFRVQPTESIVRFPNITNLCPFGEVFNATRFASVYAWNRKRISNCVADYSVLYNSASFSTFKCYGVSPTKLNDLCFTNVYADSFVIRGDEVRQIAPGQTGKIADYNYKLPDDFTGCVIAWNSNNLDSKVGGNYNYLYRLFRKSNLKPFERDISTEIYQAGSTPCNGVEGFNCYFPLQSYGFQPTNGVGYQPYRVVVLSFELLHAPATVCGPKKSTNLVKNKCVNFNFNGLTGTGVLTESNKKFLPFQQFGRDIADTTDAVRDPQTLEILDITPCSFGGVSVITPGTNTSNQVAVLYQGVNCTEVPVAIHADQLTPTWRVYSTGSNVFQTRAGCLIGAEHVNNSYECDIPIGAGICASYQTQTNSPRRARSVASQSIIAYTMSLGAENSVAYSNNSIAIPTNFTISVTTEILPVSMTKTSVDCTMYICGDSTECSNLLLQYGSFCTQLNRALTGIAVEQDKNTQEVFAQVKQIYKTPPIKDFGGFNFSQILPDPSKPSKRSFIEDLLFNKVTLADAGFIKQYGYCLGDIAARDLICAQKFNGLTVLPPLLTDEMIAQYTSALLAGTITSGWTFGAGAALQIPFAMQMAYRFNGIGVTQNVLYENQKLIANQFNSAIGKIQDSLSSTASALGKLQDVVNQNAQALNTLVKQLSSNFGCISSVLNDILSRLDKVEAEVQIDCLITGRLQSLQTYVTQQLIRAAEIRASANLAATKMSECVLGQSKRVDFCGKGYHLMSFPQSAPHGVVFLHVTYVPAQEKNFTTAPAICHDGKAHFPREGVFVSNGTHWFVTQRNFYEPQIITTDNTFVSGNCDVVIGIVNNTVYDPLQPELDSFKEELDKYFKNHTSPDVDLGDISGINASVVNIQKEIDRLNEVAKNLNESLIDLQELGKYEQYIKGGGGSDIIKLLNEQVNKEMQSSNLYMSMSSWCYTHSLDGAGLFLFDHAAEEYEHAKKLIIFLNENNVPVQLTSISAPEHKFEGLTQIFQKAYEHEQHISESINNIVDHAIKSKDHATFNFLQWYVAEQHEEEVLFKDILDKIELIGNENHGLYLADQYVKGIAKSRKS

SEQ ID NO: 5458 - protein, 1379 aa, Artificial Sequence
  SARS-CoV-2/Belgium/VAG-03013/2020__EPI_ISL_415155 spike protein (1-1211)(A972C_R995C) Ferritin construct
MFVFLVLLPLVSSQCVNLTTRTQLPPAYTNSFTRGVYYPDKVFRSSVLHSTQDLFLPFFSNVTWFHAIHVSGTNGTKRFDNPVLPFNDGVYFASTEKSNIIRGWIFGTTLDSKTQSLLIVNNATNVVIKVCEFQFCNDPFLGVYYHKNNKSWMESEFRVYSSANNCTFEYVSQPFLMDLEGKQGNFKNLREFVFKNIDGYFKIYSKHTPINLVRDLPQGFSALEPLVDLPIGINITRFQTLLALHRSYLTPGDSSSGWTAGAAAYYVGYLQPRTFLLKYNENGTITDAVDCALDPLSETKCTLKSFTVEKGIYQTSNFRVQPTESIVRFPNITNLCPFGEVFNATRFASVYAWNRKRISNCVADYSVLYNSASFSTFKCYGVSPTKLNDLCFTNVYADSFVIRGDEVRQIAPGQTGKIADYNYKLPDDFTGCVIAWNSNNLDSKVGGNYNYLYRLFRKSNLKPFERDISTEIYQAGSTPCNGVEGFNCYFPLQSYGFQPTNGVGYQPYRVVVLSFELLHAPATVCGPKKSTNLVKNKCVNFNFNGLTGTGVLTESNKKFLPFQQFGRDIADTTDAVRDPQTLEILDITPCSFGGVSVITPGTNTSNQVAVLYQGVNCTEVPVAIHADQLTPTWRVYSTGSNVFQTRAGCLIGAEHVNNSYECDIPIGAGICASYQTQTNSPRRARSVASQSIIAYTMSLGAENSVAYSNNSIAIPTNFTISVTTEILPVSMTKTSVDCTMYICGDSTECSNLLLQYGSFCTQLNRALTGIAVEQDKNTQEVFAQVKQIYKTPPIKDFGGFNFSQILPDPSKPSKRSFIEDLLFNKVTLADAGFIKQYGDCLGDIAARDLICAQKFNGLTVLPPLLTDEMIAQYTSALLAGTITSGWTFGAGAALQIPFAMQMAYRFNGIGVTQNVLYENQKLIANQFNSAIGKIQDSLSSTATALGKLQDVVNQNAQALNTLVKQLSSNFGCISSVLNDILSRLDKVEAEVQIDCLITGRLQSLQTYVTQQLIRAAEIRASANLAATKMSECVLGQSKRVDFCGKGYHLMSFPQSAPHGVVFLHVTYVPAQEKNFTTAPAICHDGKAHFPREGVFVSNGTHWFVTQRNFYEPQIITTDNTFVSGNCDVVIGIVNNTVYDPLQPELDSFKEELDKYFKNHTSPDVDLGDISGINASVVNIQKEIDRLNEVAKNLNESLIDLQELGKYEQYIKGGGGSDIIKLLNEQVNKEMQSSNLYMSMSSWCYTHSLDGAGLFLFDHAAEEYEHAKKLIIFLNENNVPVQLTSISAPEHKFEGLTQIFQKAYEHEQHISESINNIVDHAIKSKDHATFNFLQWYVAEQHEEEVLFKDILDKIELIGNENHGLYLADQYVKGIAKSRKS

SEQ ID NO: 5459 - protein, 1379 aa, Artificial Sequence
  SARS-CoV-2/Belgium/BC-03016/2020__EPI_ISL_415157 spike protein (1-1211)(A972C_R995C) Ferritin construct
MFVFLVLLPLVSSQCVNLTTRTQLPPAYTNSFTRGVYYPDKVFRSSVLHSTQDLFLPFFSNVTWFHAIHVSGTNGTKRFDNPVLPFNDGVYFASTEKSNIIRGWIFGTTLDSKTQSLLIVNNATNVVIKVCEFQFCNDPFLGVYYHKNNKSWMESEFRVYSSANNCTFEYVSQPFLMDLEGKQGNFKNLREFVFKNIDGYFKIYSKHTPINLVRDLPQGFSALEPLVDLPIGINITRFQTLLALHRSYLTPGDSSSGWTAGAAAYYVGYLQPRTFLLKYNENGTITDAVDCALDPLSETKCTLKSFTVEKGIYQTSNFRVQPTESIVRFPNITNLCPFGEVFNATRFASVYAWNRKRISNCVADYSVLYNSASFSTFKCYGVSPTKLNDLCFTNVYADSFVIRGDEVRQIAPGQTGKIADYNYKLPDDFTGCVIAWNSNNLDSKVGGNYNYLYRLFRKSNLKPFERDISTEIYQAGSTPCNGVEGFNCYFPLQSYGFQPTNGVGYQPYRVVVLSFELLHAPATVCGPKKSTNLVKNKCVNFNFNGLTGTGVLTESNKKFLPFQQFGRDIADTTDAVRDPQTLEILDITPCSFGGVSVITPGTNTSNQVAVLYQGVNCTEVPVAIHADQLTPTWRVYSTGSNVFQTRAGCLIGAEHVNNSYECDIPIGAGICASYQTQTNSPRRARSVASQSIIAYTMSLGAENSVAYSNNSIAIPTNFTISVTTEILPVSMTKTSVDCTMYICGDSTECSNLLLQYGSFCTQLNRALTGIAVEQDKNTQEVFAQVKQIYKTPPIKDFGGFNFSQILPDPSKPSKRSFIEDLLFNKVTLADAGFIKQYGDCLGDIAARDLICAQKFNGLTVLPPLLTDEMIAQYTSALLAGTITSGWTFGAGAALQIPFAMQMAYRFNGIGVTQNVLYENQKLIANQFNSAIGKIQDSLSSTAPALGKLQDVVNQNAQALNTLVKQLSSNFGCISSVLNDILSRLDKVEAEVQIDCLITGRLQSLQTYVTQQLIRAAEIRASANLAATKMSECVLGQSKRVDFCGKGYHLMSFPQSAPHGVVFLHVTYVPAQEKNFTTAPAICHDGKAHFPREGVFVSNGTHWFVTQRNFYEPQIITTDNTFVSGNCDVVIGIVNNTVYDPLQPELDSFKEELDKYFKNHTSPDVDLGDISGINASVVNIQKEIDRLNEVAKNLNESLIDLQELGKYEQYIKGGGGSDIIKLLNEQVNKEMQSSNLYMSMSSWCYTHSLDGAGLFLFDHAAEEYEHAKKLIIFLNENNVPVQLTSISAPEHKFEGLTQIFQKAYEHEQHISESINNIVDHAIKSKDHATFNFLQWYVAEQHEEEVLFKDILDKIELIGNENHGLYLADQYVKGIAKSRKS

SEQ ID NO: 5460 - protein, 1379 aa, Artificial Sequence
  SARS-CoV-2/Germany/BavPat3/2020__EPI_ISL_414521 spike protein (1-1211)(A972C_R995C) Ferritin construct
MFVFLVLLPLVSSQCVNLTTRTQLPPAYTNSFTRGVYYPDKVFRSSVLHSTQDLFLPFFSNVTWFHAIHVSGTNGTKRFDNPVLPFNDGVYFASTEKSNIIRGWIFGTTLDSKTQSLLIVNNATNVVIKVCEFQFCNDPFLGVYYHKNNKSWMESEFRVYSSANNCTFEYVSQPFLMDLEGKQGNFKNLREFVFKNIDGYFKIYSKHTPINLVRDLPQGFSALEPLVDLPIGINITRFQTLLALHRSYLTPGDSSSGWTAGAAAYYVGYLQPRTFLLKYNENGTITDAVDCALDPLSETKCTLKSFTVEKGIYQTSNFRVQPTESIVRFPNITNLCPFGEVFNATRFASVYAWNRKRISNCVADYSVLYNSASFSTFKCYGVSPTKLNDLCFTNVYADSFVIRGDEVRQIAPGQTGKIADYNYKLPDDFTGCVIAWNSNNLDSKVGGNYNYLYRLFRKSNLKPFERDISTEIYQAGSTPCNGVEGFNCYFPLQSYGFQPTNGVGYQPYRVVVLSFELLHAPATVCGPKKSTNLVKNKCVNFNFNGLTGTGVLTESNKKFLPFQQFGRDIADTTDAVRDPQTLEILDITPCSFGGVSVITPGTNTSNQVAVLYQDVNCTEVPVAIHADQLTPTWRVYSTGSNVFQTRAGCLIGAEHVNNSYECDIPIGAGICASYQTQTNSPRRARSVASQSIIAYTMSLGAENSVAYSNNSIAIPTNFTISVTTEILPVSMTKTSVDCTMYICGDSTECSNLLLQYGSFCTQLNRALTGIAVEQDKNTQQVFAQVKQIYKTPPIKDFGGFNFSQILPDPSKPSKRSFIEDLLFNKVTLADAGFIKQYGDCLGDIAARDLICAQKFNGLTVLPPLLTDEMIAQYTSALLAGTITSGWTFGAGAALQIPFAMQMAYRFNGIGVTQNVLYENQKLIANQFNSAIGKIQDSLSSTASALGKLQDVVNQNAQALNTLVKQLSSNFGCISSVLNDILSRLDKVEAEVQIDCLITGRLQSLQTYVTQQLIRAAEIRASANLAATKMSECVLGQSKRVDFCGKGYHLMSFPQSAPHGVVFLHVTYVPAQEKNFTTAPAICHDGKAHFPREGVFVSNGTHWFVTQRNFYEPQIITTDNTFVSGNCDVVIGIVNNTVYDPLQPELDSFKEELDKYFKNHTSPDVDLGDISGINASVVNIQKEIDRLNEVAKNLNESLIDLQELGKYEQYIKGGGGSDIIKLLNEQVNKEMQSSNLYMSMSSWCYTHSLDGAGLFLFDHAAEEYEHAKKLIIFLNENNVPVQLTSISAPEHKFEGLTQIFQKAYEHEQHISESINNIVDHAIKSKDHATFNFLQWYVAEQHEEEVLFKDILDKIELIGNENHGLYLADQYVKGIAKSRKS

SEQ ID NO: 5461 - protein, 1379 aa, Artificial Sequence
  SARS-CoV-2/France/HF1805/2020__EPI_ISL_414628 spike protein (1-1211)(A972C_R995C) Ferritin construct
MFVFLVLLPLVSSQCVNLTTRTQLPPAYTNSFTRGVYYPDKVFRSSVLHSTQDLFLPFFSNVTWFHAIHVSGTNGTKRFDNPVLPFNDGVYFASTEKSNIIRGWIFGTTLDSKTQSLLIVNNATNVVIKVCEFQFCNDPFLGVYYHKNNKSWMESEFRVYSSANNCTFEYVSQPFLMDLEGKQGNFKNLREFVFKNIDGYFKIYSKHTPINLVRDLPQGFSALEPLVDLPIGINITRFQTLLALHRSYLTPGDSSSGWTAGAAAYYVGYLQPRTFLLKYNENGTITDAVDCALDPLSETKCTLKSFTVEKGIYQTSNFRVQPTESIVRFPNITNLCPFGEVFNATRFASVYAWNRKRISNCVADYSVLYNSASFSTFKCYGVSPTKLNDLCFTNVYADSFVIRGDEVRQIAPGQTGKIADYNYKLPDDFTGCVIAWNSNNLDSKVGGNYNYLYRLFRKSNLKPFERDISTEIYQAGSTPCNGVEGFNCYFPLQSYGFQPTNGVGYQPYRVVVLSFELLHAPATVCGPKKSTNLVKNKCVNFNFNGLTGTGVLTESNKKFLPFQQFGRDIADTTDAVRDPQTLEILDITPCSFGGVSVITPGTNTSNQVAVLYQGVNCTEVPVAIHADQLTPTWRVYSTGSNVFQTRAGCLIGAEHVNNSYECDIPIGAGICASYQTQTNSPRRARSVASQSIIAYTMSLGAENSVAYSNNSIAIPTNFTISVTTEILPVSMTKTSVDCTMYICGDSTECSNLLLQYGSFCTQLNRALTGIAVEQDKNTQEVFAQVKQIYKTPPIKDFGGFNFSQILPDPSKPSKRSFIEDLLFNKVTLADAGFIKQYGDCLGDIAARDLICAQKFNGLTVLPPLLTDEMIAQYTSALLAGTITSGWTFGAGAALQIPFAMQMAYRFNGIGVTQNVLYENQKLIANQFNSAIGKIQDSLSSTASALGKLQDVVNQNAQALNTLVKQLSSNFGCISSVLNDILSRLDKVEAEVQIDCLITGRLQSLQTYVTQQLIRAAEIRASANLAATKMSECVLGQSKRVDFCGKGYHLMSFPQSAPHGVVFLHVTYVPAQEKNFTTAPAICHDGKAHFPREGVFVSNGTHWFVTQRNFYEPQIITTDNTFVSGNCDVVIGVVNNTVYDPLQPELDSFKEELDKYFKNHTSPDVDLGDISGINASVVNIQKEIDRLNEVAKNLNESLIDLQELGKYEQYIKGGGGSDIIKLLNEQVNKEMQSSNLYMSMSSWCYTHSLDGAGLFLFDHAAEEYEHAKKLIIFLNENNVPVQLTSISAPEHKFEGLTQIFQKAYEHEQHISESINNIVDHAIKSKDHATFNFLQWYVAEQHEEEVLFKDILDKIELIGNENHGLYLADQYVKGIAKSRKS

SEQ ID NO: 5462 - protein, 1379 aa, Artificial Sequence
  SARS-CoV-2/Netherlands/ZuidHolland_9/2020__EPI_ISL_414445 spike protein (1-1211)(A972C_R995C) Ferritin construct
MFVFLVLLPLVSSQCVNLTTRTQLPPAYTNSFTRGVYYPDKVFRSSVLHSTQDLFLPFFSNVTWFHAIHVSGTNGTKRFDNPVLPFNDGVYFASTEKSNIIRGWIFGTTLDSKTQSLLIVNNATNVVIKVCEFQFCNDPFLGVYYHKNNKSWMESEFRVYSSANNCTFEYVSQPFLMDLEGKQGNFKNLREFVFKNIDGYFKIYSKHTPINLVRDLPQGFSALEPLVDLPIGINITRFQTLLALHRSYLTPGDSSSGWTAGAAAYYVGYLQPRTFLLKYNENGTITDAVDCALDPLSETKCTLKSFTVEKGIYQTSNFRVQPTESIVRFPNITNLCPFGEVFNATRFASVYAWNRKRISNCVADYSVLYNSASFSTFKCYGVSPTKLNDLCFTNVYADSFVIRGDEVRQIAPGQTGKIADYNYKLPDDFTGCVIAWNSNNLDSKVGGNYNYLYRLFRKSNLKPFERDISTEIYQAGSTPCNGVEGFNCYFPLQSYGFQPTNGVGYQPYRVVVLSFELLHAPATVCGPKKSTNLVKNKCVNFNFNGLTGTGVLTESNKKFLPFQQFGRDIADTTDAVRDPQTLEILDITPCSFGGVSVITPGTNTSNQVAVLYQGVNCTEVPVAIHADQLTPTWRVYSTGSNVFQTRAGCLIGAEHVNNSYECDIPIGAGICASYQTQTNSPRRARSVASQSIIAYTMSLGAENSVAYSNNSIAIPTNFTISVTTEILPVSMTKTSVDCTMYICGDSTECSNLLLQYGSFCTQLNRALTGIAVEQDKNTQEVFAQVKQIYKTPPIKDFGGFNFSQILPDPSKPSKRSFIEDLLFNKVTLADAGFIKQYGDCLGDIAARDLICVQKFNGLTVLPPLLTDEMIAQYTSALLAGTITSGWTFGAGAALQIPFAMQMAYRFNGIGVTQNVLYENQKLIANQFNSAIGKIQDSLSSTASALGKLQDVVNQNAQALNTLVKQLSSNFGCISSVLNDILSRLDKVEAEVQIDCLITGRLQSLQTYVTQQLIRAAEIRASANLAATKMSECVLGQSKRVDFCGKGYHLMSFPQSAPHGVVFLHVTYVPAQEKNFTTAPAICHDGKAHFPREGVFVSNGTHWFVTQRNFYEPQIITTDNTFVSGNCDVVIGIVNNTVYDPLQPELDSFKEELDKYFKNHTSPDVDLGDISGINASVVNIQKEIDRLNEVAKNLNESLIDLQELGKYEQYIKGGGGSDIIKLLNEQVNKEMQSSNLYMSMSSWCYTHSLDGAGLFLFDHAAEEYEHAKKLIIFLNENNVPVQLTSISAPEHKFEGLTQIFQKAYEHEQHISESINNIVDHAIKSKDHATFNFLQWYVAEQHEEEVLFKDILDKIELIGNENHGLYLADQYVKGIAKSRKS

SEQ ID NO: 5463 - protein, 1379 aa, Artificial Sequence
  SARS-CoV-2/Finland/FIN03032020A/2020__EPI_ISL_413602 spike protein (1-1211)(A972C_R995C) Ferritin construct
MFVFLVLLPLVSSQCVNLTTRTQLPPAYTNSFTRGVYYPDKVFRSSVLHSTQDLFLPFFSNVTWFHAIHVSGTNGTKRFDNPVLPFNDGVYFASTEKSNIIRGWIFGTTLDSKTQSLLIVNNATNVVIKVCEFQFCNDPFLGVYYHKNNKSWMESEFRVYSSANNCTFEYVSQPFLMDLEGKQGNFKNLREFVFKNIDGYFKIYSKHTPINLVRDLPQGFSALEPLVDLPIGINITRFQTLLALHRSYLTPGDSSSGWTAGAAAYYVGYLQPRTFLLKYNENGTITDAVDCALDPLSETKCTLKSFTVEKGIYQTSNFRVQPTESIVRFPNITNLCPFGEVFNATRFASVYAWNRKRISNCVADYSVLYNSASFSTFKCYGVSPTKLNDLCFTNVYADSFVIRGDEVRQIAPGQTGKIADYNYKLPDDFTGCVISWNSNNLDSKVGGNYNYLYRLFRKSNLKPFERDISTEIYQAGSTPCNGVEGFNCYFPLQSYGFQPTNGVGYQPYRVVVLSFELLHAPATVCGPKKSTNLVKNKCVNFNFNGLTGTGVLTESNKKFLPFQQFGRDIADTTDAVRDPQTLEILDITPCSFGGVSVITPGTNTSNQVAVLYQGVNCTEVPVAIHADQLTPTWRVYSTGSNVFQTRAGCLIGAEHVNNSYECDIPIGAGICASYQTQTNSPRRARSVASQSIIAYTMSLGAENSVAYSNNSIAIPTNFTISVTTEILPVSMTKTSVDCTMYICGDSTECSNLLLQYGSFCTQLNRALTGIAVEQDKNTQEVFAQVKQIYKTPPIKDFGGFNFSQILPDPSKPSKRSFIEDLLFNKVTLADAGFIKQYGDCLGDIAARDLICAQKFNGLTVLPPLLTDEMIAQYTSALLAGTITSGWTFGAGAALQIPFAMQMAYRFNGIGVTQNVLYENQKLIANQFNSAIGKIQDSLSSTASALGKLQDVVNQNAQALNTLVKQLSSNFGCISSVLNDILSRLDKVEAEVQIDCLITGRLQSLQTYVTQQLIRAAEIRASANLAATKMSECVLGQSKRVDFCGKGYHLMSFPQSAPHGVVFLHVTYVPAQEKNFTTAPAICHDGKAHFPREGVFVSNGTHWFVTQRNFYEPQIITTDNTFVSGNCDVVIGIVNNTVYDPLQPELDSFKEELDKYFKNHTSPDVDLGDISGINASVVNIQKEIDRLNEVAKNLNESLIDLQELGKYEQYIKGGGGSDIIKLLNEQVNKEMQSSNLYMSMSSWCYTHSLDGAGLFLFDHAAEEYEHAKKLIIFLNENNVPVQLTSISAPEHKFEGLTQIFQKAYEHEQHISESINNIVDHAIKSKDHATFNFLQWYVAEQHEEEVLFKDILDKIELIGNENHGLYLADQYVKGIAKSRKS

SEQ ID NO: 5464 - protein, 1379 aa, Artificial Sequence
  SARS-CoV-2/France/GE1977/2020__EPI_ISL_414632 spike protein (1-1211)(A972C_R995C) Ferritin construct
MFVFLVLLPLVSSQCVNLTTRTQLPPAYTNSFTRGVYYPDKVFRSSVLHSTQDLFLPFFSNVTWFHAIHVSGTNGTKRFDNPVLPFNDGVYFASTEKSNIIRGWIFGTTLDSKTQSLLIVNNATNVVIKVCEFQFCNDPFLGVYYHKNNKSWMESEFRVYSSANNCTFEYVSQPFLMDLEGKQGNFKNLREFVFKNIDGYFKIYSKHTPINLVRDLPQGFSALEPLVDLPIGINITRFQTLLALHRSYLTPGDSSSGWTAGAAAYYVGYLQPRTFLLKYNENGTITDAVDCALDPLSETKCTLKSFTVEKGIYQTSNFRVQPTESIVRFPNITNLCPFGEVFNATRFASVYAWNRKRISNCVADYSVLYNSASFSTFKCYGVSPTKLNDLCFTNVYADSFVIRGDEVRQIAPGQTGKIADYNYKLPDDFTGCVIAWNSNNLDSKVGGNYNYLYRLFRKSNLKPFERDISTEIYQAGSTPCNGVEGFNCYFPLQSYGFQPTNGVGYQPYRVVVLSFELLHAPATVCGPKKSTNLVKNKCVNFNFNGLTGTGVLTESNKKFLPFQQFGRDIADTTDAVRDPQTLEILDITPCSFGGVSVITPGTNTSNQVAVLYQGVNCTEVPVAIHADQLTPTWRVYSTGSNVFQTRAGCLIGAEHVNNSYECDIPIGAGICASYQTQTNSPRRARSVASQSIIAYTMSLGAENSVAYSNNSIAIPTNFTISVTTEILPVSMTKTSVDCTMYICGDSTECSNLLLQYGSFCTQLNRALTGIAVEQDKNTQEVFAQVKQIYKTPPIKDFGGFNFSQILPDPSKPSKRSFIEDLLFNKVTLADAGFIKQYGDCLGDIAARDLICAQKFNGLTVLPPLLTDEMIAQYTSALLAGTITSGWTFGAGAALQIPFAMQMAYRFNGIGVTQNVLYENQKLIANQFNSAIGKIQDSLFSTASALGKLQDVVNQNAQALNTLVKQLSSNFGCISSVLNDILSRLDKVEAEVQIDCLITGRLQSLQTYVTQQLIRAAEIRASANLAATKMSECVLGQSKRVDFCGKGYHLMSFPQSAPHGVVFLHVTYVPAQEKNFTTAPAICHDGKAHFPREGVFVSNGTHWFVTQRNFYEPQIITTDNTFVSGNCDVVIGIVNNTVYDPLQPELDSFKEELDKYFKNHTSPDVDLGDISGINASVVNIQKEIDRLNEVAKNLNESLIDLQELGKYEQYIKGGGGSDIIKLLNEQVNKEMQSSNLYMSMSSWCYTHSLDGAGLFLFDHAAEEYEHAKKLIIFLNENNVPVQLTSISAPEHKFEGLTQIFQKAYEHEQHISESINNIVDHAIKSKDHATFNFLQWYVAEQHEEEVLFKDILDKIELIGNENHGLYLADQYVKGIAKSRKS

SEQ ID NO: 5465 - protein, 1379 aa, Artificial Sequence
  SARS-CoV-2/Finland/FIN-313/2020__EPI_ISL_414641 spike protein (1-1211)(A972C_R995C) Ferritin construct
MFVFLVLLPLVSSQCVNLTTRTQLPPAYTNSFTRGVYYPDKVFRSSVLHSTQDLFLPFFSNVTWFHAIHVSGTNGTKRFDNPVLPFNDGVYFASTEKSNIIRGWIFGTTLDSKTQSLLIVNNATNVVIKVCEFQFCNDPFLGVYYHKNNKSWMESEFRVYSSANNCTFEYVSQPFLMDLEGKQGNFKNLREFVFKNIDGYFKIYSKHTPINLVRDLPQGFSALEPLVDLPIGINITRFKTLLALHRSYLTPGDSSSGWTAGAAAYYVGYLQPRTFLLKYNENGTITDAVDCALDPLSETKCTLKSFTVEKGIYQTSNFRVQPTESIVRFPNITNLCPFGEVFNATRFASVYAWNRKRISNCVADYSVLYNSASFSTFKCYGVSPTKLNDLCFTNVYADSFVIRGDEVRQIAPGQTGKIADYNYKLPDDFTGCVIAWNSNNLDSKVGGNYNYLYRLFRKSNLKPFERDISTEIYQAGSTPCNGVEGFNCYFPLQSYGFQPTNGVGYQPYRVVVLSFELLHAPATVCGPKKSTNLVKNKCVNFNFNGLTGTGVLTESNKKFLPFQQFGRDIADTTDAVRDPQTLEILDITPCSFGGVSVITPGTNTSNQVAVLYQGVNCTEVPVAIHADQLTPTWRVYSTGSNVFQTRAGCLIGAEHVNNSYECDIPIGAGICASYQTQTNSPRRARSVASQSIIAYTMSLGAENSVAYSNNSIAIPTNFTISVTTEILPVSMTKTSVDCTMYICGDSTECSNLLLQYGSFCTQLNRALTGIAVEQDKNTQEVFAQVKQIYKTPPIKDFGGFNFSQILPDPSKPSKRSFIEDLLFNKVTLADAGFIKQYGDCLGDIAARDLICAQKFNGLTVLPPLLTDEMIAQYTSALLAGTITSGWTFGAGAALQIPFAMQMAYRFNGIGVTQNVLYENQKLIANQFNSAIGKIQDSLSSTASALGKLQDVVNQNAQALNTLVKQLSSNFGCISSVLNDILSRLDKVEAEVQIDCLITGRLQSLQTYVTQQLIRAAEIRASANLAATKMSECVLGQSKRVDFCGKGYHLMSFPQSAPHGVVFLHVTYVPAQEKNFTTAPAICHDGKAHFPREGVFVSNGTHWFVTQRNFYEPQIITTDNTFVSGNCDVVIGIVNNTVYDPLQPELDSFKEELDKYFKNHTSPDVDLGDISGINASVVNIQKEIDRLNEVAKNLNESLIDLQELGKYEQYIKGGGGSDIIKLLNEQVNKEMQSSNLYMSMSSWCYTHSLDGAGLFLFDHAAEEYEHAKKLIIFLNENNVPVQLTSISAPEHKFEGLTQIFQKAYEHEQHISESINNIVDHAIKSKDHATFNFLQWYVAEQHEEEVLFKDILDKIELIGNENHGLYLADQYVKGIAKSRKS

SEQ ID NO: 5466 - protein, 1379 aa, Artificial Sequence
  SARS-CoV-2/Netherlands/ZuidHolland_2/2020__EPI_ISL_414556 spike protein (1-1211)(A972C_R995C) Ferritin construct
MFVFLVLLPLVSSQCVNLTTRTQLPPAYTNSFTRGVYYPDKVFRSSVLHSTQDLFLPFFSNVTWFHAIHVSGTNGTKRFDNPVLPFNDGVYFASTEKSNIIRGWIFGTTLDSKTQSLLIVNNATNVVIKVCEFQFCNDPFLGVYYHKNNKSWMESEFRVYSSANNCTFEYVSQPFLMDLEGKQGNFKNLREFVFKNIDGYFKIYSKHTPINLVRDLPQGFSALEPLVDLPIGINITRFQTLLALHRSYLTPGDSSSGWTAGAAAYYVGYLQPRTFLLKYNENGTITDAVDCALDPLSETKCTLKSFTVEKGIYQTSNFRVQPTESIVRFPNITNLCPFGEVFNATRFASVYAWNRKRISNCVADYSVLYNSASFSTFKCYGVSPTKLNDLCFTNVYADSFVIRGDEVRQIAPGQTGKIADYNYKLPDDFTGCVIAWNSNNLDSKVGGNYNYLYRLFRKSNLKPFERDISTEIYQAGSTPCNGVEGFNCYFPLQSYGFQPTNGVGYQPYRVVVLSFELLHAPATVCGPKKSTNLVKNKCVNFNFNGLTGTGVLTESNKKFLPFQQFGRDIADTTDAVRDPQTLEILDITPCSFGGVSVITPGTNTSNQVAVLYQGVNCTEVPVAIHADQLTPTWRVYSTGSNVFQTRAGCLIGAEHVNNSYECDIPIGAGICASYQTQTNSPRRARSVASQSIIAYTMSLGAENSVAYSNNSIAIPTNFTISVTTEILPVSMTKTSVDCTMYICGDSTECSNLLLQYGSFCTQLNRALTGIALEQDKNTQEVFAQVKQIYKTPPIKDFGGFNFSQILPDPSKPSKRSFIEDLLFNKVTLADAGFIKQYGDCLGDIAARDLICAQKFNGLTVLPPLLTDEMIAQYTSALLAGTITSGWTFGAGAALQIPFAMQMAYRFNGIGVTQNVLYENQKLIANQFNSAIGKIQDSLSSTASALGKLQDVVNQNAQALNTLVKQLSSNFGCISSVLNDILSRLDKVEAEVQIDCLITGRLQSLQTYVTQQLIRAAEIRASANLAATKMSECVLGQSKRVDFCGKGYHLMSFPQSAPHGVVFLHVTYVPAQEKNFTTAPAICHDGKAHFPREGVFVSNGTHWFVTQRNFYEPQIITTDNTFVSGNCDVVIGIVNNTVYDPLQPELDSFKEELDKYFKNHTSPDVDLGDISGINASVVNIQKEIDRLNEVAKNLNESLIDLQELGKYEQYIKGGGGSDIIKLLNEQVNKEMQSSNLYMSMSSWCYTHSLDGAGLFLFDHAAEEYEHAKKLIIFLNENNVPVQLTSISAPEHKFEGLTQIFQKAYEHEQHISESINNIVDHAIKSKDHATFNFLQWYVAEQHEEEVLFKDILDKIELIGNENHGLYLADQYVKGIAKSRKS

SEQ ID NO: 5467 - protein, 1379 aa, Artificial Sequence
  SARS-CoV-2/USA/WA-UW31/2020__EPI_ISL_414618 spike protein (1-1211)(A972C_R995C) Ferritin construct
MFVFLVLLPLVSSQCVNLTTRTQLPPAYTNSFTRGVYYPDKVFRSSVLHSTQDLFLPFFSNVTWFHAIHVSGTNGTKRFDNPVLPFNDGVYFASTEKSNIIRGWIFGTTLDSKTQSLLIVNNATNVVIKVCEFQFCNDPFLGVYYHKNNKSWMESEFRVYSSANNCTFEYVSQPFLMDLEGKQGNFKNLREFVFKNIDGYFKIYSKHTPINLVRDLPQGFSALEPLVDLPIGINITRFQTLLALHRSYLTPGDSSSGWTAGAAAYYVGYLQPRTFLLKYNENGTITDAVDCALDPLSETKCTLKSFTVEKGIYQTSNFRVQPTESIVRFPNITNLCPFGEVFNATRFASVYAWNRKRISNCVADYSVLYNSASFSTFKCYGVSPTKLNDLCFTNVYADSFVIRGDEVRQIAPGQTGKIADYNYKLPDDFTGCVIAWNSNNLDSKVGGNYNYLYRLFRKSNLKPFERDISTEIYQAGSTPCNGAEGFNCYFPLQSYGFQPTNGVGYQPYRVVVLSFELLHAPATVCGPKKSTNLVKNKCVNFNFNGLTGTGVLTESNKKFLPFQQFGRDIADTTDAVRDPQTLEILDITPCSFGGVSVITPGTNTSNQVAVLYQDVNCTEVPVAIHADQLTPTWRVYSTGSNVFQTRAGCLIGAEHVNNSYECDIPIGAGICASYQTQTNSPRRARSVASQSIIAYTMSLGAENSVAYSNNSIAIPTNFTISVTTEILPVSMTKTSVDCTMYICGDSTECSNLLLQYGSFCTQLNRALTGIAVEQDKNTQEVFAQVKQIYKTPPIKDFGGFNFSQILPDPSKPSKRSFIEDLLFNKVTLADAGFIKQYGDCLGDIAARDLICAQKFNGLTVLPPLLTDEMIAQYTSALLAGTITSGWTFGAGAALQIPFAMQMAYRFNGIGVTQNVLYENQKLIANQFNSAIGKIQDSLSSTASALGKLQDVVNQNAQALNTLVKQLSSNFGCISSVLNDILSRLDKVEAEVQIDCLITGRLQSLQTYVTQQLIRAAEIRASANLAATKMSECVLGQSKRVDFCGKGYHLMSFPQSAPHGVVFLHVTYVPAQEKNFTTAPAICHDGKAHFPREGVFVSNGTHWFVTQRNFYEPQIITTDNTFVSGNCDVVIGIVNNTVYDPLQPELDSFKEELDKYFKNHTSPDVDLGDISGINASVVNIQKEIDRLNEVAKNLNESLIDLQELGKYEQYIKGGGGSDIIKLLNEQVNKEMQSSNLYMSMSSWCYTHSLDGAGLFLFDHAAEEYEHAKKLIIFLNENNVPVQLTSISAPEHKFEGLTQIFQKAYEHEQHISESINNIVDHAIKSKDHATFNFLQWYVAEQHEEEVLFKDILDKIELIGNENHGLYLADQYVKGIAKSRKS

SEQ ID NO: 5468 - protein, 1379 aa, Artificial Sequence
  SARS-CoV-2/South Korea/SNU01/2020__EPI_ISL_411929 spike protein (1-1211)(A972C_R995C) Ferritin construct
MFVFLVLLPLVSSQCVNLTTRTQLPPAYTNSFTRGVYYPDKVFRSSVLHSTQDLFLPFFSNVTWFHAIHVSGTNGTKRFDNPVLPFNDGVYFASTEKSNIIRGWIFGTTLDSKTQSLLIVNNATNVVIKVCEFQFCNDPFLGVYYHKNNKSWMESEFRVYSSANNCTFEYVSQPFLMDLEGKQGNFKNLREFVFKNIDGYFKIYSKHTPINLVRDLPQGFWALEPLVDLPIGINITRFQTLLALHRSYLTPGDSSSGWTAGAAAYYVGYLQPRTFLLKYNENGTITDAVDCALDPLSETKCTLKSFTVEKGIYQTSNFRVQPTESIVRFPNITNLCPFGEVFNATRFASVYAWNRKRISNCVADYSVLYNSASFSTFKCYGVSPTKLNDLCFTNVYADSFVIRGDEVRQIAPGQTGKIADYNYKLPDDFTGCVIAWNSNNLDSKVGGNYNYLYRLFRKSNLKPFERDISTEIYQAGSTPCNGVEGFNCYFPLQSYGFQPTNGVGYQPYRVVVLSFELLHAPATVCGPKKSTNLVKNKCVNFNFNGLTGTGVLTESNKKFLPFQQFGRDIADTTDAVRDPQTLEILDITPCSFGGVSVITPGTNTSNQVAVLYQDVNCTEVPVAIHADQLTPTWRVYSTGSNVFQTRAGCLIGAEHVNNSYECDIPIGAGICASYQTQTNSPRRARSVASQSIIAYTMSLGAENSVAYSNNSIAIPTNFTISVTTEILPVSMTKTSVDCTMYICGDSTECSNLLLQYGSFCTQLNRALTGIAVEQDKNTQEVFAQVKQIYKTPPIKDFGGFNFSQILPDPSKPSKRSFIEDLLFNKVTLADAGFIKQYGDCLGDIAARDLICAQKFNGLTVLPPLLTDEMIAQYTSALLAGTITSGWTFGAGAALQIPFAMQMAYRFNGIGVTQNVLYENQKLIANQFNSAIGKIQDSLSSTASALGKLQDVVNQNAQALNTLVKQLSSNFGCISSVLNDILSRLDKVEAEVQIDCLITGRLQSLQTYVTQQLIRAAEIRASANLAATKMSECVLGQSKRVDFCGKGYHLMSFPQSAPHGVVFLHVTYVPAQEKNFTTAPAICHDGKAHFPREGVFVSNGTHWFVTQRNFYEPQIITTDNTFVSGNCDVVIGIVNNTVYDPLQPELDSFKEELDKYFKNHTSPDVDLGDISGINASVVNIQKEIDRLNEVAKNLNESLIDLQELGKYEQYIKGGGGSDIIKLLNEQVNKEMQSSNLYMSMSSWCYTHSLDGAGLFLFDHAAEEYEHAKKLIIFLNENNVPVQLTSISAPEHKFEGLTQIFQKAYEHEQHISESINNIVDHAIKSKDHATFNFLQWYVAEQHEEEVLFKDILDKIELIGNENHGLYLADQYVKGIAKSRKS

SEQ ID NO: 5469 - protein, 1379 aa, Artificial Sequence
  SARS-CoV-2/China/WF0004/2020__EPI_ISL_413694 spike protein (1-1211)(A972C_R995C) Ferritin construct
MFVFLVLLPLVSSQCVNLTTRTQLPPAYTNSFTRGVYYPDKVFRSSVLHSTQDLFLPFFSNVTWFHAIHVSGTNGTKRFDNPVLPFNDGVYFASTEKSNIIRGWIFGTTLDSKTQSLLIVNNATNVVIKVCEFQFCNDPFLGVYYHKNNKSWTESEFRVYSSANNCTFEYVSQPFLMDLEGKQGNFKNLREFVFKNIDGYFKIYSKHTPINLVRDLPQGFSALEPLVDLPIGINITRFQTLLALHRSYLTPGDSSSGWTAGAAAYYVGYLQPRTFLLKYNENGTITDAVDCALDPLSETKCTLKSFTVEKGIYQTSNFRVQPTESIVRFPNITNLCPFGEVFNATRFASVYAWNRKRISNCVADYSVLYNSASFSTFKCYGVSPTKLNDLCFTNVYADSFVIRGDEVRQIAPGQTGKIADYNYKLPDDFTGCVIAWNSNNLDSKVGGNYNYLYRLFRKSNLKPFERDISTEIYQAGSTPCNGVEGFNCYFPLQSYGFQPTNGVGYQPYRVVVLSFELLHAPATVCGPKKSTNLVKNKCVNFNFNGLTGTGVLTESNKKFLPFQQFGRDIADTTDAVRDPQTLEILDITPCSFGGVSVITPGTNTSNQVAVLYQDVNCTEVPVAIHADQLTPTWRVYSTGSNVFQTRAGCLIGAEHVNNSYECDIPIGAGICASYQTQTNSPRRARSVASQSIIAYTMSLGAENSVAYSNNSIAIPTNFTISVTTEILPVSMTKTSVDCTMYICGDSTECSNLLLQYGSFCTQLNRALTGIAVEQDKNTQEVFAQVKQIYKTPPIKDFGGFNFSQILPDPSKPSKRSFIEDLLFNKVTLADAGFIKQYGDCLGDIAARDLICAQKFNGLTVLPPLLTDEMIAQYTSALLAGTITSGWTFGAGAALQIPFAMQMAYRFNGIGVTQNVLYENQKLIANQFNSAIGKIQDSLSSTASALGKLQDVVNQNAQALNTLVKQLSSNFGCISSVLNDILSRLDKVEAEVQIDCLITGRLQSLQTYVTQQLIRAAEIRASANLAATKMSECVLGQSKRFDFCGKGYHLMSFPQSAPHGVVFLHVTYVPAQEKNFTTAPAICHDGKAHFPREGVFVSNGTHWFVTQRNFYEPQIITTDNTFVSGNCDVVIGIVNNTVYDPLQPELDSFKEELDKYFKNHTSPDVDLGDISGINASVVNIQKEIDRLNEVAKNLNESLIDLQELGKYEQYIKGGGGSDIIKLLNEQVNKEMQSSNLYMSMSSWCYTHSLDGAGLFLFDHAAEEYEHAKKLIIFLNENNVPVQLTSISAPEHKFEGLTQIFQKAYEHEQHISESINNIVDHAIKSKDHATFNFLQWYVAEQHEEEVLFKDILDKIELIGNENHGLYLADQYVKGIAKSRKS

SEQ ID NO: 5470 - protein, 1379 aa, Artificial Sequence
  SARS-CoV-2/China/WF0028/2020__EPI_ISL_413791 spike protein (1-1211)(A972C_R995C) Ferritin construct
MFVFLVLLPLVSSQCVNLTTRTQLPPAYTNSFTRGVYYPDKVFRSSVLHSTQDLFLPFFSNVTWFHAIHVSGTNGTKRFDNPVLPFNDGVYFASTEKSNIIRGWIFGTTLDSKTQSLLIVNNATNVVIKVCEFQFCNDPFLGVYYHKNNKSWMESEFRVYSSANNCTFEYVSQPFLMDLEGKQGNFKNLREFVFKNIDGYFKIYSKHTPINLVRDLPQGFSALEPLVDLPIGINITRFQTLLALHRSYLTPGDSSSGWTAGAAAYYVGYLQPRTFLLKYNENGTITDAVDCALDPLSETKCTLKSFTVEKGIYQTSNFRVQPTESIVRFPNITNLCPFGEVFNATRFASVYAWNRKRISNCVADYSVLYNSASFSTFKCYGVSPTKLNDLCFTNVYADSFVIRGDEVRQIAPGQTGKIADYNYKLPDDFTGCVIAWNSNNLDSKVGGNYNYLYRLFRKSNLKPFERDISTEIYQAGSTPCNGVEGFNCYFPLQSYGFQPTNGVGYQPYRVVVLSFELLHAPATVCGPKKSTNLVKNKCVNFNFNGLTGTGVLTESNKKFLPFQQFGRDIADTTDAVRDPQTLEILDITPCSFGGVSVITPGTNTSNQVAVLYQDVNCTEVPVAIHADQLTPTWRVYSTGSNVFQTRAGCLIGAEHVNNSYECDIPIGAGICASYQTQTNSPRRARSVASQSIIAYTMSLGAENSVAYSNNSIAIPTNFTISVTTEILPVSMTKTSVDCTMYICGDSTECSNLLLQYGSFCTQLNRALTGIAVEQDKNTQEVFAQVKQIYKTPPIKDFGGFNFSQILPDPSKPSKRSFIEDLLFNKVTLADAGFIKQYGDCLGDIAARDLICAQKFNGLTVLPPLLTDEMIAQYTSALLAGTITSGWTFGAGAALQIPFAMQMAYRFNGIGVTQNVLYENQKLIANQFNSAIGKIQDSLSSTASALGKLQDVVNQNAQALNTLVKQLSSNFGCISSVLNDILSRLDKVEAEVQIDCLITGRLQSLQTYVTQQLIRAAEIRASANLAATKMSECVLGQSKRVDFCGKGYHLMSFPQSAPHGVVFLHVTYVPAQEKNFTTAPAICHDGKAHFPREGVFVSNGTHWFVTQRNFYEPQIITTDNTFVSGNCDVVIGIVNNTVYDPLQPELESFKEELDKYFKNHTSPDVDLGDISGINASVVNIQKEIDRLNEVAKNLNESLIDLQELGKYEQYIKGGGGSDIIKLLNEQVNKEMQSSNLYMSMSSWCYTHSLDGAGLFLFDHAAEEYEHAKKLIIFLNENNVPVQLTSISAPEHKFEGLTQIFQKAYEHEQHISESINNIVDHAIKSKDHATFNFLQWYVAEQHEEEVLFKDILDKIELIGNENHGLYLADQYVKGIAKSRKS

SEQ ID NO: 5471 - protein, 1379 aa, Artificial Sequence
  SARS-CoV-2/2019-nCoV/USA-CruiseA-18/2020__MT159716.1 spike protein (1-1211)(A972C_R995C) Ferritin construct
MFVFLVLLPLVSSQCVNLTTRTQLPPAYTNSFTRGVYYPDKVFRSSVLHSTQDLFLPFFSNVTWFHAIHVSGTNGTKRFDNPVLPFNDGVYFASTEKSNIIRGWIFGTTLDSKTQSLLIVNNATNVVIKVCEFQFCNDPFLGVYYHKNNKSWMESELRVYSSANNCTFEYVSQPFLMDLEGKQGNFKNLREFVFKNIDGYFKIYSKHTPINLVRDLPQGFSALEPLVDLPIGINITRFQTLLALHRSYLTPGDSSSGWTAGAAAYYVGYLQPRTFLLKYNENGTITDAVDCALDPLSETKCTLKSFTVEKGIYQTSNFRVQPTESIVRFPNITNLCPFGEVFNATRFASVYAWNRKRISNCVADYSVLYNSASFSTFKCYGVSPTKLNDLCFTNVYADSFVIRGDEVRQIAPGQTGKIADYNYKLPDDFTGCVIAWNSNNLDSKVGGNYNYLYRLFRKSNLKPFERDISTEIYQAGSTPCNGVEGFNCYFPLQSYGFQPTNGVGYQPYRVVVLSFELLHAPATVCGPKKSTNLVKNKCVNFNFNGLTGTGVLTESNKKFLPFQQFGRDIADTTDAVRDPQTLEILDITPCSFGGVSVITPGTNTSNQVAVLYQDVNCTEVPVAIHADQLTPTWRVYSTGSNVFQTRAGCLIGAEHVNNSYECDIPIGAGICASYQTQTNSPRRARSVASQSIIAYTMSLGAENSVAYSNNSIAIPTNFTISVTTEILPVSMTKTSVDCTMYICGDSTECSNLLLQYGSFCTQLNRALTGIAVEQDKNTQEVFAQVKQIYKTPPIKDFGGFNFSQILPDPSKPSKRSFIEDLLFNKVTLADAGFIKQYGDCLGDIAARDLICAQKFNGLTVLPPLLTDEMIAQYTSALLAGTITSGWTFGAGAALQIPFAMQMAYRFNGIGVTQNVLYENQKLIANQFNSAIGKIQDSLSSTASALGKLQDVVNQNAQALNTLVKQLSSNFGCISSVLNDILSRLDKVEAEVQIDCLITGRLQSLQTYVTQQLIRAAEIRASANLAATKMSECVLGQSKRVDFCGKGYHLMSFPQSAPHGVVFLHVTYVPAQEKNFTTAPAICHDGKAHFPREGVFVSNGTHWFVTQRNFYEPQIITTDNTFVSGNCDVVIGIVNNTVYDPLQPELDSFKEELDKYFKNHTSPDVDLGDISGINASVVNIQKEIDRLNEVAKNLNESLIDLQELGKYEQYIKGGGGSDIIKLLNEQVNKEMQSSNLYMSMSSWCYTHSLDGAGLFLFDHAAEEYEHAKKLIIFLNENNVPVQLTSISAPEHKFEGLTQIFQKAYEHEQHISESINNIVDHAIKSKDHATFNFLQWYVAEQHEEEVLFKDILDKIELIGNENHGLYLADQYVKGIAKSRKS

SEQ ID NO: 5472 - protein, 1379 aa, Artificial Sequence
  SARS-CoV-2/SARS-CoV-2/Yunnan-01/human/2020/CHN__MT049951.1 spike protein (1-1211)(A972C_R995C) Ferritin construct
MFVFLVLLPLVSSQCVNLTTRTQLPPANTNSFTRGVYYPDKVFRSSVLHSTQDLFLPFFSNVTWFHAIHVSGTNGTKRFDNPVLPFNDGVYFASTEKSNIIRGWIFGTTLDSKTQSLLIVNNATNVVIKVCEFQFCNDPFLGVYYHKNNKSWMESEFRVYSSANNCTFEYVSQPFLMDLEGKQGNFKNLREFVFKNIDGYFKIYSKHTPINLVRDLPQGFSALEPLVDLPIGINITRFQTLLALHRSYLTPGDSSSGWTAGAAAYYVGYLQPRTFLLKYNENGTITDAVDCALDPLSETKCTLKSFTVEKGIYQTSNFRVQPTESIVRFPNITNLCPFGEVFNATRFASVYAWNRKRISNCVADYSVLYNSASFSTFKCYGVSPTKLNDLCFTNVYADSFVIRGDEVRQIAPGQTGKIADYNYKLPDDFTGCVIAWNSNNLDSKVGGNYNYLYRLFRKSNLKPFERDISTEIYQAGSTPCNGVEGFNCYFPLQSYGFQPTNGVGYQPYRVVVLSFELLHAPATVCGPKKSTNLVKNKCVNFNFNGLTGTGVLTESNKKFLPFQQFGRDIADTTDAVRDPQTLEILDITPCSFGGVSVITPGTNTSNQVAVLYQDVNCTEVPVAIHADQLTPTWRVYSTGSNVFQTRAGCLIGAEHVNNSYECDIPIGAGICASYQTQTNSPRRARSVASQSIIAYTMSLGAENSVAYSNNSIAIPTNFTISVTTEILPVSMTKTSVDCTMYICGDSTECSNLLLQYGSFCTQLNRALTGIAVEQDKNTQEVFAQVKQIYKTPPIKDFGGFNFSQILPDPSKPSKRSFIEDLLFNKVTLADAGFIKQYGDCLGDIAARDLICAQKFNGLTVLPPLLTDEMIAQYTSALLAGTITSGWTFGAGAALQIPFAMQMAYRFNGIGVTQNVLYENQKLIANQFNSAIGKIQDSLSSTASALGKLQDVVNQNAQALNTLVKQLSSNFGCISSVLNDILSRLDKVEAEVQIDCLITGRLQSLQTYVTQQLIRAAEIRASANLAATKMSECVLGQSKRVDFCGKGYHLMSFPQSAPHGVVFLHVTYVPAQEKNFTTAPAICHDGKAHFPREGVFVSNGTHWFVTQRNFYEPQIITTDNTFVSGNCDVVIGIVNNTVYDPLQPELDSFKEELDKYFKNHTSPDVDLGDISGINASVVNIQKEIDRLNEVAKNLNESLIDLQELGKYEQYIKGGGGSDIIKLLNEQVNKEMQSSNLYMSMSSWCYTHSLDGAGLFLFDHAAEEYEHAKKLIIFLNENNVPVQLTSISAPEHKFEGLTQIFQKAYEHEQHISESINNIVDHAIKSKDHATFNFLQWYVAEQHEEEVLFKDILDKIELIGNENHGLYLADQYVKGIAKSRKS

SEQ ID NO: 5473 - protein, 1379 aa, Artificial Sequence
  SARS-CoV-2/USA/WA-UW292/2020__EPI_ISL_418077 spike protein (1-1211)(A972C_R995C) Ferritin construct
MFVFLVLLPLVSSQCVNLTTRTQLPPAYTNSFTRGVYYPDKVFRSSVLHSTQDLFLPFFSNVTWFHAIHVSGTNGTKRFDNPVLPFNDGVYFASTEKSNIIRGWIFGTTLDSKTQSLLIVNNATNVVIKVCEFQFCNDPFLGVYYHKNNKSWMESEFRVYSSANNCTFEYVSQPFLMDLEGKQGNFKNLREFVFKNIDGYFKIYSKHTPINLVRDLPQGFSALEPLVDLPIGINITRFQTLLALHRSYLTPGDSSSGWTAGAAAYYVGYLQPRTFLLKYNENGTITDAVDCALDPLSETKCTLKSFTVEKGIYQTSNFRVQPTESIVRFPNITNLCPFGEVFNATRFASVYAWNRKRISNCVADYSVLYNSASFSTFKCYGVSPTKLNDLCFTNVYADSFVIRGDEVRQIAPGQTGKIADYNYKLPDDFTGCVIAWNSNNLDSKVGGNYNYLYRLFRKSNLKPFERDISTEIYQASSTPCNGVEGFNCYFPLQSYGFQPTNGVGYQPYRVVVLSFELLHAPATVCGPKKSTNLVKNKCVNFNFNGLTGTGVLTESNKKFLPFQQFGRDIADTTDAVRDPQTLEILDITPCSFGGVSVITPGTNTSNQVAVLYQDVNCTEVPVAIHADQLTPTWRVYSTGSNVFQTRAGCLIGAEHVNNSYECDIPIGAGICASYQTQTNSPRRARSVASQSIIAYTMSLGAENSVAYSNNSIAIPTNFTISVTTEILPVSMTKTSVDCTMYICGDSTECSNLLLQYGSFCTQLNRALTGIAVEQDKNTQEVFAQVKQIYKTPPIKDFGGFNFSQILPDPSKPSKRSFIEDLLFNKVTLADAGFIKQYGDCLGDIAARDLICAQKFNGLTVLPPLLTDEMIAQYTSALLAGTITSGWTFGAGAALQIPFAMQMAYRFNGIGVTQNVLYENQKLIANQFNSAIGKIQDSLSSTASALGKLQDVVNQNAQALNTLVKQLSSNFGCISSVLNDILSRLDKVEAEVQIDCLITGRLQSLQTYVTQQLIRAAEIRASANLAATKMSECVLGQSKRVDFCGKGYHLMSFPQSAPHGVVFLHVTYVPAQEKNFTTAPAICHDGKAHFPREGVFVSNGTHWFVTQRNFYEPQIITTDNTFVSGNCDVVIGIVNNTVYDPLQPELDSFKEELDKYFKNHTSPDVDLGDISGINASVVNIQKEIDRLNEVAKNLNESLIDLQELGKYEQYIKGGGGSDIIKLLNEQVNKEMQSSNLYMSMSSWCYTHSLDGAGLFLFDHAAEEYEHAKKLIIFLNENNVPVQLTSISAPEHKFEGLTQIFQKAYEHEQHISESINNIVDHAIKSKDHATFNFLQWYVAEQHEEEVLFKDILDKIELIGNENHGLYLADQYVKGIAKSRKS

SEQ ID NO: 5474 - protein, 1379 aa, Artificial Sequence
  SARS-CoV-2/Iceland/192/2020__EPI_ISL_417819 spike protein (1-1211)(A972C_R995C) Ferritin construct
MFVFFVLLPLVSSQCVNLTTRTQLPPAYTNSFTRGVYYPDKVFRSSVLHSTQDLFLPFFSNVTWFHAIHVSGTNGTKRFDNPVLPFNDGVYFASTEKSNIIRGWIFGTTLDSKTQSLLIVNNATNVVIKVCEFQFCNDPFLGVYYHKNNKSWMESEFRVYSSANNCTFEYVSQPFLMDLEGKQGNFKNLREFVFKNIDGYFKIYSKHTPINLVRDLPQGFSALEPLVDLPIGINITRFQTLLALHRSYLTPGDSSSGWTAGAAAYYVGYLQPRTFLLKYNENGTITDAVDCALDPLSETKCTLKSFTVEKGIYQTSNFRVQPTESIVRFPNITNLCPFGEVFNATRFASVYAWNRKRISNCVADYSVLYNSASFSTFKCYGVSPTKLNDLCFTNVYADSFVIRGDEVRQIAPGQTGKIADYNYKLPDDFTGCVIAWNSNNLDSKVGGNYNYLYRLFRKSNLKPFERDISTEIYQAGSTPCNGVEGFNCYFPLQSYGFQPTNGVGYQPYRVVVLSFELLHAPATVCGPKKSTNLVKNKCVNFNFNGLTGTGVLTESNKKFLPFQQFGRDIADTTDAVRDPQTLEILDITPCSFGGVSVITPGTNTSNQVAVLYQGVNCTEVPVAIHADQLTPTWRVYSTGSNVFQTRAGCLIGAEHVNNSYECDIPIGAGICASYQTQTNSPRRARSVASQSIIAYTMSLGAENSVAYSNNSIAIPTNFTISVTTEILPVSMTKTSVDCTMYICGDSTECSNLLLQYGSFCTQLNRALTGIAVEQDKNTQEVFAQVKQIYKTPPIKDFGGFNFSQILPDPSKPSKRSFIEDLLFNKVTLADAGFIKQYGDCLGDIAARDLICAQKFNGLTVLPPLLTDEMIAQYTSALLAGTITSGWTFGAGAALQIPFAMQMAYRFNGIGVTQNVLYENQKLIANQFNSAIGKIQDSLSSTASALGKLQDVVNQNAQALNTLVKQLSSNFGCISSVLNDILSRLDKVEAEVQIDCLITGRLQSLQTYVTQQLIRAAEIRASANLAATKMSECVLGQSKRVDFCGKGYHLMSFPQSAPHGVVFLHVTYVPAQEKNFTTAPAICHDGKAHFPREGVFVSNGTHWFVTQRNFYEPQIITTDNTFVSGNCDVVIGIVNNTVYDPLQPELDSFKEELDKYFKNHTSPDVDLGDISGINASVVNIQKEIDRLNEVAKNLNESLIDLQELGKYEQYIKGGGGSDIIKLLNEQVNKEMQSSNLYMSMSSWCYTHSLDGAGLFLFDHAAEEYEHAKKLIIFLNENNVPVQLTSISAPEHKFEGLTQIFQKAYEHEQHISESINNIVDHAIKSKDHATFNFLQWYVAEQHEEEVLFKDILDKIELIGNENHGLYLADQYVKGIAKSRKS

SEQ ID NO: 5475 - protein, 1379 aa, Artificial Sequence
  SARS-CoV-2/Belgium/ULG-6939/2020__EPI_ISL_417020 spike protein (1-1211)(A972C_R995C) Ferritin construct
MFVFLVLLPLVSSQCVNLTTRTQLPPAYTNSFTRGVYYPDKVFRSSVLHSTQDLFLPFFSNVTWFHAIHVSGTNGTKRFDNPVLPFNDGVYFASTEKSNIIRGWIFGTTLDSKTQSLLIVNNATNVVIKVCEFQFCNDPFLGVYYHKNNKSWMESEFRVYSSANNCTFEYVSQPFLMDLEGKQGNFKNLREFVFKNIDGYFKIYSKHTPINLVRDLPQGFSALEPLVDLPIGINITRFQTLLALHRSYLTPGDSSSGWTAGAAAYYVGYLQPRTFLLKYNENGTITDAVDCALDPLSETKCTLKSFTVEKGIYQTSNFRVQPTESIVRFPNITNLCPFGEVFNATRFASVYAWNRKRISNCVADYSVLYNSASFSTFKCYGVSPTKLNDLCFTNVYADSFVIRGDEVRQIAPGQTGKIADYNYKLPDDFTGCVIAWNSNNLDSKVGGNYNYLYRLFRKSNLKPFERDISTEIYQAGSTPCNGVEGFNCYFPLQSYGFQPTNGVGYQPYRVVVLSFELLHAPATVCGPKKSTNLVKNKCVNFNFNGLTGTGVLTESNKKFLPFQQFGRDIADTTDAVRDPQTLEILDITPCSFGGVSVITPGTNTSNQVAVLYQGVNCTEVPVAIHADQLTPTWRVYSTGSNVFQTRAGCLIGAEHVNNSYECDIPIGAGICASYQTQTNSPRRARSVASQSIIAYTMSLGAENSVVYSNNSIAIPTNFTISVTTEILPVSMTKTSVDCTMYICGDSTECSNLLLQYGSFCTQLNRALTGIAVEQDKNTQEVFAQVKQIYKTPPIKDFGGFNFSQILPDPSKPSKRSFIEDLLFNKVTLADAGFIKQYGDCLGDIAARDLICAQKFNGLTVLPPLLTDEMIAQYTSALLAGTITSGWTFGAGAALQIPFAMQMAYRFNGIGVTQNVLYENQKLIANQFNSAIGKIQDSLSSTASALGKLQDVVNQNAQALNTLVKQLSSNFGCISSVLNDILSRLDKVEAEVQIDCLITGRLQSLQTYVTQQLIRAAEIRASANLAATKMSECVLGQSKRVDFCGKGYHLMSFPQSAPHGVVFLHVTYVPAQEKNFTTAPAICHDGKAHFPREGVFVSNGTHWFVTQRNFYEPQIITTDNTFVSGNCDVVIGIVNNTVYDPLQPELDSFKEELDKYFKNHTSPDVDLGDISGINASVVNIQKEIDRLNEVAKNLNESLIDLQELGKYEQYIKGGGGSDIIKLLNEQVNKEMQSSNLYMSMSSWCYTHSLDGAGLFLFDHAAEEYEHAKKLIIFLNENNVPVQLTSISAPEHKFEGLTQIFQKAYEHEQHISESINNIVDHAIKSKDHATFNFLQWYVAEQHEEEVLFKDILDKIELIGNENHGLYLADQYVKGIAKSRKS

SEQ ID NO: 5476 - protein, 1379 aa, Artificial Sequence
  SARS-CoV-2/France/HF2496/2020__EPI_ISL_418231 spike protein (1-1211)(A972C_R995C) Ferritin construct
MFVFLVLLPLVSSQCVNLTTRTQLPPAYTNSFTRGVYYPDKVFRSSVLHSTQDLFLPFFSNVTWFHAIHVSGTNGTKRFDNPVLPFNDGVYFASTEKSNIIRGWIFGTTLDSKTQSLLIVNNATNVVIKVCEFQFCNDPFLGVYYHKNNKSWMESEFRVYSSANNCTFEYVSQPFLMDLEGKQGNFKNLREFVFKNIDGYFKIYSKHTPINLVRDLPQGFSALEPLVDLPIGINITRFQTLLALHRSYLTPGDSSSGWTAGAAAYYVGYLQPRTFLLKYNENGTITDAVDCALDPLSETKCTLKSFTVEKGIYQTSNFRVQPTESIVRFPNITNLCPFGEVFNATRFASVYAWNRKRISNCVADYSVLYNSASFSTFKCYGVSPTKLNDLCFTNVYADSFVIRGDEVRQIAPGQTGKIADYNYKLPDDFTGCVIAWNSNNLDSKVGGNYNYLYRLFRKSNLKPFERDISTEIYQAGSTPCNGVEGFNCYFPLQSYGFQPTNGVGYQPYRVVVLSFELLHAPATVCGPKKSTNLVKNKCVNFNFNGLTGTGVLTESNKKFLPFQQFGRDIADTTDAVRDPQTLEILDITPCSFGGVSVITPGTNTSNQVAVLYQGVNCTEVPVAIHADQLTPTWRVYSTGSNVFQTRAGCLIGAEHVNNSYECDIPIGAGICASYQTQTNSPRRARSVASQSIIAYTMSLGAENSVAYSNNSIAIPTNFTISVTTEILPVSMTKTSVDCTMYICGDSTECSNLLLQYGSFCTQLNRALTGIAVEQDKNTQEVFAQVKQIYKTPPIKDFGGFNFSQILPDPSKPSKRSFIEDLLFNKVTLADAGFIKQYGDCLGDIVARDLICAQKFNGLTVLPPLLTDEMIAQYTSALLAGTITSGWTFGAGAALQIPFAMQMAYRFNGIGVTQNVLYENQKLIANQFNSAIGKIQDSLSSTASALGKLQDVVNQNAQALNTLVKQLSSNFGCISSVLNDILSRLDKVEAEVQIDCLITGRLQSLQTYVTQQLIRAAEIRASANLAATKMSECVLGQSKRVDFCGKGYHLMSFPQSAPHGVVFLHVTYVPAQEKNFTTAPAICHDGKAHFPREGVFVSNGTHWFVTQRNFYEPQIITTDNTFVSGNCDVVIGIVNNTVYDPLQPELDSFKEELDKYFKNHTSPDVDLGDISGINASVVNIQKEIDRLNEVAKNLNESLIDLQELGKYEQYIKGGGGSDIIKLLNEQVNKEMQSSNLYMSMSSWCYTHSLDGAGLFLFDHAAEEYEHAKKLIIFLNENNVPVQLTSISAPEHKFEGLTQIFQKAYEHEQHISESINNIVDHAIKSKDHATFNFLQWYVAEQHEEEVLFKDILDKIELIGNENHGLYLADQYVKGIAKSRKS

SEQ ID NO: 5477 - protein, 1379 aa, Artificial Sequence
  SARS-CoV-2/USA/WA-UW291/2020__EPI_ISL_418076 spike protein (1-1211)(A972C_R995C) Ferritin construct
MFVFLVLLPLVSSQCVNLTTRTQLPPAYTNSFTRGVYYPDKVFRSSVLHSTQDLFLPFFSNVTWFHAIHVSGTNGTKRFDNPVLPFNDGVYFASTEKSNIIRGWIFGTTLDSKTQSLLIVNNATNVVIKVCEFQFCNDPFLGVYYHKNNKSWMESEFRVYSSANNCTFEYVSQPFLMDLEGKQGNFKNLREFVFKNIDGYFKIYSKHTPINLVRDLPQGFSALEPLVDLPIGINITRFQTLLALHRSYLTPGDSSSGWTAGAAAYYVGYLQPRTFLLKYNENGTITDAVDCALDPLSETKCTLKSFTVEKGIYQTSNFRVQPTESIVRFPNITNLCPFGEVFNATRFASVYAWNRKRISNCVADYSVLYNSASFSTFKCYGVSPTKLNDLCFTNVYADSFVIRGDEVRQIAPGQTGKIADYNYKLPDDFTGCVIAWNSNNLDSKVGGNYNYLYRLFRKSNLKPFERDISTEIYQAGSTPCNGVEGFNCYFPLQSYGFQPTNGVGYQPYRVVVLSFELLHAPATVCGPKKSTNLVKNKCVNFNFNGLTGTGVLTESNKKFLPFQQFGRDIADTTDAVRDPQTLEILDITPCSFGGVSVITPGTNTSNQVAVLYQGVNCTEVPVAIHADQLTPTWRVYSTGSNVFQTRAGCLIGAEHVNNSYECDIPIGAGICASYQTQTNSPRRARSVASQSIIAYTMSLGAENSVAYSNNSIAIPTNFTISVTTEILPVSMTKTSVDCTMYICGDSTECSNLLLQYGSFCTQLNRALTGIAVEQDKNTQEVFAQVKQIYKTPPIKDFGGFNFSQILPDPSKPSKRSFIEDLLFNKVTLADAGFIKQYGDCLGDIAARDLICAQKFNGLTVLPPLLTDEMIAQYTSALLAGTITSGWTFGAGAALQIPFAMQMAYRFNGIGVTQNVLYENQKLIANQFNSAIGKIQYSLSSTASALGKLQDVVNQNAQALNTLVKQLSSNFGCISSVLNDILSRLDKVEAEVQIDCLITGRLQSLQTYVTQQLIRAAEIRASANLAATKMSECVLGQSKRVDFCGKGYHLMSFPQSAPHGVVFLHVTYVPAQEKNFTTAPAICHDGKAHFPREGVFVSNGTHWFVTQRNFYEPQIITTDNTFVSGNCDVVIGIVNNTVYDPLQPELDSFKEELDKYFKNHTSPDVDLGDISGINASVVNIQKEIDRLNEVAKNLNESLIDLQELGKYEQYIKGGGGSDIIKLLNEQVNKEMQSSNLYMSMSSWCYTHSLDGAGLFLFDHAAEEYEHAKKLIIFLNENNVPVQLTSISAPEHKFEGLTQIFQKAYEHEQHISESINNIVDHAIKSKDHATFNFLQWYVAEQHEEEVLFKDILDKIELIGNENHGLYLADQYVKGIAKSRKS

SEQ ID NO: 5478 - protein, 1379 aa, Artificial Sequence; identical to SEQ ID NO: 5441
  SARS-CoV-2/Portugal/PT0034/2020__EPI_ISL_418019 spike protein (1-1211)(A972C_R995C) Ferritin construct

SEQ ID NO: 5479 - protein, 1379 aa, Artificial Sequence
  SARS-CoV-2/Iceland/202/2020__EPI_ISL_417750 spike protein (1-1211)(A972C_R995C) Ferritin construct
MFVFLVLLPLVSSQCVNLTTRTQLPPAYTNSFTRGVYYPDKVFRSSVLHSTQDLFLPFFSNVTWFHAIHVSGTNGTKRFDNPVLPFNDGVYFASTEKSNIIRGWIFGTTLDSKTQSLLIVNNATNVVIKVCEFQFCNDPFLGVYYHKNNKSWMESEFRVYSSANNCTFEYVSQPFLMDLEGKQGNFKNLREFVFKNIDGYFKIYSKHTPINLVRDLPQGFSALEPLVDLPIGINITRFQTLLALHRSYLTPGDSSSGWTAGAAAYYVGYLQPRTFLLKYNENGTITDAVDCALDPLSETKCTLKSFTVEKGIYQTSNFRVQPTESIVRFPNITNLCPFGEVFNATRFASVYAWNRKRISNCVADYSVLYNSASFSTFKCYGVSPTKLNDLCFTNVYADSFVIRGDEVRQIAPGQTGKIADYNYKLPDDFTGCVIAWNSNNLDSKVGGNYNYLYRLFRKSNLKPFERDISTEIYQAGSTPCNGVEGFNCYFPLQSYGFQPTNGVGYQPYRVVVLSFELLHAPATVCGPKKSTNLVKNKCVNFNFNGLTGTGVLTESNKKFLPFQQFGRDIADTTDAVRDPQTLEILDITPCSFGGVSVITPGTNTSNQVAVLYQDVNCTEVPVAIHADQLTPTWRVYSTGSNVFQTRAGCLIGAEHVNNSYECDIPIGAGICASYQTQTNSPRRARSVASQSIIAYTMSLGAENSVAYSNNSIAIPTNFTISVTTEILPVSMTKTSVDCTMYICGDSTECSNLLLQYGSFCTQLNRALTGIAVEQDKNTQEVFAQVKQIYKTPPIKDFGGFNFSQILPDPSKPSKRSFIEDLLFNKVTLADAGFIKQYGDCLGDIAARDLICAQKFNGLTVLPPLLTDEMIAQYTSALLAGTITSGWTFGAGAALQIPFAMQMAYRFNGIGVTQNVLYENQKLIANQFNSAIGKIQDSLSSTASALGKLQDVVNQNAQALNTLVKQLSSNFGCISSVLNDILSRLDKVEAEVQIDCLITGRLQSLQTYVTQQLIRAAEIRASANLAATKMSECVLGQSKRVDFCGKGYHLMSFPQSAPHGVVFLHVTYVPAQEKNFTTAPAICHDGKAHFPREGVFVSNGTHWFVTQRNFYEPQIITTDNTFVSGNCDVVIGIVNNTVYDPLQPELDSFKEELDKYFKNHTSPDVDLGDIPGINASVVNIQKEIDRLNEVAKNLNESLIDLQELGKYEQYIKGGGGSDIIKLLNEQVNKEMQSSNLYMSMSSWCYTHSLDGAGLFLFDHAAEEYEHAKKLIIFLNENNVPVQLTSISAPEHKFEGLTQIFQKAYEHEQHISESINNIVDHAIKSKDHATFNFLQWYVAEQHEEEVLFKDILDKIELIGNENHGLYLADQYVKGIAKSRKS

SEQ ID NO: 5480 - protein, 1379 aa, Artificial Sequence
  SARS-CoV-2/USA/WA-UW261/2020__EPI_ISL_418046 spike protein (1-1211)(A972C_R995C) Ferritin construct
MFVFLVLLPLVSSQCVNLTTRTQLPPAYTNSFTRGVYYPDKVFRSSVLHSTQDLFLPFFSNVTWFHAIHVSGTNGTKRFDNPVLPFNDGVYFASTEKSNIIRGWIFGTTLDSKTQSLLIVNNATNVVIKVCEFQFCNDPFLGVYYHKNNKSWMESEFRVYSSANNCTFEYVSQPFLMDLEGKQGNFKNLREFVFKNIDGYFKIYSKHTPINLVRDLPQGFSALEPLVDLPIGINITRFQTLLALHRSYLTPGDSSSGWTAGAAAYYVGYLQPRTFLLKYNENGTITDAVDCALDPLSETKCTLKSFTVEKGIYQTSNFRVQPTESIVRFPNITNLCPFGEVFNATRFTSVYAWNRKRISNCVADYSVLYNSASFSTFKCYGVSPTKLNDLCFTNVYADSFVIRGDEVRQIAPGQTGKIADYNYKLPDDFTGCVIAWNSNNLDSKVGGNYNYLYRLFRKSNLKPFERDISTEIYQAGSTPCNGVEGFNCYFPLQSYGFQPTNGVGYQPYRVVVLSFELLHAPATVCGPKKSTNLVKNKCVNFNFNGLTGTGVLTESNKKFLPFQQFGRDIADTTDAVRDPQTLEILDITPCSFGGVSVITPGTNTSNQVAVLYQDVNCTEVPVAIHADQLTPTWRVYSTGSNVFQTRAGCLIGAEHVNNSYECDIPIGAGICASYQTQTNSPRRARSVASQSIIAYTMSLGAENSVAYSNNSIAIPTNFTISVTTEILPVSMTKTSVDCTMYICGDSTECSNLLLQYGSFCTQLNRALTGIAVEQDKNTQEVFAQVKQIYKTPPIKDFGGFNFSQILPDPSKPSKRSFIEDLLFNKVTLADAGFIKQYGDCLGDIAARDLICAQKFNGLTVLPPLLTDEMIAQYTSALLAGTITSGWTFGAGAALQIPFAMQMAYRFNGIGVTQNVLYENQKLIANQFNSAIGKIQDSLSSTASALGKLQDVVNQNAQALNTLVKQLSSNFGCISSVLNDILSRLDKVEAEVQIDCLITGRLQSLQTYVTQQLIRAAEIRASANLAATKMSECVLGQSKRVDFCGKGYHLMSFPQSAPHGVVFLHVTYVPAQEKNFTTAPAICHDGKAHFPREGVFVSNGTHWFVTQRNFYEPQIITTDNTFVSGNCDVVIGIVNNTVYDPLQPELDSFKEELDKYFKNHTSPDVDLGDISGINASVVNIQKEIDRLNEVAKNLNESLIDLQELGKYEQYIKGGGGSDIIKLLNEQVNKEMQSSNLYMSMSSWCYTHSLDGAGLFLFDHAAEEYEHAKKLIIFLNENNVPVQLTSISAPEHKFEGLTQIFQKAYEHEQHISESINNIVDHAIKSKDHATFNFLQWYVAEQHEEEVLFKDILDKIELIGNENHGLYLADQYVKGIAKSRKS

SEQ ID NO: 5481 - protein, 1379 aa, Artificial Sequence
  SARS-CoV-2/Portugal/PT0035/2020__EPI_ISL_418020 spike protein (1-1211)(A972C_R995C) Ferritin construct
MFVFLVLLPLVSSQCVNLTTRTQLPPAYTNSFTRGVYYPDKVFRSSVLHSTQDLFLPFFSNVTWFHAIHVSGTNGTKRFDNPVLPFNDGVYFASTEKSNIIRGWIFGTTLDSKTQSLLIVNNATNVVIKVCEFQFCNDPFLGVYYHKNNKSWMESEFRVYSSANNCTFEYVSQPFLMDLEGKQGNFKNLREFVFKNIDGYFKIYSKHTPINLVRDLPQGFSALEPLVDLPIGINITRFQTLLALHRSYLTPGDSSSGWTAGAAAYYVGYLQPRTFLLKYNENGTITDAVDCALDPLSETKCTLKSFTVEKGIYQTSNFRVQPTESIVRFPNITNLCPFGEVFNATRFASVYAWNRKRISNCVADYSVLYNSASFSTFKCYGVSPTKLNDLCFTNVYADSFVIRGDEVRQIAPGQTGKIADYNYKLPDDFTGCVIAWNSNNLDSKVGGNYNYLYRLFRKSNLKPFERDISTEIYQAGSTPCNGVEGFNCYFPLQSYGFQPTNGVGYQPYRVVVLSFELLHAPATVCGPKKSTNLVKNKCVNFNFNGLTGTGVLTESNKKFLPFQQFGRDIADTTDAVRDPQTLEILDITPCSFGGVSVITPGTNTSNQVAVLYQDVNCTEVPVAIHADQLTPTWRVYSTGSNVFQTRAGCLIGAEHVNNSYECDIPIGAGICASYQTQTNSPRRARSVASQSIIAYTMSLGAENSVAYSNNSIAIPTNFTISVTTEILPVSMTKTSVDCTMYICGDSTECSNLLLQYGSFCTQLNRALTGIAVEQDKNTQEVFAQVKQIYKTPPIKDFGGFNFSQILPDPSKPSKRSFIEDLLFNKVTLADAGFIKQYGDCLGDISARDLICAQKFNGLTVLPPLLTDEMIAQYTSALLAGTITSGWTFGAGAALQIPFAMQMAYRFNGIGVTQNVLYENQKLIANQFNSAIGKIQDSLSSTASALGKLQDVVNQNAQALNTLVKQLSSNFGCISSVLNDILSRLDKVEAEVQIDCLITGRLQSLQTYVTQQLIRAAEIRASANLAATKMSECVLGQSKRVDFCGKGYHLMSFPQSAPHGVVFLHVTYVPAQEKNFTTAPAICHDGKAHFPREGVFVSNGTHWFVTQRNFYEPQIITTDNTFVSGNCDVVIGIVNNTVYDPLQPELDSFKEELDKYFKNHTSPDVDLGDISGINASVVNIQKEIDRLNEVAKNLNESLIDLQELGKYEQYIKGGGGSDIIKLLNEQVNKEMQSSNLYMSMSSWCYTHSLDGAGLFLFDHAAEEYEHAKKLIIFLNENNVPVQLTSISAPEHKFEGLTQIFQKAYEHEQHISESINNIVDHAIKSKDHATFNFLQWYVAEQHEEEVLFKDILDKIELIGNENHGLYLADQYVKGIAKSRKS

SEQ ID NO: 5482 - protein, 1379 aa, Artificial Sequence
  SARS-CoV-2/USA/NY-NYUMC7/2020__EPI_ISL_418192 spike protein (1-1211)(A972C_R995C) Ferritin construct
MFVFLVLLPLVSSQCVNLTTRTQLPPAYTNSFTRGVYYPDKVFRSSVLHSTQDLFLPFFSNVTWFHAIHVSGTNGTKRFDNPVLPFNDGVYFASTEKSNIIRGWIFGTTLDSKTQSLLIVNNATNVVIKVCEFQFCNDPFLGVYHHKNNKSWMESEFRVYSSANNCTFEYVSQPFLMDLEGKQGNFKNLREFVFKNIDGYFKIYSKHTPINLVRDLPQGFSALEPLVDLPIGINITRFQTLLALHRSYLTPGDSSSGWTAGAAAYYVGYLQPRTFLLKYNENGTITDAVDCALDPLSETKCTLKSFTVEKGIYQTSNFRVQPTESIVRFPNITNLCPFGEVFNATRFASVYAWNRKRISNCVADYSVLYNSASFSTFKCYGVSPTKLNDLCFTNVYADSFVIRGDEVRQIAPGQTGKIADYNYKLPDDFTGCVIAWNSNNLDSKVGGNYNYLYRLFRKSNLKPFERDISTEIYQAGSTPCNGVEGFNCYFPLQSYGFQPTNGVGYQPYRVVVLSFELLHAPATVCGPKKSTNLVKNKCVNFNFNGLTGTGVLTESNKKFLPFQQFGRDIADTTDAVRDPQTLEILDITPCSFGGVSVITPGTNTSNQVAVLYQGVNCTEVPVAIHADQLTPTWRVYSTGSNVFQTRAGCLIGAEHVNNSYECDIPIGAGICASYQTQTNSPRRARSVASQSIIAYTMSLGAENSVAYSNNSIAIPTNFTISVTTEILPVSMTKTSVDCTMYICGDSTECSNLLLQYGSFCTQLNRALTGIAVEQDKNTQEVFAQVKQIYKTPPIKDFGGFNFSQILPDPSKPSKRSFIEDLLFNKVTLADAGFIKQYGDCLGDIAARDLICAQKFNGLTVLPPLLTDEMIAQYTSALLAGTITSGWTFGAGAALQIPFAMQMAYRFNGIGVTQNVLYENQKLIANQFNSAIGKIQDSLSSTASALGKLQDVVNQNAQALNTLVKQLSSNFGCISSVLNDILSRLDKVEAEVQIDCLITGRLQSLQTYVTQQLIRAAEIRASANLAATKMSECVLGQSKRVDFCGKGYHLMSFPQSAPHGVVFLHVTYVPAQEKNFTTAPAICHDGKAHFPREGVFVSNGTHWFVTQRNFYEPQIITTDNTFVSGNCDVVIGIVNNTVYDPLQPELDSFKEELDKYFKNHTSPDVDLGDISGINASVVNIQKEIDRLNEVAKNLNESLIDLQELGKYEQYIKGGGGSDIIKLLNEQVNKEMQSSNLYMSMSSWCYTHSLDGAGLFLFDHAAEEYEHAKKLIIFLNENNVPVQLTSISAPEHKFEGLTQIFQKAYEHEQHISESINNIVDHAIKSKDHATFNFLQWYVAEQHEEEVLFKDILDKIELIGNENHGLYLADQYVKGIAKSRKS

SEQ ID NO: 5483 - protein, 1379 aa, Artificial Sequence
  SARS-CoV-2/Iceland/189/2020__EPI_ISL_417709 spike protein (1-1211)(A972C_R995C) Ferritin construct
MFVFLVLLPLVSSQCVNLTTRTQLPPAYTNSFTRGVYYPDKVFRSSVLHSTQDLFLPFFSNVTWFHAIHVSGTNGTKRFDNPVLPFNDGVYFASTEKSNIIRGWIFGTTLDSKTQSLLIVNNATNVVIKVCEFQFCNDPFLGVYYHKNNKSWMESEFRVYSSANNCTFEYVSQPFLMDLEGKQGNFKNLREFVFKNIDGYFKIYSKHTPINLVRDLPQGFSALEPLVDLPIGINITRFQTLLALHRSYLTPGDSSSGWTAGAAAYYVGYLQPRTFLLKYNENGTITDAVDCALDPLSETKCTLKSFTVEKGIYQTSNFRVQPTESIVRFPNITNLCPFGEVFNATRFASVYAWNRKRISNCVADYSVLYNSASFSTFKCYGVSPTKLNDLCFTNVYADSFVIRGDEVRQIAPGQTGKIADYNYKLPDDFTGCVIAWNSNNLDSKVGGNYNYLYRLFRKSNLKPFERDISTEIYQAGSTPCNGVEGFNCYFPLQSYGFQPTNGVGYQPYRVVVLSFELLHAPATVCGPKKSTNLVKNKCVNFNFNGLTGTGVLTESNKKFLPFQQFGRDIADTTDAVRDPQTLEILDITPCSFGGVSVITPGTNTSNQVAVLYQGVNCTEVPVAIHADQLTPTWRVYSTGSNVFQTRAGCLIGAEHVNNSYECDIPIGAGICASYQTQTNSPRRARSVASQSIIAYTMSLGAENSVAYSNNSIAIPTNFTISVTTEILPVSMTKTSVDCTMYICGDSTECSNLLLQYGSFCTQLNRALTGIAVEQDKNTQEVFAQVKQIYKTPPIKDFGGFNFSQILPDPSKPSKRSFIEDLLFNKVTLADAGFTKQYGDCLGDIAARDLICAQKFNGLTVLPPLLTDEMIAQYTSALLAGTITSGWTFGAGAALQIPFAMQMAYRFNGIGVTQNVLYENQKLIANQFNSAIGKIQDSLSSTASALGKLQDVVNQNAQALNTLVKQLSSNFGCISSVLNDILSRLDKVEAEVQIDCLITGRLQSLQTYVTQQLIRAAEIRASANLAATKMSECVLGQSKRVDFCGKGYHLMSFPQSAPHGVVFLHVTYVPAQEKNFTTAPAICHDGKAHFPREGVFVSNGTHWFVTQRNFYEPQIITTDNTFVSGNCDVVIGIVNNTVYDPLQPELDSFKEELDKYFKNHTSPDVDLGDISGINASVVNIQKEIDRLNEVAKNLNESLIDLQELGKYEQYIKGGGGSDIIKLLNEQVNKEMQSSNLYMSMSSWCYTHSLDGAGLFLFDHAAEEYEHAKKLIIFLNENNVPVQLTSISAPEHKFEGLTQIFQKAYEHEQHISESINNIVDHAIKSKDHATFNFLQWYVAEQHEEEVLFKDILDKIELIGNENHGLYLADQYVKGIAKSRKS

SEQ ID NO: 5484 - protein, 1379 aa, Artificial Sequence
  SARS-CoV-2/Australia/NSW56/2020__EPI_ISL_417408 spike protein (1-1211)(A972C_R995C) Ferritin construct
MFVFLVLLPLVSSQCVNLTTRTQLPPAYTNSFTRGVYYPDKVFRSSVLHSTQDLFLPFFSNVTWFHAIHVSGTNGTKRFDNPVLPFNDGVYFASTEKSNIIRGWIFGTTLDSKTQSLLIVNNATNVVIKVCEFQFCNDPFLGVYYHKNNKSWMESEFRVYSSANNCTFEYVSQPFLMDLEGKQGNFKNLREFVFKNIDGYFKIYSKHTPINLVRDLPQGFSALEPLVDLPIGINITRFQTLLALHRSYLTPGDSSSGWTAGAAAYYVGYLQPRTFLLKYNENGTITDAVDCALDPLSETKCTLKSFTVEKGIYQTSNFRVQPTESIVRFPNITNLCPFGEVFNATRFASVYAWNRKRISNCVADYSVLYNSASFSTFKCYGVSPTKLNDLCFTNVYADSFVIRGDEVRQIAPGQTGKIADYNYKLPDDFTGCVIAWNSNNLDSKVGGNYNYLYRLFRKSNLKPFERDISTEIYQAGSTPCNGVEGFNCYFPLQSYGFQPTNGVGYQPYRVVVLSFELLHAPATVCGPKKSTNLVKNKCVNFNFNGLTGTGVLTESNKKFLPFQQFGRDIADTTDAVRDPQTLEILDITPCSFGGVSVITPGTNTSNQVAVLYQDVNCTEVPVAIHADQLTPTWRVYSTGSNVFQTRAGCLIGAEHVNNSYECDIPIGAGICASYQTQTNSPRRARSVASQSIIAYTMSLGAENSVAYSNNSIAIPTNFTISVTTEILPVSMTKTSVDCTMYICGDSTECSNLLLQYGSFCTQLNRALTGIAVEQDKNTQEVFAQVKQIYKTPPIKDFGGFNFSQILPDSSKPSKRSFIEDLLFNKVTLADAGFIKQYGDCLGDIAARDLICAQKFNGLTVLPPLLTDEMIAQYTSALLAGTITSGWTFGAGAALQIPFAMQMAYRFNGIGVTQNVLYENQKLIANQFNSAIGKIQDSLSSTASALGKLQDVVNQNAQALNTLVKQLSSNFGCISSVLNDILSRLDKVEAEVQIDCLITGRLQSLQTYVTQQLIRAAEIRASANLAATKMSECVLGQSKRVDFCGKGYHLMSFPQSAPHGVVFLHVTYVPAQEKNFTTAPAICHDGKAHFPREGVFVSNGTHWFVTQRNFYEPQIITTDNTFVSGNCDVVIGIVNNTVYDPLQPELDSFKEELDKYFKNHTSPDVDLGDISGINASVVNIQKEIDRLNEVAKNLNESLIDLQELGKYEQYIKGGGGSDIIKLLNEQVNKEMQSSNLYMSMSSWCYTHSLDGAGLFLFDHAAEEYEHAKKLIIFLNENNVPVQLTSISAPEHKFEGLTQIFQKAYEHEQHISESINNIVDHAIKSKDHATFNFLQWYVAEQHEEEVLFKDILDKIELIGNENHGLYLADQYVKGIAKSRKS

SEQ ID NO: 5485 - protein, 1379 aa, Artificial Sequence
  SARS-CoV-2/Iceland/280/2020__EPI_ISL_417608 spike protein (1-1211)(A972C_R995C) Ferritin construct
MFVFLVLLPLVSSQCVNLTTRTQLPPAYTNSFTRGVYYPDKVFRSSVLHSTQDLFLPFFSNVTWFHAIHVSGTNGTKRFDNPVLPFNDGVYFASTEKSNIIRGWIFGTTLDSKTQSLLIVNNATNVVIKVCEFQFCNDPFLGVYYHKNNKSWMESEFRVYSSANNCTFEYVSQPFLMDLEGKQGNFKNLREFVFKNIDGYFKIYSKHTPINLVRDLPQGFSALEPLVDLPIGINITRFQTLLALHRSYLTPGDSSSGWTAGAAAYYVGYLQPRTFLLKYNENGTITDAVDCALDPLSETKCTLKSFTVEKGIYQTSNFRVQPTESIVRFPNITNLCPFGEVFNATRFASVYAWNRKRISNCVADYSVLYNSASFSTFKCYGVSPTKLNDLCFTNVYADSFVIRGDEVRQIAPGQTGKIADYNYKLPDDFTGCVIAWNSNNLDSKVGGNYNYLYRLFRKSNLKPFERDISTEIYQAGSTPCNGVEGFNCYFPLQSYGFQPTNGVGYQPYRVVVLSFELLHAPATVCGPKKSTNLVKNKCVNFNFNGLTGTGVLTESNKKFLPFQQFGRDIADTTDAVRDPQTLEILDITPCSFGGVSVITPGTNTSNQVAVLYQGVNCTEVPVAIHADQLTPTWRVYSTGSNVFQTRAGCLIGAEHVNNSYECDIPIGAGICASYHTQTNSPRRARSVASQSIIAYTMSLGAENSVAYSNNSIAIPTNFTISVTTEILPVSMTKTSVDCTMYICGDSTECSNLLLQYGSFCTQLNRALTGIAVEQDKNTQEVFAQVKQIYKTPPIKDFGGFNFSQILPDPSKPSKRSFIEDLLFNKVTLADAGFIKQYGDCLGDIAARDLICAQKFNGLTVLPPLLTDEMIAQYTSALLAGTITSGWTFGAGAALQIPFAMQMAYRFNGIGVTQNVLYENQKLIANQFNSAIGKIQDSLSSTASALGKLQDVVNQNAQALNTLVKQLSSNFGCISSVLNDILSRLDKVEAEVQIDCLITGRLQSLQTYVTQQLIRAAEIRASANLAATKMSECVLGQSKRVDFCGKGYHLMSFPQSAPHGVVFLHVTYVPAQEKNFTTAPAICHDGKAHFPREGVFVSNGTHWFVTQRNFYEPQIITTDNTFVSGNCDVVIGIVNNTVYDPLQPELDSFKEELDKYFKNHTSPDVDLGDISGINASVVNIQKEIDRLNEVAKNLNESLIDLQELGKYEQYIKGGGGSDIIKLLNEQVNKEMQSSNLYMSMSSWCYTHSLDGAGLFLFDHAAEEYEHAKKLIIFLNENNVPVQLTSISAPEHKFEGLTQIFQKAYEHEQHISESINNIVDHAIKSKDHATFNFLQWYVAEQHEEEVLFKDILDKIELIGNENHGLYLADQYVKGIAKSRKS

SEQ ID NO: 5486 - protein, 1379 aa, Artificial Sequence; identical to SEQ ID NO: 5441
  SARS-CoV-2/Iceland/247/2020__EPI_ISL_417575 spike protein (1-1211)(A972C_R995C) Ferritin construct

SEQ ID NO: 5487 - protein, 1379 aa, Artificial Sequence
  SARS-CoV-2/Iceland/238/2020__EPI_ISL_417566 spike protein (1-1211)(A972C_R995C) Ferritin construct
MFVFLVLLPLVSSQCVNLTTRTQLPPAYTNSFTRGVYYPDKVFRSSVLHSTQDLFLPFFSNVTWFHAIHVSGTNGTKRFDNPVLPFNDGVYFASTEKSNIIRGWIFGTTLDSKTQSLLIVNNATNVVIKVCEFQFCNDPFLGVYYHKNNKSWMESEFRVYSSANNCTFEYVSQPFLMDLEGKQGNFKNLREFVFKNIDGYFKIYSKHTPINLVRDLPQGFSALEPLVDLPIGINITRFQTLLALHRSYLTPGDSSSGWTAGAAAYYVGYLQPRTFLLKYNENGTITDAVDCALDPLSETKCTLKSFTVEKGIYQTSNFRVQPTESIVRFPNITNLCPFGEVFNATRFASVYAWNRKRISNCVADYSVLYNSASFSTFKCYGVSPTKLNDLCFTNVYADSFVIRGDEVRQIAPGQTGKIADYNYKLPDDFTGCVIAWNSNNLDSKVGGNYNYLYRLFRKSNLKPFERDISTEIYQAGSTPCNGVEGFNCYFPLQSYGFQPTNGVGYQPYRVVVLSFELLHAPATVCGPKKSTNLVKNKCVNFNFNGLTGTGVLTESNKKFLPFQQFGRDIADTTDAVRDPQTLEILDITPCSFGGVSVITPGTNTSNQVAVLYQGVNCTEVPVAIHADQLTPTWRVYSTGSNVFQTRAGCLIGAEHVNNSYECDIPIGAGICASYQTQTNSPRRARSVASQSIIAYTMSLGAENSVAYSNNSIAIPTNFTISVTTEILPVSMTKTSVDCTMYICGDSTECSNLLLQYGSFCTQLNRALTGIAVEQDKNTQEVFAQVKQIYKTPPIKDFGGFNFSQILPDPSKPSKRSFIEDLLFNKVTLADVGFIKQYGDCLGDIAARDLICAQKFNGLTVLPPLLTDEMIAQYTSALLAGTITSGWTFGAGAALQIPFAMQMAYRFNGIGVTQNVLYENQKLIANQFNSAIGKIQDSLSSTASALGKLQDVVNQNAQALNTLVKQLSSNFGCISSVLNDILSRLDKVEAEVQIDCLITGRLQSLQTYVTQQLIRAAEIRASANLAATKMSECVLGQSKRVDFCGKGYHLMSFPQSAPHGVVFLHVTYVPAQEKNFTTAPAICHDGKAHFPREGVFVSNGTHWFVTQRNFYEPQIITTDNTFVSGNCDVVIGIVNNTVYDPLQPELDSFKEELDKYFKNHTSPDVDLGDISGINASVVNIQKEIDRLNEVAKNLNESLIDLQELGKYEQYIKGGGGSDIIKLLNEQVNKEMQSSNLYMSMSSWCYTHSLDGAGLFLFDHAAEEYEHAKKLIIFLNENNVPVQLTSISAPEHKFEGLTQIFQKAYEHEQHISESINNIVDHAIKSKDHATFNFLQWYVAEQHEEEVLFKDILDKIELIGNENHGLYLADQYVKGIAKSRKS

SEQ ID NO: 5488 - protein, 1379 aa, Artificial Sequence
  SARS-CoV-2/Greece/16/2020__EPI_ISL_418265 spike protein (1-1211)(A972C_R995C) Ferritin construct
MFVFLVLLPLVSSQCVNLTTRTQLPPAYTNSFTRGVYYPDKVFRSSVLHSTQDLFLPFFSNVTWFHAIHVSGTNGTKRFDNPVLPFNDGVYFASTEKSNIIRGWIFGTTLDSKTQSLLIVNNATNVVIKVCEFQFCNDPFLGVYYHKNNKSWMESEFRVYSSANNCTFEYVSQPFLMDLEGKQGNFKNLREFVFKNVDGYFKIYSKHTPINLVRDLPQGFSALEPLVDLPIGINITRFQTLLALHRSYLTPGDSSSGWTAGAAAYYVGYLQPRTFLLKYNENGTITDAVDCALDPLSETKCTLKSFTVEKGIYQTSNFRVQPTESIVRFPNITNLCPFGEVFNATRFASVYAWNRKRISNCVADYSVLYNSASFSTFKCYGVSPTKLNDLCFTNVYADSFVIRGDEVRQIAPGQTGKIADYNYKLPDDFTGCVIAWNSNNLDSKVGGNYNYLYRLFRKSNLKPFERDISTEIYQAGSTPCNGVEGFNCYFPLQSYGFQPTNGVGYQPYRVVVLSFELLHAPATVCGPKKSTNLVKNKCVNFNFNGLTGTGVLTESNKKFLPFQQFGRDIADTTDAVRDPQTLEILDITPCSFGGVSVITPGTNTSNQVAVLYQDVNCTEVPVAIHADQLTPTWRVYSTGSNVFQTRAGCLIGAEHVNNSYECDIPIGAGICASYQTQTNSPRRARSVASQSIIAYTMSLGAENSVAYSNNSIAIPTNFTISVTTEILPVSMTKTSVDCTMYICGDSTECSNLLLQYGSFCTQLNRALTGIAVEQDKNTQEVFAQVKQIYKTPPIKDFGGFNFSQILPDPSKPSKRSFIEDLLFNKVTLADAGFIKQYGDCLGDIAARDLICAQKFNGLTVLPPLLTDEMIAQYTSALLAGTITSGWTFGAGAALQIPFAMQMAYRFNGIGVTQNVLYENQKLIANQFNSAIGKIQDSLSSTASALGKLQDVVNQNAQALNTLVKQLSSNFGCISSVLNDILSRLDKVEAEVQIDCLITGRLQSLQTYVTQQLIRAAEIRASANLAATKMSECVLGQSKRVDFCGKGYHLMSFPQSAPHGVVFLHVTYVPAQEKNFTTAPAICHDGKAHFPREGVFVSNGTHWFVTQRNFYEPQIITTDNTFVSGNCDVVIGIVNNTVYDPLQPELDSFKEELDKYFKNHTSPDVDLGDISGINASVVNIQKEIDRLNEVAKNLNESLIDLQELGKYEQYIKGGGGSDIIKLLNEQVNKEMQSSNLYMSMSSWCYTHSLDGAGLFLFDHAAEEYEHAKKLIIFLNENNVPVQLTSISAPEHKFEGLTQIFQKAYEHEQHISESINNIVDHAIKSKDHATFNFLQWYVAEQHEEEVLFKDILDKIELIGNENHGLYLADQYVKGIAKSRKS

SEQ ID NO: 5489 - protein, 1379 aa, Artificial Sequence
  SARS-CoV-2/Iceland/319/2020__EPI_ISL_417648 spike protein (1-1211)(A972C_R995C) Ferritin construct
MFVFLVLLPLVSSQCVNLTTRTQLPPAYTNSFTRGVYYPDKVFRSSVLHSTQDLFLPFFSNVTWFHAIHVSGTNGTKRFDNPVLPFNDGVYFASTEKSNIIRGWIFGTTLDSKTQSLLIVNNATNVVIKVCEFQFCNDPFLGVYYHKNNKSWMESEFRVYSSANNCTFEYVSQPFLIDLEGKQGNFKNLREFVFKNIDGYFKIYSKHTPINLVRDLPQGFSALEPLVDLPIGINITRFQTLLALHRSYLTPGDSSSGWTAGAAAYYVGYLQPRTFLLKYNENGTITDAVDCALDPLSETKCTLKSFTVEKGIYQTSNFRVQPTESIVRFPNITNLCPFGEVFNATRFASVYAWNRKRISNCVADYSVLYNSASFSTFKCYGVSPTKLNDLCFTNVYADSFVIRGDEVRQIAPGQTGKIADYNYKLPDDFTGCVIAWNSNNLDSKVGGNYNYLYRLFRKSNLKPFERDISTEIYQAGSTPCNGVEGFNCYFPLQSYGFQPTNGVGYQPYRVVVLSFELLHAPATVCGPKKSTNLVKNKCVNFNFNGLTGTGVLTESNKKFLPFQQFGRDIADTTDAVRDPQTLEILDITPCSFGGVSVITPGTNTSNQVAVLYQGVNCTEVPVAIHADQLTPTWRVYSTGSNVFQTRAGCLIGAEHVNNSYECDIPIGAGICASYQTQTNSPRRARSVASQSIIAYTMSLGAENSVAYSNNSIAIPTNFTISVTTEILPVSMTKTSVDCTMYICGDSTECSNLLLQYGSFCTQLNRALTGIAVEQDKNTQEVFAQVKQIYKTPPIKDFGGFNFSQILPDPSKPSKRSFIEDLLFNKVTLADAGFIKQYGDCLGDIAARDLICAQKFNGLTVLPPLLTDEMIAQYTSALLAGTITSGWTFGAGAALQIPFAMQMAYRFNGIGVTQNVLYENQKLIANQFNSAIGKIQDSLSSTASALGKLQDVVNQNAQALNTLVKQLSSNFGCISSVLNDILSRLDKVEAEVQIDCLITGRLQSLQTYVTQQLIRAAEIRASANLAATKMSECVLGQSKRVDFCGKGYHLMSFPQSAPHGVVFLHVTYVPAQEKNFTTAPAICHDGKAHFPREGVFVSNGTHWFVTQRNFYEPQIITTDNTFVSGNCDVVIGIVNNTVYDPLQPELDSFKEELDKYFKNHTSPDVDLGDISGINASVVNIQKEIDRLNEVAKNLNESLIDLQELGKYEQYIKGGGGSDIIKLLNEQVNKEMQSSNLYMSMSSWCYTHSLDGAGLFLFDHAAEEYEHAKKLIIFLNENNVPVQLTSISAPEHKFEGLTQIFQKAYEHEQHISESINNIVDHAIKSKDHATFNFLQWYVAEQHEEEVLFKDILDKIELIGNENHGLYLADQYVKGIAKSRKS

SEQ ID NO: 5490 - protein, 1379 aa, Artificial Sequence
  SARS-CoV-2/Congo/94/2020__EPI_ISL_417947 spike protein (1-1211)(A972C_R995C) Ferritin construct
MFVFLVLLPLVSSQCVNLTTRTQLPPAYTNSFTRGVYYPDKVFRSSVLHSTQDLFLPFFSNVTWFHAIHVSGTNGTKRFDNPVLPFNDGVYFASTEKSNIIRGWIFGTTLDSKTQSLLIVNNATNVVIKVCEFQFCNDPFLGVYYHKNNKSWMESEFRVYSSANNCTFEYVSQPFLMDLEGKQGNFKNLREFVFKNIDGYFKIYSKHTPINLVRDLPQGFSALEPLVDLPIGINITRFQTLLALHRSYLTPGDSSSGWTAGAAAYYVGYLQPRTFLLKYNENGTITDAVDCALDPLSETKCTLKSFTVEKGIYQTSNFRVQPTESIVRFPNITNLCPFGEVFNATRFASVYAWNRKRISNCVADYSVLYNSASFSTFKCYGVSPTKLNDLCFTNVYADSFVIRGDEVRQIAPGQTGKIADYNYKLPDDFTGCVIAWNSNNLDSKVGGNYNYLYRLFRKSNLKPFERDISTEIYQAGSTPCNGVEGFNCYFPLQSYGFQPTNGVGYQPYRVVVLSFELLHAPATVCGPKKSTNLVKNKCVNFNFNGLTGTGVLTESNKKFLPFQQFGRDIADTTDAVRDPQTLEILDITPCSFGGVSVITPGTNTSNQVAVLYQGVNCTEVPVAIHADQLTPTWRVYSTGSNVFQTRAGCLIGAEHVNNSYECDIPIGAGICASYQTQTNSPRRARSVASQSIIAYTMSLGAENSVAYSNNSIAIPTNFTISVTTEILPVSMTKTSVDCTMYICGDSTECSNLLLQYGSFCTQLNRALTGIAVEQDKNTQEVFAQVKQIYKTPPIKDFGGFNFSQILPDPSKPSKRSFIEDILFNKVTLADAGFIKQYGDCLGDIAARDLICAQKFNGLTVLPPLLTDEMIAQYTSALLAGTITSGWTFGAGAALQIPFAMQMAYRFNGIGVTQNVLYENQKLIANQFNSAIGKIQDSLSSTASALGKLQDVVNQNAQALNTLVKQLSSNFGCISSVLNDILSRLDKVEAEVQIDCLITGRLQSLQTYVTQQLIRAAEIRASANLAATKMSECVLGQSKRVDFCGKGYHLMSFPQSAPHGVVFLHVTYVPAQEKNFTTAPAICHDGKAHFPREGVFVSNGTHWFVTQRNFYEPQIITTDNTFVSGNCDVVIGIVNNTVYDPLQPELDSFKEELDKYFKNHTSPDVDLGDISGINASVVNIQKEIDRLNEVAKNLNESLIDLQELGKYEQYIKGGGGSDIIKLLNEQVNKEMQSSNLYMSMSSWCYTHSLDGAGLFLFDHAAEEYEHAKKLIIFLNENNVPVQLTSISAPEHKFEGLTQIFQKAYEHEQHISESINNIVDHAIKSKDHATFNFLQWYVAEQHEEEVLFKDILDKIELIGNENHGLYLADQYVKGIAKSRKS

SEQ ID NO: 5491 - protein, 1379 aa, Artificial Sequence
  SARS-CoV-2/Congo/158/2020__EPI_ISL_417950 spike protein (1-1211)(A972C_R995C) Ferritin construct
MFVFLVLLPLVSSQCVNLTTRTQLPPAYTNSFTRGVYYPDKVFRSSVLHSTQDLFLPFFSNVTWFHAIHVSGTNGTKRFDNPVLPFNDGVYFASTEKSNIIRGWIFGTTLDSKTQSLLIVNNATNVVIKVCEFQFCNDPFLGVYYHKNNKSWMESEFRVYSSANNCTFEYVSQPFLMDLEGKQGNFKNLREFVFKNIDGYFKIYSKHTPINLVRDLPQGFSALEPLVDLPIGINITRFQTLLALHRSYLTPGDSSSGWTAGAAAYYVGYLQPRTFLLKYNENGTITDAVDCALDPLSETKCTLKSFTVEKGIYQTSNFRVQPTESIVRFPNITNLCPFGEVFNATRFASVYAWNRKRISNCVADYSVLYNSASFSTFKCYGVSPTKLNDLCFTNVYADSFVIRGDEVRQIAPGQTGKIADYNYKLPDDFTGCVIAWNSNNLDSKVGGNYNYLYRLFRKSNLKPFERDISTEIYQAGSTPCNGVEGFNCYFPLQSYGFQPTNGVGYQPYRVVVLSFELLHAPATVCGPKKSTNLVKNKCVNFNFNGLTGTGVLTESNKKFLPFQQFGRDIADTTDAVRDPQTLEILDITPCSFGGVSVITPGTNTSNQVAVLYQDVNCTEVPVAIHADQLTPTWRVYSTGSNVFQTRAGCLIGAEHVNNSYECDIPIGAGICASYQTQTNSPRRARSVASQSIIAYTMSLGAENSVAYSNNSIAIPTNFTISVTTEILPVSMTKTSVDCTMYICGDSTECSNLLLQYGSFCTQLNRALTGIAVEQDKNTQEVFAQVKQIYKTPPIKDFGGFNFSQILPDPSKPSKRSFIEDLLFNKVTLADAGFIKQYGDCLGDIAARDLICAQKFNGLTVLPPLLTDEMIAQYTSALLAGTITSGWTFGAGAALQIPFAMQMAYRFNGIGVTQNVLYENQKLIANQFNSAIGKIQDSLSSTASALGKLQDVVNQNAQALNTLVKQLSSNFGCISSVLNDILSRLDKVEAEVQIDCLITGRLQSLQTYVTQQLIRAAEIRASANLAATKMSECVLGQSKRVDFCGKGYHLMSFPQSAPHGVVFLHVTYVPAQEKNFTTAPAICHDGKAHFPREGVFVSNGTHWFVTQRNFYEPQIITTDNTFLSGNCDVVIGIVNNTVYDPLQPELDSFKEELDKYFKNHTSPDVDLGDISGINASVVNIQKEIDRLNEVAKNLNESLIDLQELGKYEQYIKGGGGSDIIKLLNEQVNKEMQSSNLYMSMSSWCYTHSLDGAGLFLFDHAAEEYEHAKKLIIFLNENNVPVQLTSISAPEHKFEGLTQIFQKAYEHEQHISESINNIVDHAIKSKDHATFNFLQWYVAEQHEEEVLFKDILDKIELIGNENHGLYLADQYVKGIAKSRKS

SEQ ID NO: 5492 - protein, 1379 aa, Artificial Sequence
  SARS-CoV-2/USA/UT-00034/2020__EPI_ISL_417977 spike protein (1-1211)(A972C_R995C) Ferritin construct
MFVFLVLLPLVSSQCVNLTTRTQLPPAYTNSFTRGVYYPDKVFRSSVLHSTQDLFLPFFSNVTWFHAIHVSGTNGTKRFDNPVLPFNDGVYFASTEKSNIIRGWIFGTTLDSKTQSLLIVNNATNVVIKVCEFQFCNDPFLGVYYYKNNKSWMESEFRVYSSANNCTFEYVSQPFLMDLEGKQGNFKNLREFVFKNIDGYFKIYSKHTPINLVRDLPQGFSALEPLVDLPIGINITRFQTLLALHRSYLTPGDSSSGWTAGAAAYYVGYLQPRTFLLKYNENGTITDAVDCALDPLSETKCTLKSFTVEKGIYQTSNFRVQPTESIVRFPNITNLCPFGEVFNATRFASVYAWNRKRISNCVADYSVLYNSASFSTFKCYGVSPTKLNDLCFTNVYADSFVIRGDEVRQIAPGQTGKIADYNYKLPDDFTGCVIAWNSNNLDSKVGGNYNYLYRLFRKSNLKPFERDISTEIYQAGSTPCNGVEGFNCYFPLQSYGFQPTNGVGYQPYRVVVLSFELLHAPATVCGPKKSTNLVKNKCVNFNFNGLTGTGVLTESNKKFLPFQQFGRDIADTTDAVRDPQTLEILDITPCSFGGVSVITPGTNTSNQVAVLYQGVNCTEVPVAIHADQLTPTWRVYSTGSNVFQTRAGCLIGAEHVNNSYECDIPIGAGICASYQTQTNSPRRARSVASQSIIAYTMSLGAENSVAYSNNSIAIPTNFTISVTTEILPVSMTKTSVDCTMYICGDSTECSNLLLQYGSFCTQLNRALTGIAVEQDKNTQEVFAQVKQIYKTPPIKDFGGFNFSQILPDPSKPSKRSFIEDLLFNKVTLADAGFIKQYGDCLGDIAARDLICAQKFNGLTVLPPLLTDEMIAQYTSALLAGTITSGWTFGAGAALQIPFAMQMAYRFNGIGVTQNVLYENQKLIANQFNSAIGKIQDSLSSTASALGKLQDVVNQNAQALNTLVKQLSSNFGCISSVLNDILSRLDKVEAEVQIDCLITGRLQSLQTYVTQQLIRAAEIRASANLAATKMSECVLGQSKRVDFCGKGYHLMSFPQSAPHGVVFLHVTYVPAQEKNFTTAPAICHDGKAHFPREGVFVSNGTHWFVTQRNFYEPQIITTDNTFVSGNCDVVIGIVNNTVYDPLQPELDSFKEELDKYFKNHTSPDVDLGDISGINASVVNIQKEIDRLNEVAKNLNESLIDLQELGKYEQYIKGGGGSDIIKLLNEQVNKEMQSSNLYMSMSSWCYTHSLDGAGLFLFDHAAEEYEHAKKLIIFLNENNVPVQLTSISAPEHKFEGLTQIFQKAYEHEQHISESINNIVDHAIKSKDHATFNFLQWYVAEQHEEEVLFKDILDKIELIGNENHGLYLADQYVKGIAKSRKS

SEQ ID NO: 5493 - protein, 1379 aa, Artificial Sequence
  SARS-CoV-2/USA/UT-00033/2020__EPI_ISL_417976 spike protein (1-1211)(A972C_R995C) Ferritin construct
MFVFLVLLPLVSSQCVNLTTRTQLPPAYTNSFTRGVYYPDKVFRSSVLHSTQDLFLPFFSNVTWFHAIHVSGTNGTKRFDNPVLPFNDGVYFASTEKSNIIRGWIFGTTLDSKTQSLLIVNNATNVVIKVCEFQFCNDPFLGVYYHKNNKSWMESEFRVYSSANNCTFEYVSQPFLMDLEGKQGNFKNLREFVFKNIDGYFKIYSKHTPINLVRDLPQGFSALEPLVDLPIGINITRFQTLLALHRSYLTPGDSSSGLTAGAAAYYVGYLQPRTFLLKYNENGTITDAVDCALDPLSETKCTLKSFTVEKGIYQTSNFRVQPTESIVRFPNITNLCPFGEVFNATRFASVYAWNRKRISNCVADYSVLYNSASFSTFKCYGVSPTKLNDLCFTNVYADSFVIRGDEVRQIAPGQTGKIADYNYKLPDDFTGCVIAWNSNNLDSKVGGNYNYLYRLFRKSNLKPFERDISTEIYQAGSTPCNGVEGFNCYFPLQSYGFQPTNGVGYQPYRVVVLSFELLHAPATVCGPKKSTNLVKNKCVNFNFNGLTGTGVLTESNKKFLPFQQFGRDIADTTDAVRDPQTLEILDITPCSFGGVSVITPGTNTSNQVAVLYQGVNCTEVPVAIHADQLTPTWRVYSTGSNVFQTRAGCLIGAEHVNNSYECDIPIGAGICASYQTQTNSPRRARSVASQSIIAYTMSLGAENSVAYSNNSIAIPTNFTISVTTEILPVSMTKTSVDCTMYICGDSTECSNLLLQYGSFCTQLNRALTGIAVEQDKNTQEVFAQVKQIYKTPPIKDFGGFNFSQILPDPSKPSKRSFIEDLLFNKVTLADAGFIKQYGDCLGDIAARDLICAQKFNGLTVLPPLLTDEMIAQYTSALLAGTITSGWTFGAGAALQIPFAMQMAYRFNGIGVTQNVLYENQKLIANQFNSAIGKIQDSLSSTASALGKLQDVVNQNAQALNTLVKQLSSNFGCISSVLNDILSRLDKVEAEVQIDCLITGRLQSLQTYVTQQLIRAAEIRASANLAATKMSECVLGQSKRVDFCGKGYHLMSFPQSAPHGVVFLHVTYVPAQEKNFTTAPAICHDGKAHFPREGVFVSNGTHWFVTQRNFYEPQIITTDNTFVSGNCDVVIGIVNNTVYDPLQPELDSFKEELDKYFKNHTSPDVDLGDISGINASVVNIQKEIDRLNEVAKNLNESLIDLQELGKYEQYIKGGGGSDIIKLLNEQVNKEMQSSNLYMSMSSWCYTHSLDGAGLFLFDHAAEEYEHAKKLIIFLNENNVPVQLTSISAPEHKFEGLTQIFQKAYEHEQHISESINNIVDHAIKSKDHATFNFLQWYVAEQHEEEVLFKDILDKIELIGNENHGLYLADQYVKGIAKSRKS

SEQ ID NO: 5494 - protein, 1379 aa, Artificial Sequence
  SARS-CoV-2/USA/WI-13/2020__EPI_ISL_417516 spike protein (1-1211)(A972C_R995C) Ferritin construct
MFVFLVLLPLVSSQCVNLTTRTQLPPAYTNSFTRGVYYPDKVFRSSVLHSTQDLFLPFFSNVTWFHAIHVSGTNGTKRFDNPVLPFNDGVYFASTEKSNIIRGWIFGTTLDSKTQSLLIVNNATNVVIKVCEFQFCNDPFLGVYYHKNNKSWMESEFRVYSSANNCTFEYVSQPFLMDLEGKQGNFKNLREFVFKNIDGYFKIYSKHTPINLVRDLPQGFSALEPLVDLPIGINITRFQTLLALHRSYLTPGDSSSGWTAGAAAYYVGYLQPRTFLLKYNENGTITDAVDCALDPLSETKCTLKSFTVEKGIYQTSNFRVLPTESIVRFPNITNLCPFGEVFNATRFASVYAWNRKRISNCVADYSVLYNSASFSTFKCYGVSPTKLNDLCFTNVYADSFVIRGDEVRQIAPGQTGKIADYNYKLPDDFTGCVIAWNSNNLDSKVGGNYNYLYRLFRKSNLKPFERDISTEIYQAGSTPCNGVEGFNCYFPLQSYGFQPTNGVGYQPYRVVVLSFELLHAPATVCGPKKSTNLVKNKCVNFNFNGLTGTGVLTESNKKFLPFQQFGRDIADTTDAVRDPQTLEILDITPCSFGGVSVITPGTNTSNQVAVLYQGVNCTEVPVAIHADQLTPTWRVYSTGSNVFQTRAGCLIGAEHVNNSYECDIPIGAGICASYQTQTNSPRRARSVASQSIIAYTMSLGAENSVAYSNNSIAIPTNFTISVTTEILPVSMTKTSVDCTMYICGDSTECSNLLLQYGSFCTQLNRALTGIAVEQDKNTQEVFAQVKQIYKTPPIKDFGGFNFSQILPDPSKPSKRSFIEDLLFNKVTLADAGFIKQYGDCLGDIAARDLICAQKFNGLTVLPPLLTDEMIAQYTSALLAGTITSGWTFGAGAALQIPFAMQMAYRFNGIGVTQNVLYENQKLIANQFNSAIGKIQDSLSSTASALGKLQDVVNQNAQALNTLVKQLSSNFGCISSVLNDILSRLDKVEAEVQIDCLITGRLQSLQTYVTQQLIRAAEIRASANLAATKMSECVLGQSKRVDFCGKGYHLMSFPQSAPHGVVFLHVTYVPAQEKNFTTAPAICHDGKAHFPREGVFVSNGTHWFVTQRNFYEPQIITTDNTFVSGNCDVVIGIVNNTVYDPLQPELDSFKEELDKYFKNHTSPDVDLGDISGINASVVNIQKEIDRLNEVAKNLNESLIDLQELGKYEQYIKGGGGSDIIKLLNEQVNKEMQSSNLYMSMSSWCYTHSLDGAGLFLFDHAAEEYEHAKKLIIFLNENNVPVQLTSISAPEHKFEGLTQIFQKAYEHEQHISESINNIVDHAIKSKDHATFNFLQWYVAEQHEEEVLFKDILDKIELIGNENHGLYLADQYVKGIAKSRKS

SEQ ID NO: 5495 - protein, 1378 aa, Artificial Sequence
  SARS-CoV-2/India/1-27/2020__EPI_ISL_413522 spike protein (1-1210)(A971C_R994C) Ferritin construct
MFVFLVLLPLVSSQCVNLTTRTQLPPAYTNSFTRGVYYPDKVFRSSVLHSTQDLFLPFFSNVTWFHAIHVSGTNGTKRFDNPVLPFNDGVYFASTEKSNIIRGWIFGTTLDSKTQSLLIVNNATNVVIKVCEFQFCNDPFLGVYHKNNKSWMESEFRVYSSANNCTFEYVSQPFLMDLEGKQGNFKNLREFVFKNIDGYFKIYSKHTPINLVRDLPQGFSALEPLVDLPIGINITRFQTLLALHRSYLTPGDSSSGWTAGAAAYYVGYLQPRTFLLKYNENGTITDAVDCALDPLSETKCTLKSFTVEKGIYQTSNFRVQPTESIVRFPNITNLCPFGEVFNATRFASVYAWNRKRISNCVADYSVLYNSASFSTFKCYGVSPTKLNDLCFTNVYADSFVIRGDEVIQIAPGQTGKIADYNYKLPDDFTGCVIAWNSNNLDSKVGGNYNYLYRLFRKSNLKPFERDISTEIYQAGSTPCNGVEGFNCYFPLQSYGFQPTNGVGYQPYRVVVLSFELLHAPATVCGPKKSTNLVKNKCVNFNFNGLTGTGVLTESNKKFLPFQQFGRDIADTTDAVRDPQTLEILDITPCSFGGVSVITPGTNTSNQVAVLYQDVNCTEVPVAIHADQLTPTWRVYSTGSNVFQTRAGCLIGAEHVNNSYECDIPIGAGICASYQTQTNSPRRARSVASQSIIAYTMSLGAENSVAYSNNSIAIPTNFTISVTTEILPVSMTKTSVDCTMYICGDSTECSNLLLQYGSFCTQLNRALTGIAVEQDKNTQEVFAQVKQIYKTPPIKDFGGFNFSQILPDPSKPSKRSFIEDLLFNKVTLADAGFIKQYGDCLGDIAARDLICAQKFNGLTVLPPLLTDEMIAQYTSALLAGTITSGWTFGAGAALQIPFAMQMAYRFNGIGVTQNVLYENQKLIANQFNSAIGKIQDSLSSTASALGKLQDVVNQNAQALNTLVKQLSSNFGCISSVLNDILSRLDKVEAEVQIDCLITGRLQSLQTYVTQQLIRAAEIRASANLAATKMSECVLGQSKRVDFCGKGYHLMSFPQSAPHGVVFLHVTYVPAQEKNFTTAPAICHDGKAHFPREGVFVSNGTHWFVTQRNFYEPQIITTDNTFVSGNCDVVIGIVNNTVYDPLQPELDSFKEELDKYFKNHTSPDVDLGDISGINASVVNIQKEIDRLNEVAKNLNESLIDLQELGKYEQYIKGGGGSDIIKLLNEQVNKEMQSSNLYMSMSSWCYTHSLDGAGLFLFDHAAEEYEHAKKLIIFLNENNVPVQLTSISAPEHKFEGLTQIFQKAYEHEQHISESINNIVDHAIKSKDHATFNFLQWYVAEQHEEEVLFKDILDKIELIGNENHGLYLADQYVKGIAKSRKS

SEQ ID NO: 5496 - protein, 1373 aa, Artificial Sequence
  SARS-CoV-2/pangolin/Guangxi/P4L/2017__EPI_ISL_410538 spike protein (1-1205)(A966C_R989C) Ferritin construct
MFVFLFVLPLVSSQCVNLTTRTGIPPGYTNSSTRGVYYPDKVFRSSILHLTQDLFLPFFSNVTWFNTINYQGGFKKFDNPVLPFNDGVYFASTEKSNIIRGWIFGTTLDARTQSLLIVNNATNVVIKVCEFQFCTDPFLGVYYHNNNKTWVENEFRVYSSANNCTFEYISQPFLMDLEGKQGNFKNLREFVFKNVDGYFKIYSKHTPIDLVRDLPRGFAALEPLVDLPIGINITRFQTLLALHRSYLTPGNLESGWTTGAAAYYVGYLQQRTFLLSYNQNGTITDAVDCSLDPLSETKCTLKSLTVEKGIYQTSNFRVQPTISIVRFPNITNLCPFGEVFNASKFASVYAWNRKRISNCVADYSVLYNSTSFSTFKCYGVSPTKLNDLCFTNVYADSFVVKGDEVRQIAPGQTGVIADYNYKLPDDFTGCVIAWNSVKQDALTGGNYGYLYRLFRKSKLKPFERDISTEIYQAGSTPCNGQVGLNCYYPLERYGFHPTTGVNYQPFRVVVLSFELLNGPATVCGPKLSTTLVKDKCVNFNFNGLTGTGVLTTSKKQFLPFQQFGRDISDTTDAVRDPQTLEILDITPCSFGGVSVITPGTNTSNQVAVLYQDVNCTEVPMAIHAEQLTPAWRVYSAGANVFQTRAGCLVGAEHVNNSYECDIPVGAGICASYHSMSSLRSVNQRSIIAYTMSLGAENSVAYSNNSIAIPTNFTISVTTEILPVSMTKTSVDCTMYICGDSIECSNLLLQYGSFCTQLNRALTGIAVEQDKNTQEVFAQVKQIYKTPPIKDFGGFNFSQILPDPSKPSKRSFIEDLLFNKVTLADAGFIKQYGDCLGDIAARDLICAQKFNGLTVLPPLLTDEMIAQYTSALLAGTITSGWTFGAGAALQIPFAMQMAYRFNGIGVTQNVLYENQKLIANQFNSAIGKIQDSLSSTASALGKLQDVVNQNAQALNTLVKQLSSNFGCISSVLNDILSRLDKVEAEVQIDCLITGRLQSLQTYVTQQLIRAAEIRASANLAATKMSECVLGQSKRVDFCGKGYHLMSFPQSAPHGVVFLHVTYVPAQEKNFTTAPAICHEGKAHFPREGVFVSNGTHWFITQRNFYEPQIITTDNTFVSGSCDVVIGIVNNTVYDPLQPELDSFKEELDKYFKNHTSPDVDLGDISGINASVVNIQKEIDRLNEVAKNLNESPIDLQELGKYEQYIKGGGGSDIIKLLNEQVNKEMQSSNLYMSMSSWCYTHSLDGAGLFLFDHAAEEYEHAKKLIIFLNENNVPVQLTSISAPEHKFEGLTQIFQKAYEHEQHISESINNIVDHAIKSKDHATFNFLQWYVAEQHEEEVLFKDILDKIELIGNENHGLYLADQYVKGIAKSRKS

SEQ ID NO: 5497 - protein, 1373 aa, Artificial Sequence
  SARS-CoV-2/pangolin/Guangxi/P5L/2017__EPI_ISL_410540 spike protein (1-1205)(A966C_R989C) Ferritin construct
MFVFLFVLPLVSSQCVNLTTRTGIPPGYTNSSTRGVYYPDKVFRSSILHLTQDLFLPFFSNVTWFNTINYQGGFKKFDNPVLPFNDGVYFASTEKSNIIRGWIFGTTLDARTQSLLIVNNATNVVIKVCEFQFCTDPFLGVYYHNNNKTWVENEFRVYSSANNCTFEYISQPFLMDLEGKQGNFKNLREFVFKNVDGYFKIYSKHTPIDLVRDLPRGFAALEPLVDLPIGINITRFQTLLALHRSYLTPGKLESGWTTGAAAYYVGYLQQRTFLLSYNQNGTITDAVDCSLDPLSETKCTLKSLTVEKGIYQTSNFRVQPTISIVRFPNITNLCPFGEVFNASKFASVYAWNRKRISNCVADYSVLYNSTSFSTFKCYGVSPTKLNDLCFTNVYADSFVVKGDEVRQIAPGQTGVIADYNYKLPDDFTGCVIAWNSVKQDALTGGNYGYLYRLFRKSKLKPFERDISTEIYQAGSTPCNGQVGLNCYYPLERYGFHPTTGVNYQPFRVVVLSFELLNGPATVCGPKLSTTLVKDKCVNFNFNGLTGTGVLTTSKKQFLPFQQFGRDISDTTDAVRDPQTLEILDITPCSFGGVSVITPGTNTSNQVAVLYQDVNCTEVPMAIHAEQLTPAWRVYSAGANVFQTRAGCLVGAEHVNNSYECDIPVGAGICASYHSMSSFRSVNQRSIIAYTMSLGAENSVAYSNNSIAIPTNFTISVTTEILPVSMTKTSVDCTMYICGDSIECSNLLLQYGSFCTQLNRALTGIAVEQDKNTQEVFAQVKQIYKTPPIKDFGGFNFSQILPDPSKPSKRSFIEDLLFNKVTLADAGFIKQYGDCLGDIAARDLICAQKFNGLTVLPPLLTDEMIAQYTSALLAGTITSGWTFGAGAALQIPFAMQMAYRFNGIGVTQNVLYENQKLIANQFNSAIGKIQDSLSSTASALGKLQDVVNQNAQALNTLVKQLSSNFGCISSVLNDILSRLDKVEAEVQIDCLITGRLQSLQTYVTQQLIRAAEIRASANLAATKMSECVLGQSKRVDFCGKGYHLMSFPQSAPHGVVFLHVTYVPAQEKNFTTAPAICHEGKAHFPREGVFVSNGTHWFITQRNFYEPQIITTDNTFVSGSCDVVIGIVNNTVYDPLQPELDSFKEELDKYFKNHTSPDVDLGDISGINASVVNIQKEIDRLNEVAKNLNESLIDLQELGKYEQYIKGGGGSDIIKLLNEQVNKEMQSSNLYMSMSSWCYTHSLDGAGLFLFDHAAEEYEHAKKLIIFLNENNVPVQLTSISAPEHKFEGLTQIFQKAYEHEQHISESINNIVDHAIKSKDHATFNFLQWYVAEQHEEEVLFKDILDKIELIGNENHGLYLADQYVKGIAKSRKS

SEQ ID NO: 5498 - protein, 1373 aa, Artificial Sequence
  SARS-CoV-2/pangolin/Guangxi/P5E/2017__EPI_ISL_410541 spike protein (1-1205)(A966C_R989C) Ferritin construct
MFVFLFVLPLVSSQCVNLTTRTGIPPGYTNSSTRGVYYPDKVFRSSILHLTQDLFLPFFSNVTWFNTITYQGGSKKFDNPVLPFNDGVYFASTEKSNIIRGWIFGTTLDARTQSLLIVNNATNVVIKVCEFQFCTDPFLGVYYHNNNKTWVENEFRVYSSANNCTFEYISQPFLMDLEGKQGNFKNLREFVFKNVDGYFKIYSKHTPIDLVRDLPRGFAALEPLVDLPIGINITRFQTLLALHRSYLTPGKLESGWTTGAAAYYVGYLQQRTFLLSYNQNGTITDAVDCSLDPLSETKCTLKSLTVEKGIYQTSNFRVQPTISIVRFPNITNLCPFGEVFNASKFASVYAWNRKRISNCVADYSVLYNSTSFSTFKCYGVSPTKLNDLCFTNVYADSFVVKGDEVRQIAPGQTGVIADYNYKLPDDFTGCVIAWNSVKQDALTGDNYGYLYRLFRKSKLKPFERDISTEIYQAGSTPCNGQVGLNCYYPLERYGFHPTTGVNYQPFRVVVLSFELLNGPATVCGPKLSTTLVKDKCVNFNFNGLTGTGVLTTSKKQFLPFQQFGRDISDTTDAVRDPQTLEILDITPCSFGGVSVITPGTNTSNQVAVLYQDVNCTEVPMAIHAEQLTPAWRVYSAGANVFQTRAGCLVGAEHVNNSYECDIPVGAGICASYHSMSSFRSVNQRSIIAYTMSLGAENSVAYSNNSIAIPTNFTISVTTEILPVSMTKTSVDCTMYICGDSIECSNLLLQYGSFCTQLNRALTGIAVEQDKNTQEVFAQVKQIYKTPPIKDFGGFNFSQILPDPSKPSKRSFIEDLLFNKVTLADAGFIKQYGDCLGDIAARDLICAQKFNGLTVLPPLLTDEMIAQYTSALLAGTITSGWTFGAGAALQIPFAMQMAYRFNGIGVTQNVLYENQKLIANQFNSAIGKIQDSLSSTASALGKLQDVVNQNAQALNTLVKQLSSNFGCISSVLNDILSRLDKVEAEVQIDCLITGRLQSLQTYVTQQLIRAAEIRASANLAATKMSECVLGQSKRVDFCGKGYHLMSFPQSAPHGVVFLHVTYVPAQEKNFTTAPAICHEGKAHFPREGVFVSNGTHWFITQRNFYEPQIITTDNTFVSGSCDVVIGIVNNTVYDPLQPELDSFKEELDKYFKNHTSPDVDLGDISGINASVVNIQKEIDRLNEVAKNLNESLIDLQELGKYEQYIKGGGGSDIIKLLNEQVNKEMQSSNLYMSMSSWCYTHSLDGAGLFLFDHAAEEYEHAKKLIIFLNENNVPVQLTSISAPEHKFEGLTQIFQKAYEHEQHISESINNIVDHAIKSKDHATFNFLQWYVAEQHEEEVLFKDILDKIELIGNENHGLYLADQYVKGIAKSRKS

SEQ ID NO: 5499 - protein, 1371 aa, Artificial Sequence
  SARS-CoV-2/pangolin/Guangxi/P1E/2017__EPI_ISL_410539 spike protein (1-1203)(A964C_R987C) Ferritin construct
MFVFLFVLPLVSSQCVNLTTRTGIQPGYTNSSTRGVYYPDKVFRSSILHLTQDLFLPFFSNVTWFNTINYQGGFKKFDNPVLPFNDGVYFASTEKSNIIRGWIFGTTLDARTQSLLIVNNATNVVIKVCEFQFCTDPFLGVYYHNNNKTWVENEFRVYSSANNCTFEYISQPFLMDLEGKQGNFKNLREFVFKNVDGYFKIYSKHTPIDLVRDLPRGFAALEPLVDLPIGINITRFQTLLALHRSYLTPGKLESGWTTGAAAYYVGYLQQRTFLLSYNQNGTITDAVDCSLDPLSETKCTLKSLTVEKGIYQTSNFRVQPTISIVRFPNITNLCPFGEVFNASKFASVYAWNRKRISNCVADYSVLYNSTSFSTFKCYGVSPTKLNDLCFTNVYADSFVVKGDEVRQIAPGQTGVIADYNYKLPDDFTGCVIAWNSVKQDALTGGNYLYRLFRKSKLKPFERDISTEIYQAGSTPCNGQVGLNCYYPLERYGFHPTTGVNYQPFRVVVLSFELLNGPATVCGPKLSTTLVKDKCVNFNFNGLTGTGVLTTSKKQFLPFQQFGRDISDTTDAVRDPQTLEILDITPCSFGGVSVITPGTNTSNQVAVLYQDVNCTEVPMAIHAEQLTPAWRVYSAGANVFQTRAGCLVGAEHVNNSYECDIPVGAGICASYHSMSSLRSVNQRSIIAYTMSLGAENSVAYSNNSIAIPTNFTISVTTEILPVSMTKTSVDCTMYICGDSIECSNLLLQYGSFCTQLNRALTGIAVEQDKNTQEVFAQVKQIYKTPPIKDFGGFNFSQILPDPSKPSKRSFIEDLLFNKVTLADAGFIKQYGDCLGDIAARDLICAQKFNGLTVLPPLLTDEMIAQYTSALLAGTITSGWTFGAGAALQIPFAMQMAYRFNGIGVTQNVLYENQKLIANQFNSAIGKIQDSLSSTASALGKLQDVVNQNAQALNTLVKQLSSNFGCISSVLNDILSRLDKVEAEVQIDCLITGRLQSLQTYVTQQLIRAAEIRASANLAATKMSECVLGQSKRVDFCGKGYHLMSFPQSAPHGVVFLHVTYVPAQEKNFTTAPAICHEGKAHFPREGVFVSNGTHWFITQRNFYEPQIITTDNTFVSGSCDVVIGIVNNTVYDPLQPELDSFKEELDKYFKNHTSPDVDLGDISGINASVVNIQKEIDRLNEVAKNLNESLIDLQELGKYEQYIKGGGGSDIIKLLNEQVNKEMQSSNLYMSMSSWCYTHSLDGAGLFLFDHAAEEYEHAKKLIIFLNENNVPVQLTSISAPEHKFEGLTQIFQKAYEHEQHISESINNIVDHAIKSKDHATFNFLQWYVAEQHEEEVLFKDILDKIELIGNENHGLYLADQYVKGIAKSRKS

SEQ ID NO: 5500 - protein, 1379 aa, Artificial Sequence
  SARS-CoV-2/Wuhan/WIV05/2019__EPI_ISL_402128 spike protein (1-1211)(A890C_V1040C) Ferritin construct
MFVFLVLLPLVSSQCVNLTTRTQLPPAYTNSFTRGVYYPDKVFRSSVLHSTQDLFLPFFSNVTWFHAIHVSGTNGTKRFDNPVLPFNDGVYFASTEKSNIIRGWIFGTTLDSKTQSLLIVNNATNVVIKVCEFQFCNDPFLGVYYHKNNKSWMESEFRVYSSANNCTFEYVSQPFLMDLEGKQGNFKNLREFVFKNIDGYFKIYSKHTPINLVRDLPQGFSALEPLVDLPIGINITRFQTLLALHRSYLTPGDSSSGWTAGAAAYYVGYLQPRTFLLKYNENGTITDAVDCALDPLSETKCTLKSFTVEKGIYQTSNFRVQPTESIVRFPNITNLCPFGEVFNATRFASVYAWNRKRISNCVADYSVLYNSASFSTFKCYGVSPTKLNDLCFTNVYADSFVIRGDEVRQIAPGQTGKIADYNYKLPDDFTGCVIAWNSNNLDSKVGGNYNYLYRLFRKSNLKPFERDISTEIYQAGSTPCNGVEGFNCYFPLQSYGFQPTNGVGYQPYRVVVLSFELLHAPATVCGPKKSTNLVKNKCVNFNFNGLTGTGVLTESNKKFLPFQQFGRDIADTTDAVRDPQTLEILDITPCSFGGVSVITPGTNTSNQVAVLYQDVNCTEVPVAIHADQLTPTWRVYSTGSNVFQTRAGCLIGAEHVNNSYECDIPIGAGICASYQTQTNSPRRARSVASQSIIAYTMSLGAENSVAYSNNSIAIPTNFTISVTTEILPVSMTKTSVDCTMYICGDSTECSNLLLQYGSFCTQLNRALTGIAVEQDKNTQEVFAQVKQIYKTPPIKDFGGFNFSQILPDPSKPSKRSFIEDLLFNKVTLADAGFIKQYGDCLGDIAARDLICAQKFNGLTVLPPLLTDEMIAQYTSALLAGTITSGWTFGCGAALQIPFAMQMAYRFNGIGVTQNVLYENQKLIANQFNSAIGKIQDSLSSTASALGKLQDVVNQNAQALNTLVKQLSSNFGAISSVLNDILSRLDKVEAEVQIDRLITGRLQSLQTYVTQQLIRAAEIRASANLAATKMSECVLGQSKRCDFCGKGYHLMSFPQSAPHGVVFLHVTYVPAQEKNFTTAPAICHDGKAHFPREGVFVSNGTHWFVTQRNFYEPQIITTDNTFVSGNCDVVIGIVNNTVYDPLQPELDSFKEELDKYFKNHTSPDVDLGDISGINASVVNIQKEIDRLNEVAKNLNESLIDLQELGKYEQYIKGGGGSDIIKLLNEQVNKEMQSSNLYMSMSSWCYTHSLDGAGLFLFDHAAEEYEHAKKLIIFLNENNVPVQLTSISAPEHKFEGLTQIFQKAYEHEQHISESINNIVDHAIKSKDHATFNFLQWYVAEQHEEEVLFKDILDKIELIGNENHGLYLADQYVKGIAKSRKS

SEQ ID NO: 5501 - protein, 1375 aa, Artificial Sequence; identical to SEQ ID NO: 5233
  SARS-CoV-2/bat/Yunnan/RaTG13/2013__EPI_ISL_402131 spike protein (1-1207)(A886C_V1036C) Ferritin construct

SEQ ID NO: 5502 - protein, 1379 aa, Artificial Sequence; identical to SEQ ID NO: 5234
  SARS-CoV-2/Wuhan/HBCDC-HB-01/2019__EPI_ISL_402132 spike protein (1-1211)(A890C_V1040C) Ferritin construct

SEQ ID NO: 5503 - protein, 1379 aa, Artificial Sequence; identical to SEQ ID NO: 5235
  SARS-CoV-2/Guangdong/20SF028/2020__EPI_ISL_403936 spike protein (1-1211)(A890C_V1040C) Ferritin construct

SEQ ID NO: 5504 - protein, 1379 aa, Artificial Sequence; identical to SEQ ID NO: 5236
  SARS-CoV-2/Shenzhen/SZTH-001/2020__EPI_ISL_406592 spike protein (1-1211)(A890C_V1040C) Ferritin construct

SEQ ID NO: 5505 - protein, 1379 aa, Artificial Sequence; identical to SEQ ID NO: 5237
  SARS-CoV-2/Shenzhen/SZTH-004/2020__EPI_ISL_406595 spike protein (1-1211)(A890C_V1040C) Ferritin construct

SEQ ID NO: 5506 - protein, 1379 aa, Artificial Sequence; identical to SEQ ID NO: 5238
  SARS-CoV-2/France/IDF0372/2020__EPI_ISL_406596 spike protein (1-1211)(A890C_V1040C) Ferritin construct

SEQ ID NO: 5507 - protein, 1379 aa, Artificial Sequence; identical to SEQ ID NO: 5239
  SARS-CoV-2/Australia/VIC01/2020__EPI_ISL_406844 spike protein (1-1211)(A890C_V1040C) Ferritin construct

SEQ ID NO: 5508 - protein, 1379 aa, Artificial Sequence; identical to SEQ ID NO: 5240
  SARS-CoV-2/Germany/BavPat1/2020__EPI_ISL_406862 spike protein (1-1211)(A890C_V1040C) Ferritin construct

SEQ ID NO: 5509 - protein, 1379 aa, Artificial Sequence; identical to SEQ ID NO: 5241
  SARS-CoV-2/Wuhan/HBCDC-HB-02/2020__EPI_ISL_412978 spike protein (1-1211)(A890C_V1040C) Ferritin construct

SEQ ID NO: 5510 - protein, 1379 aa, Artificial Sequence; identical to SEQ ID NO: 5242
  SARS-CoV-2/Australia/QLD02/2020__EPI_ISL_407896 spike protein (1-1211)(A890C_V1040C) Ferritin construct

SEQ ID NO: 5511 - protein, 1379 aa, Artificial Sequence; identical to SEQ ID NO: 5243
  SARS-CoV-2/India/1-31/2020__EPI_ISL_413523 spike protein (1-1211)(A890C_V1040C) Ferritin construct

SEQ ID NO: 5512 - protein, 1379 aa, Artificial Sequence; identical to SEQ ID NO: 5244
  SARS-CoV-2/Guangdong/GD2020087-P0008/2020__EPI_ISL_413863 spike protein (1-1211)(A890C_V1040C) Ferritin construct

SEQ ID NO: 5513 - protein, 1379 aa, Artificial Sequence; identical to SEQ ID NO: 5245
  SARS-CoV-2/Sweden/01/2020__EPI_ISL_411951 spike protein (1-1211)(A890C_V1040C) Ferritin construct

SEQ ID NO: 5514 - protein, 1379 aa, Artificial Sequence; identical to SEQ ID NO: 5246
  SARS-CoV-2/Tianmen/HBCDC-HB-07/2020__EPI_ISL_412983 spike protein (1-1211)(A890C_V1040C) Ferritin construct

SEQ ID NO: 5515 - protein, 1379 aa, Artificial Sequence; identical to SEQ ID NO: 5247
  SARS-CoV-2/Hong Kong/case42_VM20002493/2020__EPI_ISL_414527 spike protein (1-1211)(A890C_V1040C) Ferritin construct

SEQ ID NO: 5516 - protein, 1379 aa, Artificial Sequence; identical to SEQ ID NO: 5248
  SARS-CoV-2/USA/CruiseA-23/2020__EPI_ISL_414482 spike protein (1-1211)(A890C_V1040C) Ferritin construct

SEQ ID NO: 5517 - protein, 1379 aa, Artificial Sequence; identical to SEQ ID NO: 5249
  SARS-CoV-2/Hong Kong/case85_VM20002868/2020__EPI_ISL_414519 spike protein (1-1211)(A890C_V1040C) Ferritin construct

SEQ ID NO: 5518 - protein, 1379 aa, Artificial Sequence; identical to SEQ ID NO: 5240
  SARS-CoV-2/England/200990660/2020__EPI_ISL_414523 spike protein (1-1211)(A890C_V1040C) Ferritin construct

SEQ ID NO: 5519 - protein, 1379 aa, Artificial Sequence; identical to SEQ ID NO: 5251
  SARS-CoV-2/Australia/NSW09/2020__EPI_ISL_413595 spike protein (1-1211)(A890C_V1040C) Ferritin construct

SEQ ID NO: 5520 - protein, 1379 aa, Artificial Sequence; identical to SEQ ID NO: 5232
  SARS-CoV-2/Australia/NSW10/2020__EPI_ISL_413596 spike protein (1-1211)(A890C_V1040C) Ferritin construct

SEQ ID NO: 5521 - protein, 1379 aa, Artificial Sequence; identical to SEQ ID NO: 5253
  SARS-CoV-2/Switzerland/1000477797/2020__EPI_ISL_413023 spike protein (1-1211)(A890C_V1040C) Ferritin construct

SEQ ID NO: 5522 - protein, 1379 aa, Artificial Sequence; identical to SEQ ID NO: 5254
  SARS-CoV-2/Belgium/BA-02291/2020__EPI_ISL_415159 spike protein (1-1211)(A890C_V1040C) Ferritin construct

SEQ ID NO: 5523 - protein, 1379 aa, Artificial Sequence; identical to SEQ ID NO: 5255
  SARS-CoV-2/USA/WA8-UW5/2020__EPI_ISL_413486 spike protein (1-1211)(A890C_V1040C) Ferritin construct

SEQ ID NO: 5524 - protein, 1379 aa, Artificial Sequence; identical to SEQ ID NO: 5256
  SARS-CoV-2/England/20102000506/2020__EPI_ISL_415147 spike protein (1-1211)(A890C_V1040C) Ferritin construct

SEQ ID NO: 5525 - protein, 1379 aa, Artificial Sequence; identical to SEQ ID NO: 5257
  SARS-CoV-2/Belgium/VAG-03013/2020__EPI_ISL_415155 spike protein (1-1211)(A890C_V1040C) Ferritin construct

SEQ ID NO: 5526 - protein, 1379 aa, Artificial Sequence; identical to SEQ ID NO: 5258
  SARS-CoV-2/Belgium/BC-03016/2020__EPI_ISL_415157 spike protein (1-1211)(A890C_V1040C) Ferritin construct

SEQ ID NO: 5527 - protein, 1379 aa, Artificial Sequence; identical to SEQ ID NO: 5259
  SARS-CoV-2/Germany/BavPat3/2020__EPI_ISL_414521 spike protein (1-1211)(A890C_V1040C) Ferritin construct

SEQ ID NO: 5528 - protein, 1379 aa, Artificial Sequence; identical to SEQ ID NO: 5260
  SARS-CoV-2/France/HF1805/2020__EPI_ISL_414628 spike protein (1-1211)(A890C_V1040C) Ferritin construct

SEQ ID NO: 5529 - protein, 1379 aa, Artificial Sequence; identical to SEQ ID NO: 5261
  SARS-CoV-2/Netherlands/ZuidHolland_9/2020__EPI_ISL_414445 spike protein (1-1211)(A890C_V1040C) Ferritin construct

SEQ ID NO: 5530 - protein, 1379 aa, Artificial Sequence; identical to SEQ ID NO: 5262
  SARS-CoV-2/Finland/FIN03032020A/2020__EPI_ISL_413602 spike protein (1-1211)(A890C_V1040C) Ferritin construct

SEQ ID NO: 5531 - protein, 1379 aa, Artificial Sequence; identical to SEQ ID NO: 5263
  SARS-CoV-2/France/GE1977/2020__EPI_ISL_414632 spike protein (1-1211)(A890C_V1040C) Ferritin construct

SEQ ID NO: 5532 - protein, 1379 aa, Artificial Sequence; identical to SEQ ID NO: 5264
  SARS-CoV-2/Finland/FIN-313/2020__EPI_ISL_414641 spike protein (1-1211)(A890C_V1040C) Ferritin construct

SEQ ID NO: 5533 - protein, 1379 aa, Artificial Sequence; identical to SEQ ID NO: 5265
  SARS-CoV-2/Netherlands/ZuidHolland_2/2020__EPI_ISL_414556 spike protein (1-1211)(A890C_V1040C) Ferritin construct

SEQ ID NO: 5534 - protein, 1379 aa, Artificial Sequence; identical to SEQ ID NO: 5266
  SARS-CoV-2/USA/WA-UW31/2020__EPI_ISL_414618 spike protein (1-1211)(A890C_V1040C) Ferritin construct

SEQ ID NO: 5535 - protein, 1379 aa, Artificial Sequence; identical to SEQ ID NO: 5267
  SARS-CoV-2/South Korea/SNU01/2020__EPI_ISL_411929 spike protein (1-1211)(A890C_V1040C) Ferritin construct

SEQ ID NO: 5536 - protein, 1379 aa, Artificial Sequence; identical to SEQ ID NO: 5268
  SARS-CoV-2/China/WF0004/2020__EPI_ISL_413694 spike protein (1-1211)(A890C_V1040C) Ferritin construct

SEQ ID NO: 5537 - protein, 1379 aa, Artificial Sequence; identical to SEQ ID NO: 5269
  SARS-CoV-2/China/WF0028/2020__EPI_ISL_413791 spike protein (1-1211)(A890C_V1040C) Ferritin construct

SEQ ID NO: 5538 - protein, 1379 aa, Artificial Sequence; identical to SEQ ID NO: 5270
  SARS-CoV-2/2019-nCoV/USA-CruiseA-18/2020__MT159716.1 spike protein (1-1211)(A890C_V1040C) Ferritin construct

SEQ ID NO: 5539 - protein, 1379 aa, Artificial Sequence; identical to SEQ ID NO: 5271
  SARS-CoV-2/SARS-CoV-2/Yunnan-01/human/2020/CHN__MT049951.1 spike protein (1-1211)(A890C_V1040C) Ferritin construct

SEQ ID NO: 5540 - protein, 1379 aa, Artificial Sequence; identical to SEQ ID NO: 5272
  SARS-CoV-2/USA/WA-UW292/2020__EPI_ISL_418077 spike protein (1-1211)(A890C_V1040C) Ferritin construct

SEQ ID NO: 5541 - protein, 1379 aa, Artificial Sequence; identical to SEQ ID NO: 5273
  SARS-CoV-2/Iceland/192/2020__EPI_ISL_417819 spike protein (1-1211)(A890C_V1040C) Ferritin construct

SEQ ID NO: 5542 - protein, 1379 aa, Artificial Sequence; identical to SEQ ID NO: 5274
  SARS-CoV-2/Belgium/ULG-6939/2020__EPI_ISL_417020 spike protein (1-1211)(A890C_V1040C) Ferritin construct

SEQ ID NO: 5543 - protein, 1379 aa, Artificial Sequence; identical to SEQ ID NO: 5275
  SARS-CoV-2/France/HF2496/2020__EPI_ISL_418231 spike protein (1-1211)(A890C_V1040C) Ferritin construct

SEQ ID NO: 5544 - protein, 1379 aa, Artificial Sequence; identical to SEQ ID NO: 5276
  SARS-CoV-2/USA/WA-UW291/2020__EPI_ISL_418076 spike protein (1-1211)(A890C_V1040C) Ferritin construct

SEQ ID NO: 5545 - protein, 1379 aa, Artificial Sequence; identical to SEQ ID NO: 5240
  SARS-CoV-2/Portugal/PT0034/2020__EPI_ISL_418019 spike protein (1-1211)(A890C_V1040C) Ferritin construct

SEQ ID NO: 5546 - protein, 1379 aa, Artificial Sequence; identical to SEQ ID NO: 5278
  SARS-CoV-2/Iceland/202/2020__EPI_ISL_417750 spike protein (1-1211)(A890C_V1040C) Ferritin construct

SEQ ID NO: 5547 - protein, 1379 aa, Artificial Sequence; identical to SEQ ID NO: 5279
  SARS-CoV-2/USA/WA-UW261/2020__EPI_ISL_418046 spike protein (1-1211)(A890C_V1040C) Ferritin construct

SEQ ID NO: 5548 - protein, 1379 aa, Artificial Sequence; identical to SEQ ID NO: 5280
  SARS-CoV-2/Portugal/PT0035/2020__EPI_ISL_418020 spike protein (1-1211)(A890C_V1040C) Ferritin construct

SEQ ID NO: 5549 - protein, 1379 aa, Artificial Sequence; identical to SEQ ID NO: 5281
  SARS-CoV-2/USA/NY-NYUMC7/2020__EPI_ISL_418192 spike protein (1-1211)(A890C_V1040C) Ferritin construct

SEQ ID NO: 5550 - protein, 1379 aa, Artificial Sequence; identical to SEQ ID NO: 5282
  SARS-CoV-2/Iceland/189/2020__EPI_ISL_417709 spike protein (1-1211)(A890C_V1040C) Ferritin construct

SEQ ID NO: 5551 - protein, 1379 aa, Artificial Sequence; identical to SEQ ID NO: 5283
  SARS-CoV-2/Australia/NSW56/2020__EPI_ISL_417408 spike protein (1-1211)(A890C_V1040C) Ferritin construct

SEQ ID NO: 5552 - protein, 1379 aa, Artificial Sequence; identical to SEQ ID NO: 5284
  SARS-CoV-2/Iceland/280/2020__EPI_ISL_417608 spike protein (1-1211)(A890C_V1040C) Ferritin construct

SEQ ID NO: 5553 - protein, 1379 aa, Artificial Sequence; identical to SEQ ID NO: 5240
  SARS-CoV-2/Iceland/247/2020__EPI_ISL_417575 spike protein (1-1211)(A890C_V1040C) Ferritin construct

SEQ ID NO: 5554 - protein, 1379 aa, Artificial Sequence; identical to SEQ ID NO: 5286
  SARS-CoV-2/Iceland/238/2020__EPI_ISL_417566 spike protein (1-1211)(A890C_V1040C) Ferritin construct

SEQ ID NO: 5555 - protein, 1379 aa, Artificial Sequence; identical to SEQ ID NO: 5287
  SARS-CoV-2/Greece/16/2020__EPI_ISL_418265 spike protein (1-1211)(A890C_V1040C) Ferritin construct

SEQ ID NO: 5556 - protein, 1379 aa, Artificial Sequence; identical to SEQ ID NO: 5288
  SARS-CoV-2/Iceland/319/2020__EPI_ISL_417648 spike protein (1-1211)(A890C_V1040C) Ferritin construct

SEQ ID NO: 5557 - protein, 1379 aa, Artificial Sequence; identical to SEQ ID NO: 5289
  SARS-CoV-2/Congo/94/2020__EPI_ISL_417947 spike protein (1-1211)(A890C_V1040C) Ferritin construct

SEQ ID NO: 5558 - protein, 1379 aa, Artificial Sequence; identical to SEQ ID NO: 5290
  SARS-CoV-2/Congo/158/2020__EPI_ISL_417950 spike protein (1-1211)(A890C_V1040C) Ferritin construct

SEQ ID NO: 5559 - protein, 1379 aa, Artificial Sequence; identical to SEQ ID NO: 5291
  SARS-CoV-2/USA/UT-00034/2020__EPI_ISL_417977 spike protein (1-1211)(A890C_V1040C) Ferritin construct

SEQ ID NO: 5560 - protein, 1379 aa, Artificial Sequence; identical to SEQ ID NO: 5292
  SARS-CoV-2/USA/UT-00033/2020__EPI_ISL_417976 spike protein (1-1211)(A890C_V1040C) Ferritin construct

SEQ ID NO: 5561 - protein, 1379 aa, Artificial Sequence; identical to SEQ ID NO: 5293
  SARS-CoV-2/USA/WI-13/2020__EPI_ISL_417516 spike protein (1-1211)(A890C_V1040C) Ferritin construct

SEQ ID NO: 5562 - protein, 1378 aa, Artificial Sequence; identical to SEQ ID NO: 5294
  SARS-CoV-2/India/1-27/2020__EPI_ISL_413522 spike protein (1-1210)(A889C_V1039C) Ferritin construct

SEQ ID NO: 5563 - protein, 1373 aa, Artificial Sequence; identical to SEQ ID NO: 5295
  SARS-CoV-2/pangolin/Guangxi/P4L/2017__EPI_ISL_410538 spike protein (1-1205)(A884C_V1034C) Ferritin construct

SEQ ID NO: 5564 - protein, 1373 aa, Artificial Sequence; identical to SEQ ID NO: 5296
  SARS-CoV-2/pangolin/Guangxi/P5L/2017__EPI_ISL_410540 spike protein (1-1205)(A884C_V1034C) Ferritin construct

SEQ ID NO: 5565 - protein, 1373 aa, Artificial Sequence; identical to SEQ ID NO: 5297
  SARS-CoV-2/pangolin/Guangxi/P5E/2017__EPI_ISL_410541 spike protein (1-1205)(A884C_V1034C) Ferritin construct

SEQ ID NO: 5566 - protein, 1371 aa, Artificial Sequence; identical to SEQ ID NO: 5298
  SARS-CoV-2/pangolin/Guangxi/P1E/2017__EPI_ISL_410539 spike protein (1-1203)(A882C_V1032C) Ferritin construct

SEQ ID NO: 5567 - protein, 1379 aa, Artificial Sequence
  SARS-CoV-2/Wuhan/WIV05/2019__EPI_ISL_402128 spike protein (1-1211)(T874C_S1055C) Ferritin construct
MFVFLVLLPLVSSQCVNLTTRTQLPPAYTNSFTRGVYYPDKVFRSSVLHSTQDLFLPFFSNVTWFHAIHVSGTNGTKRFDNPVLPFNDGVYFASTEKSNIIRGWIFGTTLDSKTQSLLIVNNATNVVIKVCEFQFCNDPFLGVYYHKNNKSWMESEFRVYSSANNCTFEYVSQPFLMDLEGKQGNFKNLREFVFKNIDGYFKIYSKHTPINLVRDLPQGFSALEPLVDLPIGINITRFQTLLALHRSYLTPGDSSSGWTAGAAAYYVGYLQPRTFLLKYNENGTITDAVDCALDPLSETKCTLKSFTVEKGIYQTSNFRVQPTESIVRFPNITNLCPFGEVFNATRFASVYAWNRKRISNCVADYSVLYNSASFSTFKCYGVSPTKLNDLCFTNVYADSFVIRGDEVRQIAPGQTGKIADYNYKLPDDFTGCVIAWNSNNLDSKVGGNYNYLYRLFRKSNLKPFERDISTEIYQAGSTPCNGVEGFNCYFPLQSYGFQPTNGVGYQPYRVVVLSFELLHAPATVCGPKKSTNLVKNKCVNFNFNGLTGTGVLTESNKKFLPFQQFGRDIADTTDAVRDPQTLEILDITPCSFGGVSVITPGTNTSNQVAVLYQDVNCTEVPVAIHADQLTPTWRVYSTGSNVFQTRAGCLIGAEHVNNSYECDIPIGAGICASYQTQTNSPRRARSVASQSIIAYTMSLGAENSVAYSNNSIAIPTNFTISVTTEILPVSMTKTSVDCTMYICGDSTECSNLLLQYGSFCTQLNRALTGIAVEQDKNTQEVFAQVKQIYKTPPIKDFGGFNFSQILPDPSKPSKRSFIEDLLFNKVTLADAGFIKQYGDCLGDIAARDLICAQKFNGLTVLPPLLTDEMIAQYCSALLAGTITSGWTFGAGAALQIPFAMQMAYRFNGIGVTQNVLYENQKLIANQFNSAIGKIQDSLSSTASALGKLQDVVNQNAQALNTLVKQLSSNFGAISSVLNDILSRLDKVEAEVQIDRLITGRLQSLQTYVTQQLIRAAEIRASANLAATKMSECVLGQSKRVDFCGKGYHLMSFPQCAPHGVVFLHVTYVPAQEKNFTTAPAICHDGKAHFPREGVFVSNGTHWFVTQRNFYEPQIITTDNTFVSGNCDVVIGIVNNTVYDPLQPELDSFKEELDKYFKNHTSPDVDLGDISGINASVVNIQKEIDRLNEVAKNLNESLIDLQELGKYEQYIKGGGGSDIIKLLNEQVNKEMQSSNLYMSMSSWCYTHSLDGAGLFLFDHAAEEYEHAKKLIIFLNENNVPVQLTSISAPEHKFEGLTQIFQKAYEHEQHISESINNIVDHAIKSKDHATFNFLQWYVAEQHEEEVLFKDILDKIELIGNENHGLYLADQYVKGIAKSRKS

SEQ ID NO: 5568 - protein, 1375 aa, Artificial Sequence
  SARS-CoV-2/bat/Yunnan/RaTG13/2013__EPI_ISL_402131 spike protein (1-1207)(T870C_S1051C) Ferritin construct
MFVFLVLLPLVSSQCVNLTTRTQLPPAYTNSSTRGVYYPDKVFRSSVLHLTQDLFLPFFSNVTWFHAIHVSGTNGIKRFDNPVLPFNDGVYFASTEKSNIIRGWIFGTTLDSKTQSLLIVNNATNVVIKVCEFQFCNDPFLGVYYHKNNKSWMESEFRVYSSANNCTFEYVSQPFLMDLEGKQGNFKNLREFVFKNIDGYFKIYSKHTPINLVRDLPPGFSALEPLVDLPIGINITRFQTLLALHRSYLTPGDSSSGWTAGAAAYYVGYLQPRTFLLKYNENGTITDAVDCALDPLSETKCTLKSFTVEKGIYQTSNFRVQPTDSIVRFPNITNLCPFGEVFNATTFASVYAWNRKRISNCVADYSVLYNSTSFSTFKCYGVSPTKLNDLCFTNVYADSFVITGDEVRQIAPGQTGKIADYNYKLPDDFTGCVIAWNSKHIDAKEGGNFNYLYRLFRKANLKPFERDISTEIYQAGSKPCNGQTGLNCYYPLYRYGFYPTDGVGHQPYRVVVLSFELLNAPATVCGPKKSTNLVKNKCVNFNFNGLTGTGVLTESNKKFLPFQQFGRDIADTTDAVRDPQTLEILDITPCSFGGVSVITPGTNASNQVAVLYQDVNCTEVPVAIHADQLTPTWRVYSTGSNVFQTRAGCLIGAEHVNNSYECDIPIGAGICASYQTQTNSRSVASQSIIAYTMSLGAENSVAYSNNSIAIPTNFTISVTTEILPVSMTKTSVDCTMYICGDSTECSNLLLQYGSFCTQLNRALTGIAVEQDKNTQEVFAQVKQIYKTPPIKDFGGFNFSQILPDPSKPSKRSFIEDLLFNKVTLADAGFIKQYGDCLGDIAARDLICAQKFNGLTVLPPLLTDEMIAQYCSALLAGTITSGWTFGAGAALQIPFAMQMAYRFNGIGVTQNVLYENQKLIANQFNSAIGKIQDSLSSTASALGKLQDVVNQNAQALNTLVKQLSSNFGAISSVLNDILSRLDKVEAEVQIDRLITGRLQSLQTYVTQQLIRAAEIRASANLAATKMSECVLGQSKRVDFCGKGYHLMSFPQCAPHGVVFLHVTYVPAQEKNFTTAPAICHDGKAHFPREGVFVSNGTHWFVTQRNFYEPQIITTDNTFVSGSCDVVIGIVNNTVYDPLQPELDSFKEELDKYFKNHTSPDVDLGDISGINASVVNIQKEIDRLNEVAKNLNESLIDLQELGKYEQYIKGGGGSDIIKLLNEQVNKEMQSSNLYMSMSSWCYTHSLDGAGLFLFDHAAEEYEHAKKLIIFLNENNVPVQLTSISAPEHKFEGLTQIFQKAYEHEQHISESINNIVDHAIKSKDHATFNFLQWYVAEQHEEEVLFKDILDKIELIGNENHGLYLADQYVKGIAKSRKS

SEQ ID NO: 5569 - protein, 1379 aa, Artificial Sequence
  SARS-CoV-2/Wuhan/HBCDC-HB-01/2019__EPI_ISL_402132 spike protein (1-1211)(T874C_S1055C) Ferritin construct
MFVFLVLLPLVSSQCVNLTTRTQLPPAYTNSITRGVYYPDKVFRSSVLHSTQDLFLPFFSNVTWFHAIHVSGTNGTKRFDNPVLPFNDGVYFASTEKSNIIRGWIFGTTLDSKTQSLLIVNNATNVVIKVCEFQFCNDPFLGVYYHKNNKSWMESEFRVYSSANNCTFEYVSQPFLMDLEGKQGNFKNLREFVFKNIDGYFKIYSKHTPINLVRDLPQGFSALEPLVDLPIGINITRFQTLLALHRSYLTPGDSSSGWTAGAAAYYVGYLQPRTFLLKYNENGTITDAVDCALDPLSETKCTLKSFTVEKGIYQTSNFRVQPTESIVRFPNITNLCPFGEVFNATRFASVYAWNRKRISNCVADYSVLYNSASFSTFKCYGVSPTKLNDLCFTNVYADSFVIRGDEVRQIAPGQTGKIADYNYKLPDDFTGCVIAWNSNNLDSKVGGNYNYLYRLFRKSNLKPFERDISTEIYQAGSTPCNGVEGFNCYFPLQSYGFQPTNGVGYQPYRVVVLSFELLHAPATVCGPKKSTNLVKNKCVNFNFNGLTGTGVLTESNKKFLPFQQFGRDIADTTDAVRDPQTLEILDITPCSFGGVSVITPGTNTSNQVAVLYQDVNCTEVPVAIHADQLTPTWRVYSTGSNVFQTRAGCLIGAEHVNNSYECDIPIGAGICASYQTQTNSPRRARSVASQSIIAYTMSLGAENSVAYSNNSIAIPTNFTISVTTEILPVSMTKTSVDCTMYICGDSTECSNLLLQYGSFCTQLNRALTGIAVEQDKNTQEVFAQVKQIYKTPPIKDFGGFNFSQILPDPSKPSKRSFIEDLLFNKVTLADAGFIKQYGDCLGDIAARDLICAQKFNGLTVLPPLLTDEMIAQYCSALLAGTITSGWTFGAGAALQIPFAMQMAYRFNGIGVTQNVLYENQKLIANQFNSAIGKIQDSLSSTASALGKLQDVVNQNAQALNTLVKQLSSNFGAISSVLNDILSRLDKVEAEVQIDRLITGRLQSLQTYVTQQLIRAAEIRASANLAATKMSECVLGQSKRVDFCGKGYHLMSFPQCAPHGVVFLHVTYVPAQEKNFTTAPAICHDGKAHFPREGVFVSNGTHWFVTQRNFYEPQIITTDNTFVSGNCDVVIGIVNNTVYDPLQPELDSFKEELDKYFKNHTSPDVDLGDISGINASVVNIQKEIDRLNEVAKNLNESLIDLQELGKYEQYIKGGGGSDIIKLLNEQVNKEMQSSNLYMSMSSWCYTHSLDGAGLFLFDHAAEEYEHAKKLIIFLNENNVPVQLTSISAPEHKFEGLTQIFQKAYEHEQHISESINNIVDHAIKSKDHATFNFLQWYVAEQHEEEVLFKDILDKIELIGNENHGLYLADQYVKGIAKSRKS

SEQ ID NO: 5570 - protein, 1379 aa, Artificial Sequence
  SARS-CoV-2/Guangdong/20SF028/2020__EPI_ISL_403936 spike protein (1-1211)(T874C_S1055C) Ferritin construct
MFVFLVLLPLVSSQCVNLTTRTQLPPAYTNSFTRGVYYPDKVFRSSVLYSTQDLFLPFFSNVTWFHAIHVSGTNGTKRFDNPVLPFNDGVYFASTEKSNIIRGWIFGTTLDSKTQSLLIVNNATNVVIKVCEFQFCNDPFLGVYYHKNNKSWMESEFRVYSSANNCTFEYVSQPFLMDLEGKQGNFKNLREFVFKNIDGYFKIYSKHTPINLVRDLPQGFSALEPLVDLPIGINITRFQTLLALHRSYLTPGDSSSGWTAGAAAYYVGYLQPRTFLLKYNENGTITDAVDCALDPLSETKCTLKSFTVEKGIYQTSNFRVQPTESIVRFPNITNLCPFGEVFNATRFASVYAWNRKRISNCVADYSVLYNSASFSTFKCYGVSPTKLNDLCFTNVYADSFVIRGDEVRQIAPGQTGKIADYNYKLPDDFTGCVIAWNSNNLDSKVGGNYNYLYRLFRKSNLKPFERDISTEIYQAGSTPCNGVEGFNCYFPLQSYGFQPTNGVGYQPYRVVVLSFELLHAPATVCGPKKSTNLVKNKCVNFNFNGLTGTGVLTESNKKFLPFQQFGRDIADTTDAVRDPQTLEILDITPCSFGGVSVITPGTNTSNQVAVLYQDVNCTEVPVAIHADQLTPTWRVYSTGSNVFQTRAGCLIGAEHVNNSYECDIPIGAGICASYQTQTNSPRRARSVASQSIIAYTMSLGAENSVAYSNNSIAIPTNFTISVTTEILPVSMTKTSVDCTMYICGDSTECSNLLLQYGSFCTQLNRALTGIAVEQDKNTQEVFAQVKQIYKTPPIKDFGGFNFSQILPDPSKPSKRSFIEDLLFNKVTLADAGFIKQYGDCLGDIAARDLICAQKFNGLTVLPPLLTDEMIAQYCSALLAGTITSGWTFGAGAALQIPFAMQMAYRFNGIGVTQNVLYENQKLIANQFNSAIGKIQDSLSSTASALGKLQDVVNQNAQALNTLVKQLSSNFGAISSVLNDILSRLDKVEAEVQIDRLITGRLQSLQTYVTQQLIRAAEIRASANLAATKMSECVLGQSKRVDFCGKGYHLMSFPQCAPHGVVFLHVTYVPAQEKNFTTAPAICHDGKAHFPREGVFVSNGTHWFVTQRNFYEPQIITTDNTFVSGNCDVVIGIVNNTVYDPLQPELDSFKEELDKYFKNHTSPDVDLGDISGINASVVNIQKEIDRLNEVAKNLNESLIDLQELGKYEQYIKGGGGSDIIKLLNEQVNKEMQSSNLYMSMSSWCYTHSLDGAGLFLFDHAAEEYEHAKKLIIFLNENNVPVQLTSISAPEHKFEGLTQIFQKAYEHEQHISESINNIVDHAIKSKDHATFNFLQWYVAEQHEEEVLFKDILDKIELIGNENHGLYLADQYVKGIAKSRKS

SEQ ID NO: 5571 - protein, 1379 aa, Artificial Sequence
  SARS-CoV-2/Shenzhen/SZTH-001/2020__EPI_ISL_406592 spike protein (1-1211)(T874C_S1055C) Ferritin construct
MFVFLVLLPLVSSQCVNLTTRTQLPPAYTNSFTRGVYYPDKVFRSSVLHSTQDLFLPFFSNVTWFHAIHVSGTNGTKRFDNPVLPFNDGVYFASTEKSNIIRGWIFGTTLDSKTQSLLIVNNATNVVIKVCEFQFCNDPFLGVYYHKNNKSWMESEFRVYSSANNCTFEYVSQPFLMDLEGKQGNFKNLREFVFKNIDGYFKIYSKHTPINLVRDLPQGFSALEPLVDLPIGINITRFQTLLALHRSYLTPGDSSSGWTAGAAAYYVGYLQPRTFLLKYNENGTITDAVDCALDPLSETKCTLKSFTVEKGIYQTSNFRVQPTESIVRFPNITNLCPFGEVFNATRFASVYAWNRKRISNCVADYSVLYNSASFSTFKCYGVSPTKLNDLCFTNVYADSFVIRGDEVRQIAPGQTGKIADYNYKLPDDFTGCVIAWNSNNLDSKVGGNYNYLYRLFRKSNLKPFERDISTEIYQAGSTPCNGVEGFNCYFPLQSYGFQPTNGVGYQPYRVVVLSFELLHAPATVCGPKKSTNLVKNKCVNFNFNGLTGTGVLTESNKKFLPFQQFGRDIADTTDAVRDPQTLEILDITPCSFGGVSVITPGTNTSNQVAVLYQDVNCTEVPVAIHADQLTPTWRVYSTGSNVFQTRAGCLIGAEHVNNSYECDIPIGAGICASYQTQTNSPRRARSVASQSIIAYTMSLGAENSVAYSNNSIAIPTNFTISVTTEILPVSMTKTSVDCTMYICGDSTECSNLLLQYGSFCTQLNRALTGIAVEQDKNTQEVFAQVKQIYKTPPIKDFGGFNFSQILPDPSKPSKRSFIEDLLFNKVTLADAGFIKQYGDCLGDIAARDLICAQKFNGLTVLPPLLTDEMIAQYCSALLAGTITSGWTFGAGAALQIPFAMQMAYRFNGIGVTQNVLYENQKLIANQFNSAIGKIQDSLSSTASALGKLQDVVNQNAQALNTLVKQLSSNFGAISSVLNDILSRLDKVEAEVQIDRLITGRLQSLQTYVTQQLIRAAEIRASANLAATKMSECVLGQSKRVDFCGKGYHLMSFPQCAPHGVVFLHVTYVPAQEKNFTTAPAICHDGKAHFPREGVFVSNGTHWFVTQRNFYEPQIITTDNTFVSGNCDVLIGIVNNTVYDPLQPELDSFKEELDKYFKNHTSPDVDLGDISGINASVVNIQKEIDRLNEVAKNLNESLIDLQELGKYEQYIKGGGGSDIIKLLNEQVNKEMQSSNLYMSMSSWCYTHSLDGAGLFLFDHAAEEYEHAKKLIIFLNENNVPVQLTSISAPEHKFEGLTQIFQKAYEHEQHISESINNIVDHAIKSKDHATFNFLQWYVAEQHEEEVLFKDILDKIELIGNENHGLYLADQYVKGIAKSRKS

SEQ ID NO: 5572 - protein, 1379 aa, Artificial Sequence
  SARS-CoV-2/Shenzhen/SZTH-004/2020__EPI_ISL_406595 spike protein (1-1211)(T874C_S1055C) Ferritin construct
MFVFLVLLPLVSSQCVNLTTRTQLPPAYTNSFTRGVYYPDKVFRSSVLHSTQDLFLPFFSNVTWFHAIHVSGTNGTKRFDNPVLPFNDGVYFASTEKSNIIRGWIFGTTLDSKTQSLLIVNNATNVVIKVCEFQFCNDPFLGVYYHKNNKSWMESEFRVYSSANNCTFEYVSQPFLMDLEGKQGNFKNLREFVFKNIDGYFKIYSKHTPINLVRDLPQGFSALEPLVDLPIGINITRFQTLLALHRSYLTPGDSSSGWTAGAAAYYVGYLQPRTFLLKYNENGTITDAVDCALDPLSETKCTLKSFTVEKGIYQTSNFRVQPTESIVRFPNITNLCPFGEVFNATRFASVYAWDRKRISNCVAYYSVLYNSASFSTFKCYGVSPTKLNDLCFTNVYADSFVIRGDEVRQIAPGQTGKIADYNYKLPDDFTGCVIAWNSNNLDSKVGGNYNYLYRLFRKSNLKPFERDISTEIYQAGSTPCNGVEGFNCYFPLQSYGFQPTNGVGYQPYRVVVLSFELLHAPATVCGPKKSTNLVKNKCVNFNFNGLTGTGVLTESNKKFLPFQQFGRDIADTTDAVRDPQTLEILDITPCSFGGVSVITPGTNTSNQVAVLYQDVNCTEVPVAIHADQLTPTWRVYSTGSNVFQTRAGCLIGAEHVNNSYECDIPIGAGICASYQTQTNSPRRARSVASQSIIAYTMSLGAENSVAYSNNSIAIPTNFTISVTTEILPVSMTKTSVDCTMYICGDSTECSNLLLQYGSFCTQLNRALTGIAVEQDKNTQEVFAQVKQIYKTPPIKDFGGFNFSQILPDPSKPSKRSFIEDLLFNKVTLADAGFIKQYGDCLGDIAARDLICAQKFNGLTVLPPLLTDEMIAQYCSALLAGTITSGWTFGAGAALQIPFAMQMAYRFNGIGVTQNVLYENQKLIANQFNSAIGKIQDSLSSTASALGKLQDVVNQNAQALNTLVKQLSSNFGAISSVLNDILSRLDKVEAEVQIDRLITGRLQSLQTYVTQQLIRAAEIRASANLAATKMSECVLGQSKRVDFCGKGYHLMSFPQCAPHGVVFLHVTYVPAQEKNFTTAPAICHDGKAHFPREGVFVSNGTHWFVTQRNFYEPQIITTDNTFVSGNCDVVIGIVNNTVYDPLQPELDSFKEELDKYFKNHTSPDVDLGDISGINASVVNIQKEIDRLNEVAKNLNESLIDLQELGKYEQYIKGGGGSDIIKLLNEQVNKEMQSSNLYMSMSSWCYTHSLDGAGLFLFDHAAEEYEHAKKLIIFLNENNVPVQLTSISAPEHKFEGLTQIFQKAYEHEQHISESINNIVDHAIKSKDHATFNFLQWYVAEQHEEEVLFKDILDKIELIGNENHGLYLADQYVKGIAKSRKS

SEQ ID NO: 5573 - protein, 1379 aa, Artificial Sequence
  SARS-CoV-2/France/IDF0372/2020__EPI_ISL_406596 spike protein (1-1211)(T874C_S1055C) Ferritin construct
MFVFLVLLPLVSSQCVNLTTRTQLPPAYTNSFTRGVYYPDKVFRSSVLHSTQDLFLPFFSNVTWFHAIHVSGTNGTKRFDNPVLPFNDGVYFASTEKSNIIRGWIFGTTLDSKTQSLLIVNNATNVVIKVCEFQFCNDPFLGVYYHKNNKSWMESEFRVYSSANNCTFEYVSQPFLMDLEGKQGNFKNLREFVFKNIDGYFKIYSKHTPINLVRDLPQGFSALEPLVDLPIGINITRFQTLLALHRSYLTPGDSSSGWTAGAAAYYVGYLQPRTFLLKYNENGTITDAVDCALDPLSETKCTLKSFTVEKGIYQTSNFRVQPTESIVRFPNITNLCPFGEVFNATRFASVYAWNRKRISNCVADYSFLYNSASFSTFKCYGVSPTKLNDLCFTNVYADSFVIRGDEVRQIAPGQTGKIADYNYKLPDDFTGCVIAWNSNNLDSKVGGNYNYLYRLFRKSNLKPFERDISTEIYQAGSTPCNGVEGFNCYFPLQSYGFQPTNGVGYQPYRVVVLSFELLHAPATVCGPKKSTNLVKNKCVNFNFNGLTGTGVLTESNKKFLPFQQFGRDIADTTDAVRDPQTLEILDITPCSFGGVSVITPGTNTSNQVAVLYQDVNCTEVPVAIHADQLTPTWRVYSTGSNVFQTRAGCLIGAEHVNNSYECDIPIGAGICASYQTQTNSPRRARSVASQSIIAYTMSLGAENSVAYSNNSIAIPTNFTISVTTEILPVSMTKTSVDCTMYICGDSTECSNLLLQYGSFCTQLNRALTGIAVEQDKNTQEVFAQVKQIYKTPPIKDFGGFNFSQILPDPSKPSKRSFIEDLLFNKVTLADAGFIKQYGDCLGDIAARDLICAQKFNGLTVLPPLLTDEMIAQYCSALLAGTITSGWTFGAGAALQIPFAMQMAYRFNGIGVTQNVLYENQKLIANQFNSAIGKIQDSLSSTASALGKLQDVVNQNAQALNTLVKQLSSNFGAISSVLNDILSRLDKVEAEVQIDRLITGRLQSLQTYVTQQLIRAAEIRASANLAATKMSECVLGQSKRVDFCGKGYHLMSFPQCAPHGVVFLHVTYVPAQEKNFTTAPAICHDGKAHFPREGVFVSNGTHWFVTQRNFYEPQIITTDNTFVSGNCDVVIGIVNNTVYDPLQPELDSFKEELDKYFKNHTSPDVDLGDISGINASVVNIQKEIDRLNEVAKNLNESLIDLQELGKYEQYIKGGGGSDIIKLLNEQVNKEMQSSNLYMSMSSWCYTHSLDGAGLFLFDHAAEEYEHAKKLIIFLNENNVPVQLTSISAPEHKFEGLTQIFQKAYEHEQHISESINNIVDHAIKSKDHATFNFLQWYVAEQHEEEVLFKDILDKIELIGNENHGLYLADQYVKGIAKSRKS

SEQ ID NO: 5574 - protein, 1379 aa, Artificial Sequence
  SARS-CoV-2/Australia/VIC01/2020__EPI_ISL_406844 spike protein (1-1211)(T874C_S1055C) Ferritin construct
MFVFLVLLPLVSSQCVNLTTRTQLPPAYTNSFTRGVYYPDKVFRSSVLHSTQDLFLPFFSNVTWFHAIHVSGTNGTKRFDNPVLPFNDGVYFASTEKSNIIRGWIFGTTLDSKTQSLLIVNNATNVVIKVCEFQFCNDPFLGVYYHKNNKSWMESEFRVYSSANNCTFEYVSQPFLMDLEGKQGNFKNLREFVFKNIDGYFKIYSKHTPINLVRDLPQGFSALEPLVDLPIGINITRFQTLLALHRRYLTPGDSSSGWTAGAAAYYVGYLQPRTFLLKYNENGTITDAVDCALDPLSETKCTLKSFTVEKGIYQTSNFRVQPTESIVRFPNITNLCPFGEVFNATRFASVYAWNRKRISNCVADYSVLYNSASFSTFKCYGVSPTKLNDLCFTNVYADSFVIRGDEVRQIAPGQTGKIADYNYKLPDDFTGCVIAWNSNNLDSKVGGNYNYLYRLFRKSNLKPFERDISTEIYQAGSTPCNGVEGFNCYFPLQSYGFQPTNGVGYQPYRVVVLSFELLHAPATVCGPKKSTNLVKNKCVNFNFNGLTGTGVLTESNKKFLPFQQFGRDIADTTDAVRDPQTLEILDITPCSFGGVSVITPGTNTSNQVAVLYQDVNCTEVPVAIHADQLTPTWRVYSTGSNVFQTRAGCLIGAEHVNNSYECDIPIGAGICASYQTQTNSPRRARSVASQSIIAYTMSLGAENSVAYSNNSIAIPTNFTISVTTEILPVSMTKTSVDCTMYICGDSTECSNLLLQYGSFCTQLNRALTGIAVEQDKNTQEVFAQVKQIYKTPPIKDFGGFNFSQILPDPSKPSKRSFIEDLLFNKVTLADAGFIKQYGDCLGDIAARDLICAQKFNGLTVLPPLLTDEMIAQYCSALLAGTITSGWTFGAGAALQIPFAMQMAYRFNGIGVTQNVLYENQKLIANQFNSAIGKIQDSLSSTASALGKLQDVVNQNAQALNTLVKQLSSNFGAISSVLNDILSRLDKVEAEVQIDRLITGRLQSLQTYVTQQLIRAAEIRASANLAATKMSECVLGQSKRVDFCGKGYHLMSFPQCAPHGVVFLHVTYVPAQEKNFTTAPAICHDGKAHFPREGVFVSNGTHWFVTQRNFYEPQIITTDNTFVSGNCDVVIGIVNNTVYDPLQPELDSFKEELDKYFKNHTSPDVDLGDISGINASVVNIQKEIDRLNEVAKNLNESLIDLQELGKYEQYIKGGGGSDIIKLLNEQVNKEMQSSNLYMSMSSWCYTHSLDGAGLFLFDHAAEEYEHAKKLIIFLNENNVPVQLTSISAPEHKFEGLTQIFQKAYEHEQHISESINNIVDHAIKSKDHATFNFLQWYVAEQHEEEVLFKDILDKIELIGNENHGLYLADQYVKGIAKSRKS

SEQ ID NO: 5575 - protein, 1379 aa, Artificial Sequence
  SARS-CoV-2/Germany/BavPat1/2020__EPI_ISL_406862 spike protein (1-1211)(T874C_S1055C) Ferritin construct
MFVFLVLLPLVSSQCVNLTTRTQLPPAYTNSFTRGVYYPDKVFRSSVLHSTQDLFLPFFSNVTWFHAIHVSGTNGTKRFDNPVLPFNDGVYFASTEKSNIIRGWIFGTTLDSKTQSLLIVNNATNVVIKVCEFQFCNDPFLGVYYHKNNKSWMESEFRVYSSANNCTFEYVSQPFLMDLEGKQGNFKNLREFVFKNIDGYFKIYSKHTPINLVRDLPQGFSALEPLVDLPIGINITRFQTLLALHRSYLTPGDSSSGWTAGAAAYYVGYLQPRTFLLKYNENGTITDAVDCALDPLSETKCTLKSFTVEKGIYQTSNFRVQPTESIVRFPNITNLCPFGEVFNATRFASVYAWNRKRISNCVADYSVLYNSASFSTFKCYGVSPTKLNDLCFTNVYADSFVIRGDEVRQIAPGQTGKIADYNYKLPDDFTGCVIAWNSNNLDSKVGGNYNYLYRLFRKSNLKPFERDISTEIYQAGSTPCNGVEGFNCYFPLQSYGFQPTNGVGYQPYRVVVLSFELLHAPATVCGPKKSTNLVKNKCVNFNFNGLTGTGVLTESNKKFLPFQQFGRDIADTTDAVRDPQTLEILDITPCSFGGVSVITPGTNTSNQVAVLYQGVNCTEVPVAIHADQLTPTWRVYSTGSNVFQTRAGCLIGAEHVNNSYECDIPIGAGICASYQTQTNSPRRARSVASQSIIAYTMSLGAENSVAYSNNSIAIPTNFTISVTTEILPVSMTKTSVDCTMYICGDSTECSNLLLQYGSFCTQLNRALTGIAVEQDKNTQEVFAQVKQIYKTPPIKDFGGFNFSQILPDPSKPSKRSFIEDLLFNKVTLADAGFIKQYGDCLGDIAARDLICAQKFNGLTVLPPLLTDEMIAQYCSALLAGTITSGWTFGAGAALQIPFAMQMAYRFNGIGVTQNVLYENQKLIANQFNSAIGKIQDSLSSTASALGKLQDVVNQNAQALNTLVKQLSSNFGAISSVLNDILSRLDKVEAEVQIDRLITGRLQSLQTYVTQQLIRAAEIRASANLAATKMSECVLGQSKRVDFCGKGYHLMSFPQCAPHGVVFLHVTYVPAQEKNFTTAPAICHDGKAHFPREGVFVSNGTHWFVTQRNFYEPQIITTDNTFVSGNCDVVIGIVNNTVYDPLQPELDSFKEELDKYFKNHTSPDVDLGDISGINASVVNIQKEIDRLNEVAKNLNESLIDLQELGKYEQYIKGGGGSDIIKLLNEQVNKEMQSSNLYMSMSSWCYTHSLDGAGLFLFDHAAEEYEHAKKLIIFLNENNVPVQLTSISAPEHKFEGLTQIFQKAYEHEQHISESINNIVDHAIKSKDHATFNFLQWYVAEQHEEEVLFKDILDKIELIGNENHGLYLADQYVKGIAKSRKS

SEQ ID NO: 5576 - protein, 1379 aa, Artificial Sequence
  SARS-CoV-2/Wuhan/HBCDC-HB-02/2020__EPI_ISL_412978 spike protein (1-1211)(T874C_S1055C) Ferritin construct
MFVFLVLLPLVSSQCVNLTTRTQLPPAYTNSFTRGVYYPDKVFRSSVLHSTQDLFLPFFSNVTWFHAIHVSGTNGTKRFDNPVLPFNDGVYFASTEKSNIIRGWIFGTTLDSKTQSLLIVNNATNVVIKVCEFQFCNDPFLGVYYHKNNKSWMESEFRVYSSANNCTFEYVSQPFLMDLEGKQGNFKNLREFVFKNIDGYFKIYSKHTPINLVRDLPQGFSALEPLVDLPIGINITRFQTLLALHRSYLTPGDSSSGWTAGAAAYYVGYLQPRTFLLKYNENGTITDAVDCALDPLSETKCTLKSFTVEKGIYQTSNFRVQPTESIVRFPNITNLCPFGEVFNATRFASVYAWNRKRISNCVADYSVLYNSASFSTFKCYGVSPTKLNDLCFTNVYADSFVIRGDEVRQIAPGQTGKIADYNYKLPDDFTGCVIAWNSNNLDSKVGGNYNYLYRLFRKSNLKPFERDISTEIYQAGSTPCNGVEGFNCYFPLQSYGFQPTNGVGYQPYRVVVLSFELLHAPATVCGPKKSTNLVKNKCVNFNFNGLTGTGVLTESNKKFLPFQQFGRDIADTTDAVRDPQTLEILDITPCSFGGVSVITPGTNTSNQVAVLYQDVNCTEVPVAIHADQLTPTWRVYSTGSNVFQTRAGCLIGAEHVNNSYECDIPIGAGICASYQTQTNSPRRARSVASQSIIAYTMSLGAENSVAYSNNSIAIPTNFTISVTTEILPVSMTKTSVDCTMYICGDSTECSNFLLQYGSFCTQLNRALTGIAVEQDKNTQEVFAQVKQIYKTPPIKDFGGFNFSQILPDPSKPSKRSFIEDLLFNKVTLADAGFIKQYGDCLGDIAARDLICAQKFNGLTVLPPLLTDEMIAQYCSALLAGTITSGWTFGAGAALQIPFAMQMAYRFNGIGVTQNVLYENQKLIANQFNSAIGKIQDSLSSTASALGKLQDVVNQNAQALNTLVKQLSSNFGAISSVLNDILSRLDKVEAEVQIDRLITGRLQSLQTYVTQQLIRAAEIRASANLAATKMSECVLGQSKRVDFCGKGYHLMSFPQCAPHGVVFLHVTYVPAQEKNFTTAPAICHDGKAHFPREGVFVSNGTHWFVTQRNFYEPQIITTDNTFVSGNCDVVIGIVNNTVYDPLQPELDSFKEELDKYFKNHTSPDVDLGDISGINASVVNIQKEIDRLNEVAKNLNESLIDLQELGKYEQYIKGGGGSDIIKLLNEQVNKEMQSSNLYMSMSSWCYTHSLDGAGLFLFDHAAEEYEHAKKLIIFLNENNVPVQLTSISAPEHKFEGLTQIFQKAYEHEQHISESINNIVDHAIKSKDHATFNFLQWYVAEQHEEEVLFKDILDKIELIGNENHGLYLADQYVKGIAKSRKS

SEQ ID NO: 5577 - protein, 1379 aa, Artificial Sequence
  SARS-CoV-2/Australia/QLD02/2020__EPI_ISL_407896 spike protein (1-1211)(T874C_S1055C) Ferritin construct
MFVFLVLLPLVSSQCVNLTTRTQLPPAYTNSFTRGVYYPDKVFRSSVLHSTQDLFLPFFSNVTWFHAIHVSGTNGTKRFDNPVLPFNDGVYFASTEKSNIIRGWIFGTTLDSKTQSLLIVNNATNVVIKVCEFQFCNDPFLGVYYHKNNKSWMESEFRVYSSANNCTFEYVSQPFLMDLEGKQGNFKNLREFVFKNIDGYFKIYSKHTPINLVRDLPQGFSALEPLVDLPIGINITRFQTLLALHRSYLTPGDSSSGWTAGAAAYYVGYLQPRTFLLKYNENGTITDAVDCALDPLSETKCTLKSFTVEKGIYQTSNFRVQPTESIVRFPNITNLCPFGEVFNATRFASVYAWNRKRISNCVADYSVLYNSASFSTFKCYGVSPTKLNDLCFTNVYADSFVIRGDEVRQIAPGQTGKIADYNYKLPDDFTGCVIAWNSNNLDSKVGGNYNYLYRLFRKSNLKPFERDISTEIYQAGSTPCNGVEGFNCYFPLQSYGFQPTNGVGYQPYRVVVLSFELLHAPATVCGPKKSTNLVKNKCVNFNFNGLTGTGVLTESNKKFLPFQQFGRDIADTTDAVRDPQTLEILDITPCSFGGVSVITPGTNTSNQVAVLYQDVNCTEVPVAIHADQLTPTWRVYSTGSNVFQTRAGCLIGAEHVNNSYECDIPIGAGICASYQTQTNSPRRARSVASQSIIAYTMSLGAENSVAYSNNSIAIPTNFTISVTTEILPVSMTKTSVDCTMYICGDSTECSNLLLQYGSFCTQLNRALTGIAVEQDKNTQEVFAQVKQIYKTPPIKDFGGFNFSQILPDPSKPSKRSFIEDLLFNKVTLADAGFIKQYGDCLGDIAARDLICAQKFNGLTVLPPLLTDEMIAQYCSALLAGTITSGWTFGAGAALQIPFAMQMAYRFNGIGVTQNVLYENQKLIANQFNSAIGKIQDSLSSTASALGKLQDVVNQNAQALNTLVKQLSSNFGAISSVLNDILSRLDKVEAEVQIDRLITGRLQSLQTYVTQQLIRAAEIRASANLAATKMSECVLGQSKRVDFCGKGYHLMSFPQCAPHGVVFLHVTYVPAQEKNFTTAPAICHDGKAHFPREGVFVSNGTHWFVTQRNFYEPQIITTDNTFVSGNCDVVIGIVNNTVYDPLQLELDSFKEELDKYFKNHTSPDVDLGDISGINASVVNIQKEIDRLNEVAKNLNESLIDLQELGKYEQYIKGGGGSDIIKLLNEQVNKEMQSSNLYMSMSSWCYTHSLDGAGLFLFDHAAEEYEHAKKLIIFLNENNVPVQLTSISAPEHKFEGLTQIFQKAYEHEQHISESINNIVDHAIKSKDHATFNFLQWYVAEQHEEEVLFKDILDKIELIGNENHGLYLADQYVKGIAKSRKS

SEQ ID NO: 5578 - protein, 1379 aa, Artificial Sequence
  SARS-CoV-2/India/1-31/2020__EPI_ISL_413523 spike protein (1-1211)(T874C_S1055C) Ferritin construct
MFVFLVLLPLVSSQCVNLTTRTQLPPAYTNSFTRGVYYPDKVFRSSVLHSTQDLFLPFFSNVTWFHAIHVSGTNGTKRFDNPVLPFNDGVYFASTEKSNIIRGWIFGTTLDSKTQSLLIVNNATNVVIKVCEFQFCNDPFLGVYYHKNNKSWMESEFRVYSSANNCTFEYVSQPFLMDLEGKQGNFKNLREFVFKNIDGYFKIYSKHTPINLVRDLPQGFSALEPLVDLPIGINITRFQTLLALHRSYLTPGDSSSGWTAGAAAYYVGYLQPRTFLLKYNENGTITDAVDCALDPLSETKCTLKSFTVEKGIYQTSNFRVQPTESIVRFPNITNLCPFGEVFNATRFASVYAWNRKRISNCVADYSVLYNSASFSTFKCYGVSPTKLNDLCFTNVYADSFVIRGDEVRQIAPGQTGKIADYNYKLPDDFTGCVIAWNSNNLDSKVGGNYNYLYRLFRKSNLKPFERDISTEIYQAGSTPCNGVEGFNCYFPLQSYGFQPTNGVGYQPYRVVVLSFELLHAPATVCGPKKSTNLVKNKCVNFNFNGLTGTGVLTESNKKFLPFQQFGRDIADTTDAVRDPQTLEILDITPCSFGGVSVITPGTNTSNQVAVLYQDVNCTEVPVAIHADQLTPTWRVYSTGSNVFQTRAGCLIGAEHVNNSYECDIPIGAGICASYQTQTNSPRRARSVASQSIIAYTMSLGAENSVAYSNNSIAIPTNFTISVTTEILPVSMTKTSVDCTMYICGDSTECSNLLLQYGSFCTQLNRALTGIAVEQDKNTQEVFAQVKQIYKTPPIKDFGGFNFSQILPDPSKPSKRSFIEDLLFNKVTLADAGFIKQYGDCLGDIAARDLICAQKFNGLTVLPPLLTDEMIAQYCSALLAGTITSGWTFGAGAALQIPFAMQMAYRFNGIGVTQNVLYENQKLIANQFNSVIGKIQDSLSSTASALGKLQDVVNQNAQALNTLVKQLSSNFGAISSVLNDILSRLDKVEAEVQIDRLITGRLQSLQTYVTQQLIRAAEIRASANLAATKMSECVLGQSKRVDFCGKGYHLMSFPQCAPHGVVFLHVTYVPAQEKNFTTAPAICHDGKAHFPREGVFVSNGTHWFVTQRNFYEPQIITTDNTFVSGNCDVVIGIVNNTVYDPLQPELDSFKEELDKYFKNHTSPDVDLGDISGINASVVNIQKEIDRLNEVAKNLNESLIDLQELGKYEQYIKGGGGSDIIKLLNEQVNKEMQSSNLYMSMSSWCYTHSLDGAGLFLFDHAAEEYEHAKKLIIFLNENNVPVQLTSISAPEHKFEGLTQIFQKAYEHEQHISESINNIVDHAIKSKDHATFNFLQWYVAEQHEEEVLFKDILDKIELIGNENHGLYLADQYVKGIAKSRKS

SEQ ID NO: 5579 - protein, 1379 aa, Artificial Sequence
  SARS-CoV-2/Guangdong/GD2020087-P0008/2020__EPI_ISL_413863 spike protein (1-1211)(T874C_S1055C) Ferritin construct
MFVFLVLLPLVSSQCVNLTTRTQLPPAYTNSFTRGVYYPDKVFRSSVLHSTQDLFLPFFSNVTWFHAIHVSGTNGTKRFDNPVLPFNDGVYFASTEKSNIIRGWIFGTTLDSKTQSLLIVNNATNVVIKVCEFQFCNDPFLGVYYHKNNKSWMESEFRVYSSANNCTFEYVSQPFLMDLEGKQGNFKNLREFVFKNIDGYFKIYSKHTPINLVRDLPQGFSALEPLVDLPIGINITRFQTLLALHRSYLTPGDSSSGWTAGAAAYYVGYLQPRTFLLKYNENGTITDAVDCALDPLSETKCTLKSFTVEKGIYQTSNFRVQPTESIVRFPNITNLCPFGEVFNATRFASVYAWNRKRISNCVADYSVLYNSASFSTFKCYGVSPTKLNDLCFTNVYADSFVIRGDEVREIAPGQTGKIADYNYKLPDDFTGCVIAWNSNNLDSKVGGNYNYLYRLFRKSNLKPFERDISTEIYQAGSTPCNGVEGFNCYFPLQSYGFQPTNGVGYQPYRVVVLSFELLHAPATVCGPKKSTNLVKNKCVNFNFNGLTGTGVLTESNKKFLPFQQFGRDIADTTDAVRDPQTLEILDITPCSFGGVSVITPGTNTSNQVAVLYQDVNCTEVPVAIHADQLTPTWRVYSTGSNVFQTRAGCLIGAEHVNNSYECDIPIGAGICASYQTQTNSPRRARSVASQSIIAYTMSLGAENSVAYSNNSIAIPTNFTISVTTEILPVSMTKTSVDCTMYICGDSTECSNLLLQYGSFCTQLNRALTGIAVEQDKNTQEVFAQVKQIYKTPPIKDFGGFNFSQILPDPSKPSKRSFIEDLLFNKVTLADAGFIKQYGDCLGDIAARDLICAQKFNGLTVLPPLLTDEMIAQYCSALLAGTITSGWTFGAGAALQIPFAMQMAYRFNGIGVTQNVLYENQKLIANQFNSAIGKIQDSLSSTASALGKLQDVVNQNAQALNTLVKQLSSNFGAISSVLNDILSRLDKVEAEVQIDRLITGRLQSLQTYVTQQLIRAAEIRASANLAATKMSECVLGQSKRVDFCGKGYHLMSFPQCAPHGVVFLHVTYVPAQEKNFTTAPAICHDGKAHFPREGVFVSNGTHWFVTQRNFYEPQIITTDNTFVSGNCDVVIGIVNNTVYDPLQPELDSFKEELDKYFKNHTSPDVDLGDISGINASVVNIQKEIDRLNEVAKNLNESLIDLQELGKYEQYIKGGGGSDIIKLLNEQVNKEMQSSNLYMSMSSWCYTHSLDGAGLFLFDHAAEEYEHAKKLIIFLNENNVPVQLTSISAPEHKFEGLTQIFQKAYEHEQHISESINNIVDHAIKSKDHATFNFLQWYVAEQHEEEVLFKDILDKIELIGNENHGLYLADQYVKGIAKSRKS

SEQ ID NO: 5580 - protein, 1379 aa, Artificial Sequence
  SARS-CoV-2/Sweden/01/2020__EPI_ISL_411951 spike protein (1-1211)(T874C_S1055C) Ferritin construct
MFVFLVLLPLVSSQCVNLTTRTQLPPAYTNSFTRGVYYPDKVFRSSVLHSTQDLFLPFFSNVTWFHAIHVSGTNGTKRFDNPVLPFNDGVYFASTEKSNIIRGWIFGTTLDSKTQSLLIVNNATNVVIKVCEFQFCNDPFLGVYYHKNNKSWMESEFRVYSSANNCTFEYVSQPFLMDLEGKQGNFKNLREFVFKNIDGYFKIYSKHTPINLVRDLPQGFSALEPLVDLPIGINITRFQTLLALHRSYLTPGDSSSGWTAGAAAYYVGYLQPRTFLLKYNENGTITDAVDCALDPLSETKCTLKSFTVEKGIYQTSNFRVQPTESIVRFPNITNLCPFGEVFNATRFASVYAWNRKRISNCVADYSVLYNSASFSTFKCYGVSPTKLNDLCFTNVYADSFVIRGDEVRQIAPGQTGKIADYNYKLPDDFTGCVIAWNSNNLDSKVGGNYNYLYRLFRKSNLKPFERDISTEIYQAGSTPCNGVEGFNCYFPLQSYGFQPTNGVGYQPYRVVVLSFELLHAPATVCGPKKSTNLVKNKCVNFNFNGLTGTGVLTESNKKFLPFQQFGRDIADTTDAVRDPQTLEILDITPCSFGGVSVITPGTNTSNQVAVLYQDVNCTEVPVAIHADQLTPTWRVYSTGSNVFQTRAGCLIGAEHVNNSYECDIPIGAGICASYQTQTNSPRRARSVASQSIIAYTMSLGAENSVAYSNNSIAIPTNFTISVTTEILPVSMTKTSVDCTMYICGDSTECSNLLLQYGSFCTQLNRALTGIAVEQDKNTQEVFAQVKQIYKTPPIKDCGGFNFSQILPDPSKPSKRSFIEDLLFNKVTLADAGFIKQYGDCLGDIAARDLICAQKFNGLTVLPPLLTDEMIAQYCSALLAGTITSGWTFGAGAALQIPFAMQMAYRFNGIGVTQNVLYENQKLIANQFNSAIGKIQDSLSSTASALGKLQDVVNQNAQALNTLVKQLSSNFGAISSVLNDILSRLDKVEAEVQIDRLITGRLQSLQTYVTQQLIRAAEIRASANLAATKMSECVLGQSKRVDFCGKGYHLMSFPQCAPHGVVFLHVTYVPAQEKNFTTAPAICHDGKAHFPREGVFVSNGTHWFVTQRNFYEPQIITTDNTFVSGNCDVVIGIVNNTVYDPLQPELDSFKEELDKYFKNHTSPDVDLGDISGINASVVNIQKEIDRLNEVAKNLNESLIDLQELGKYEQYIKGGGGSDIIKLLNEQVNKEMQSSNLYMSMSSWCYTHSLDGAGLFLFDHAAEEYEHAKKLIIFLNENNVPVQLTSISAPEHKFEGLTQIFQKAYEHEQHISESINNIVDHAIKSKDHATFNFLQWYVAEQHEEEVLFKDILDKIELIGNENHGLYLADQYVKGIAKSRKS

SEQ ID NO: 5581 - protein, 1379 aa, Artificial Sequence
  SARS-CoV-2/Tianmen/HBCDC-HB-07/2020__EPI_ISL_412983 spike protein (1-1211)(T874C_S1055C) Ferritin construct
MFVFLVLLPLVSSQCVNLTTRTQLPPAYTNSFTRGVYYPDKVFRSSVLHSTQDLFLPFFSNVTWFHAIHVSGTNGTKRFDNPVLPFNDGVYFASTEKSNIIRGWIFGTTLDSKTQSLLIVNNATNVVIKVCEFQFCNDPFLGVYYHKNNKSWMESEFRVYSSANNCTFEYVSQPFLMDLEGKQGNFKNLREFVFKNIDGYFKIYSKHTPINLVRDLPQGFSALEPLVDLPIGINITRFQTLLALHRSYLTPGDSSSGWTAGAAAYYVGYLQPRTFLLKYNENGTITDAVDCALDPLSETKCTLKSFTVEKGIYQTSNFRVQPTESIVRFPNITNLCPFGEVFNATRFASVYAWNRKRISNCVADYSVLYNSASFSTFKCYGVSPTKLNDLCFTNVYADSFVIRGDEVRQIAPGQTGKIADYNYKLPDDFTGCVIAWNSNNLDSKVGGNYNYLYRLFRKSNLKPFERDISTEIYQAGSTPCNGVEGFNCYFPLQSYGFQPTNGVGYQPYRVVVLSFELLHAPATVCGPKKSTNLVKNKCVNFNFNGLTGTGVLTESNKKFLPFQQFGRDIADTTDAVRDPQTLEILDITPCSFGGVSVITPGTNTSNQVAVLYQDLNCTEVPVAIHADQLTPTWRVYSTGSNVFQTRAGCLIGAEHVNNSYECDIPIGAGICASYQTQTNSPRRARSVASQSIIAYTMSLGAENSVAYSNNSIAIPTNFTISVTTEILPVSMTKTSVDCTMYICGDSTECSNLLLQYGSFCTQLNRALTGIAVEQDKNTQEVFAQVKQIYKTPPIKDFGGFNFSQILPDPSKPSKRSFIEDLLFNKVTLADAGFIKQYGDCLGDIAARDLICAQKFNGLTVLPPLLTDEMIAQYCSALLAGTITSGWTFGAGAALQIPFAMQMAYRFNGIGVTQNVLYENQKLIANQFNSAIGKIQDSLSSTASALGKLQDVVNQNAQALNTLVKQLSSNFGAISSVLNDILSRLDKVEAEVQIDRLITGRLQSLQTYVTQQLIRAAEIRASANLAATKMSECVLGQSKRVDFCGKGYHLMSFPQCAPHGVVFLHVTYVPAQEKNFTTAPAICHDGKAHFPREGVFVSNGTHWFVTQRNFYEPQIITTDNTFVSGNCDVVIGIVNNTVYDPLQPELDSFKEELDKYFKNHTSPDVDLGDISGINASVVNIQKEIDRLNEVAKNLNESLIDLQELGKYEQYIKGGGGSDIIKLLNEQVNKEMQSSNLYMSMSSWCYTHSLDGAGLFLFDHAAEEYEHAKKLIIFLNENNVPVQLTSISAPEHKFEGLTQIFQKAYEHEQHISESINNIVDHAIKSKDHATFNFLQWYVAEQHEEEVLFKDILDKIELIGNENHGLYLADQYVKGIAKSRKS

SEQ ID NO: 5582 - protein, 1379 aa, Artificial Sequence
  SARS-CoV-2/Hong Kong/case42_VM20002493/2020__EPI_ISL_414527 spike protein (1-1211)(T874C_S1055C) Ferritin construct
MFVFLVLLPLVSSQCVNLTTRTQLPPAYTNSFTRGVYYPDKVFRSSVLHSTQDLFLPFFSNVTWFHAIHVSGTNGTKRFDNPVLPFNDGVYFASTEKSNIIRGWIFGTTLDSKTQSLLIVNNATNVVIKVCEFQFCNDPFLGVYYHKNNKSWMESEFRVYSSANNCTFEYVSQPFLMDLEGKQGNFKNLREFVFKNIDGYFKIYSKHTPINLVRDLPQGFSALEPLVDLPIGINITRFQTLLALHRSYLTPGDSSSGWTAGAAAYYVGYLQPRTFLLKYNENGTITDAVDCALDPLSETKCTLKSFTVEKGIYQTSNFRVQPTESIVRFPNITNLCPFGEVFNATRFASVYAWNRKRISNCVADYSVLYNSASFSTFKCYGVSPTKLNDLCFTNVYADSFVIRGDEVRQIAPGQTGKIADYNYKLPDDFTGCVIAWNSNNLDSKVGGNYNYLYRLFRKSNLKPFERDISTEIYQAGSTPCNGVEGFNCYFPLQSYGFQPTNGVGYQPYRVVVLSFELLHAPATVCGPKKSTNLVKNKCVNFNFNGLTGTGVLTESNKKFLPFQQFGRDIADTTDAVRDPQTLEILDITPCSFGGVSVITPGTNTSNQVAVLYQDVNCTEVPVAIHADQLTPTWRVYSTGSNVFQTRAGCLIGAEHVNNSYECDIPIGAGICASYQTQTNSPRRARSVASQSIIAYTMSLGAENSVAYSNNSIAIPTNFAISVTTEILPVSMTKTSVDCTMYICGDSTECSNLLLQYGSFCTQLNRALTGIAVEQDKNTQEVFAQVKQIYKTPPIKDFGGFNFSQILPDPSKPSKRSFIEDLLFNKVTLADAGFIKQYGDCLGDIAARDLICAQKFNGLTVLPPLLTDEMIAQYCSALLAGTITSGWTFGAGAALQIPFAMQMAYRFNGIGVTQNVLYENQKLIANQFNSAIGKIQDSLSSTASALGKLQDVVNQNAQALNTLVKQLSSNFGAISSVLNDILSRLDKVEAEVQIDRLITGRLQSLQTYVTQQLIRAAEIRASANLAATKMSECVLGQSKRVDFCGKGYHLMSFPQCAPHGVVFLHVTYVPAQEKNFTTAPAICHDGKAHFPREGVFVSNGTHWFVTQRNFYEPQIITTDNTFVSGNCDVVIGIVNNTVYDPLQPELDSFKEELDKYFKNHTSPDVDLGDISGINASVVNIQKEIDRLNEVAKNLNESLIDLQELGKYEQYIKGGGGSDIIKLLNEQVNKEMQSSNLYMSMSSWCYTHSLDGAGLFLFDHAAEEYEHAKKLIIFLNENNVPVQLTSISAPEHKFEGLTQIFQKAYEHEQHISESINNIVDHAIKSKDHATFNFLQWYVAEQHEEEVLFKDILDKIELIGNENHGLYLADQYVKGIAKSRKS

SEQ ID NO: 5583 - protein, 1379 aa, Artificial Sequence
  SARS-CoV-2/USA/CruiseA-23/2020__EPI_ISL_414482 spike protein (1-1211)(T874C_S1055C) Ferritin construct
MFVFLVLLPLVSSQCVNLTTRTQLPPAYTNSFTRGVYYPDKVFRSSVLHSTQDLFLPFFSNVTWFHAIHVSGTNGTKRFDNPVLPFNDGVYFASTEKSNIIRGWIFGTTLDSKTQSLLIVNNATNVVIKVCEFQFCNDPFLGVYYHKNNKSWMESEFRVYSSANNCTFEYVSQPFLMDLEVKQGNFKNLREFVFKNIDGYFKIYSKHTPINLVRDLPQGFSALEPLVDLPIGINITRFQTLLALHRSYLTPGDSSSGWTAGAAAYYVGYLQPRTFLLKYNENGTITDAVDCALDPLSETKCTLKSFTVEKGIYQTSNFRVQPTESIVRFPNITNLCPFGEVFNATRFASVYAWNRKRISNCVADYSVLYNSASFSTFKCYGVSPTKLNDLCFTNVYADSFVIRGDEVRQIAPGQTGKIADYNYKLPDDFTGCVIAWNSNNLDSKVGGNYNYLYRLFRKSNLKPFERDISTEIYQAGSTPCNGVEGFNCYFPLQSYGFQPTNGVGYQPYRVVVLSFELLHAPATVCGPKKSTNLVKNKCVNFNFNGLTGTGVLTESNKKFLPFQQFGRDIADTTDAVRDPQTLEILDITPCSFGGVSVITPGTNTSNQVAVLYQDVNCTEVPVAIHADQLTPTWRVYSTGSNVFQTRAGCLIGAEHVNNSYECDIPIGAGICASYQTQTNSPRRARSVASQSIIAYTMSLGAENSVAYSNNSIAIPTNFTISVTTEILPVSMTKTSVDCTMYICGDSTECSNLLLQYGSFCTQLNRALTGIAVEQDKNTQEVFAQVKQIYKTPPIKDFGGFNFSQILPDPSKPSKRSFIEDLLFNKVTLADAGFIKQYGDCLGDIAARDLICAQKFNGLTVLPPLLTDEMIAQYCSALLAGTITSGWTFGAGAALQIPFAMQMAYRFNGIGVTQNVLYENQKLIANQFNSAIGKIQDSLSSTASALGKLQDVVNQNAQALNTLVKQLSSNFGAISSVLNDILSRLDKVEAEVQIDRLITGRLQSLQTYVTQQLIRAAEIRASANLAATKMSECVLGQSKRVDFCGKGYHLMSFPQCAPHGVVFLHVTYVPAQEKNFTTAPAICHDGKAHFPREGVFVSNGTHWFVTQRNFYEPQIITTDNTFVSGNCDVVIGIVNNTVYDPLQPELDSFKEELDKYFKNHTSPDVDLGDISGINASVVNIQKEIDRLNEVAKNLNESLIDLQELGKYEQYIKGGGGSDIIKLLNEQVNKEMQSSNLYMSMSSWCYTHSLDGAGLFLFDHAAEEYEHAKKLIIFLNENNVPVQLTSISAPEHKFEGLTQIFQKAYEHEQHISESINNIVDHAIKSKDHATFNFLQWYVAEQHEEEVLFKDILDKIELIGNENHGLYLADQYVKGIAKSRKS

SEQ ID NO: 5584 - protein, 1379 aa, Artificial Sequence
  SARS-CoV-2/Hong Kong/case85_VM20002868/2020__EPI_ISL_414519 spike protein (1-1211)(T874C_S1055C) Ferritin construct
MFVFLVLVPLVSSQCVNLTTRTQLPPAYTNSFTRGVYYPDKVFRSSVLHSTQDLFLPFFSNVTWFHAIHVSGTNGTKRFDNPVLPFNDGVYFASTEKSNIIRGWIFGTTLDSKTQSLLIVNNATNVVIKVCEFQFCNDPFLGVYYHKNNKSWMESEFRVYSSANNCTFEYVSQPFLMDLEGKQGNFKNLREFVFKNIDGYFKIYSKHTPINLVRDLPQGFSALEPLVDLPIGINITRFQTLLALHRSYLTPGDSSSGWTAGAAAYYVGYLQPRTFLLKYNENGTITDAVDCALDPLSETKCTLKSFTVEKGIYQTSNFRVQPTESIVRFPNITNLCPFGEVFNATRFASVYAWNRKRISNCVADYSVLYNSASFSTFKCYGVSPTKLNDLCFTNVYADSFVIRGDEVRQIAPGQTGKIADYNYKLPDDFTGCVIAWNSNNLDSKVGGNYNYLYRLFRKSNLKPFERDISTEIYQAGSTPCNGVEGFNCYFPLQSYGFQPTNGVGYQPYRVVVLSFELLHAPATVCGPKKSTNLVKNKCVNFNFNGLTGTGVLTESNKKFLPFQQFGRDIADTTDAVRDPQTLEILDITPCSFGGVSVITPGTNTSNQVAVLYQDVNCTEVPVAIHADQLTPTWRVYSTGSNVFQTRAGCLIGAEHVNNSYECDIPIGAGICASYQTQTNSPRRARSVASQSIIAYTMSLGAENSVAYSNNSIAIPTNFTISVTTEILPVSMTKTSVDCTMYICGDSTECSNLLLQYGSFCTQLNRALTGIAVEQDKNTQEVFAQVKQIYKTPPIKDFGGFNFSQILPDPSKPSKRSFIEDLLFNKVTLADAGFIKQYGDCLGDIAARDLICAQKFNGLTVLPPLLTDEMIAQYCSALLAGTITSGWTFGAGAALQIPFAMQMAYRFNGIGVTQNVLYENQKLIANQFNSAIGKIQDSLSSTASALGKLQDVVNQNAQALNTLVKQLSSNFGAISSVLNDILSRLDKVEAEVQIDRLITGRLQSLQTYVTQQLIRAAEIRASANLAATKMSECVLGQSKRVDFCGKGYHLMSFPQCAPHGVVFLHVTYVPAQEKNFTTAPAICHDGKAHFPREGVFVSNGTHWFVTQRNFYEPQIITTDNTFVSGNCDVVIGIVNNTVYDPLQPELDSFKEELDKYFKNHTSPDVDLGDISGINASVVNIQKEIDRLNEVAKNLNESLIDLQELGKYEQYIKGGGGSDIIKLLNEQVNKEMQSSNLYMSMSSWCYTHSLDGAGLFLFDHAAEEYEHAKKLIIFLNENNVPVQLTSISAPEHKFEGLTQIFQKAYEHEQHISESINNIVDHAIKSKDHATFNFLQWYVAEQHEEEVLFKDILDKIELIGNENHGLYLADQYVKGIAKSRKS

SEQ ID NO: 5585 - protein, 1379 aa, Artificial Sequence; identical to SEQ ID NO: 5575
  SARS-CoV-2/England/200990660/2020__EPI_ISL_414523 spike protein (1-1211)(T874C_S1055C) Ferritin construct

SEQ ID NO: 5586 - protein, 1379 aa, Artificial Sequence
  SARS-CoV-2/Australia/NSW09/2020__EPI_ISL_413595 spike protein (1-1211)(T874C_S1055C) Ferritin construct
MFVFLVLLPLVSSQCVNLTTRTQLPPAYTNSFTRGVYYPDKVFRSSVLHSTQDLFLPFFSNVTWFHAIHVSGTNGTKRFDNPVLPFNDGVYFASTEKSNIIRGWIFGTTLDSKTQSLLIVNNATNVVIKVCEFQFCNDPFLGVYYHKNNKSWMESEFRVYSSANNCTFEYVSQPFLMDLEGKQGNFKNLREFVFKNIDGYFKIYSKHTPINLVRDLPQGFSALEPLVDLPIGINITRFQTLLALHRSYLTPGDSSSGWTAGAAAYYVGYLQPRTFLLKYNENGTITDAVDCALDPLSETKCTLKSFTVEKGIYQTSNFRVQPTESIVRFPNITNLCPFGEVFNATRFASVYAWNRKRISNCVADYSVLYNSASFSTFKCYGVSPTKLNDLCFTNVYADSFVIRGDEVRQIAPGQTGKIADYNYKLPDDFTGCVIAWNSNNLDSKVGGNYNYLYRLFRKSNLKPFERDISTEIYQAGSTPCNGVEGFNCYFPLQSYGFQPTNGVGYQPYRVVVLSFELLHAPATVCGPKKSTNLVKNKCVNFNFNGLTGTGVLTESNKKFLPFQQFGRDIADTTDAVRDPQTLEILDITPCSFGGVSVITPGTNTSNQVAVLYQDVNCTEVPVAIHADQLTPTWRVYSTGSNVFQTRAGCLIGAEHVNNSYECDIPIGAGICASYQTQTNSPRRARSVASQSIIAYTMSLGAENSVAYSNNSIAIPTNFTISVTTEILPVSMTKTSVDCTMYICGDSTECSNLLLQYGSFCTQLNRALTGIAVEQDKNTQEVFAQVKQIYKTPPIKDFGGFNFSQILPDPSKPSKRSFIEDLLFNKVTLADAGFIKQYGDCLGDIAARDLICAQKFNGLTVLPPLLTDEMIAQYCSALLAGTITSGWTFGAGAALQIPFAMQMAYRFNGIGVTQNVLYENQKLIANQFNSAIGKIQDSLSFTASALGKLQDVVNQNAQALNTLVKQLSSNFGAISSVLNDILSRLDKVEAEVQIDRLITGRLQSLQTYVTQQLIRAAEIRASANLAATKMSECVLGQSKRVDFCGKGYHLMSFPQCAPHGVVFLHVTYVPAQEKNFTTAPAICHDGKAHFPREGVFVSNGTHWFVTQRNFYEPQIITTDNTFVSGNCDVVIGIVNNTVYDPLQPELDSFKEELDKYFKNHTSPDVDLGDISGINASVVNIQKEIDRLNEVAKNLNESLIDLQELGKYEQYIKGGGGSDIIKLLNEQVNKEMQSSNLYMSMSSWCYTHSLDGAGLFLFDHAAEEYEHAKKLIIFLNENNVPVQLTSISAPEHKFEGLTQIFQKAYEHEQHISESINNIVDHAIKSKDHATFNFLQWYVAEQHEEEVLFKDILDKIELIGNENHGLYLADQYVKGIAKSRKS

SEQ ID NO: 5587 - protein, 1379 aa, Artificial Sequence; identical to SEQ ID NO: 5567
  SARS-CoV-2/Australia/NSW10/2020__EPI_ISL_413596 spike protein (1-1211)(T874C_S1055C) Ferritin construct

SEQ ID NO: 5588 - protein, 1379 aa, Artificial Sequence
  SARS-CoV-2/Switzerland/1000477797/2020__EPI_ISL_413023 spike protein (1-1211)(T874C_S1055C) Ferritin construct
MFVFLVLLPLVSSQCVNLTTRTQLPPAYTNSFTRGVYYPDKVFRSSVLHSTQDLFLPFFSNVTWFHAIHVSGTNGTKRFDNPVLPFNDGVYFASTEKSNIIRGWIFGTTLDSKTQSLLIVNNATNVVIKVCEFQFCNDPFLGVYYHKNNKSWMESEFRVYSSANNCTFEYVSQPFLMDLEGKQGNFKNLREFVFKNIDGYFNIYSKHTPINLVRDLPQGFSALEPLVDLPIGINITRFQTLLALHRSYLTPGDSSSGWTAGAAAYYVGYLQPRTFLLKYNENGTITDAVDCALDPLSETKCTLKSFTVEKGIYQTSNFRVQPTESIVRFPNITNLCPFGEVFNATRFASVYAWNRKRISNCVADYSVLYNSASFSTFKCYGVSPTKLNDLCFTNVYADSFVIRGDEVRQIAPGQTGKIADYNYKLPDDFTGCVIAWNSNNLDSKVGGNYNYLYRLFRKSNLKPFERDISTEIYQAGSTPCNGVEGFNCYFPLQSYGFQPTNGVGYQPYRVVVLSFELLHAPATVCGPKKSTNLVKNKCVNFNFNGLTGTGVLTESNKKFLPFQQFGRDIADTTDAVRDPQTLEILDITPCSFGGVSVITPGTNTSNQVAVLYQGVNCTEVPVAIHADQLTPTWRVYSTGSNVFQTRAGCLIGAEHVNNSYECDIPIGAGICASYQTQTNSPRRARSVASQSIIAYTMSLGAENSVAYSNNSIAIPTNFTISVTTEILPVSMTKTSVDCTMYICGDSTECSNLLLQYGSFCTQLNRALTGIAVEQDKNTQEVFAQVKQIYKTPPIKDFGGFNFSQILPDPSKPSKRSFIEDLLFNKVTLADAGFIKQYGDCLGDIAARDLICAQKFNGLTVLPPLLTDEMIAQYCSALLAGTITSGWTFGAGAALQIPFAMQMAYRFNGIGVTQNVLYENQKLIANQFNSAIGKIQDSLSSTASALGKLQDVVNQNAQALNTLVKQLSSNFGAISSVLNDILSRLDKVEAEVQIDRLITGRLQSLQTYVTQQLIRAAEIRASANLAATKMSECVLGQSKRVDFCGKGYHLMSFPQCAPHGVVFLHVTYVPAQEKNFTTAPAICHDGKAHFPREGVFVSNGTHWFVTQRNFYEPQIITTDNTFVSGNCDVVIGIVNNTVYDPLQPELDSFKEELDKYFKNHTSPDVDLGDISGINASVVNIQKEIDRLNEVAKNLNESLIDLQELGKYEQYIKGGGGSDIIKLLNEQVNKEMQSSNLYMSMSSWCYTHSLDGAGLFLFDHAAEEYEHAKKLIIFLNENNVPVQLTSISAPEHKFEGLTQIFQKAYEHEQHISESINNIVDHAIKSKDHATFNFLQWYVAEQHEEEVLFKDILDKIELIGNENHGLYLADQYVKGIAKSRKS

SEQ ID NO: 5589 - protein, 1379 aa, Artificial Sequence
  SARS-CoV-2/Belgium/BA-02291/2020__EPI_ISL_415159 spike protein (1-1211)(T874C_S1055C) Ferritin construct
MFVFLVLLPLVSSQCVNLTTRTQLPPAYTNSFTRGVYYPDKVFRSSVLHSTQDLFLPFFSNVTWFHAIHVSGTNGTKRFDNPVLPFNDGVYFASTEKSNIIRGWIFGTTLDSKTQSLLIVNNATNVVIKVCEFQFCNDPFLGVYYHKNNKSWMESEFRVYSSANNCTFEYVSQPFLMDLEGKQGNFKNLREFVFKNIDGYFKIYSKHTPINLVRDLPQGFSALEPLVDLPIGINITRFQTLLALHRSYLTPGDSSSGWTAGAAAYYVGYLQPRTFLLKYNENGTITDAVDCALDPLSETKCTLKSFTVEKGIYQTSNFRVQPTESIVRFPNITNLCPFGEVFNATRFASVYAWNRKRISNCVADYSVLYNSASFSTFKCYGVSPTKLNDLCFTNVYADSFVIRGDEVRQIAPGQTGKIADYNYKLPDDFTGCVIAWNSNNLDSKVGGNYNYLYRLFRRSNLKPFERDISTEIYQAGSTPCNGVEGFNCYFPLQSYGFQPTNGVGYQPYRVVVLSFELLPAPATVCGPKKSTNLVKNKCVNFNFNGLTGTGVLTESNKKFLPFQQFGRDIADTTDAVRDPQTLEILDITPCSFGGVSVITPGTNTSNQVAVLYQGVNCTEVPVAIHADQLTPTWRVYSTGSNVFQTRAGCLIGAEHVNNSYECDIPIGAGICASYQTQTNSPRRARSVASQSIIAYTMSLGAENSVAYSNNSIAIPTNFTISVTTEILPVSMTKTSVDCTMYICGDSTECSNLLLQYGSFCTQLNRALTGIAVEQDKNTQEVFAQVKQIYKTPPIKDFGGFNFSQILPDPSKPSKRSFIEDLLFNKVTLADAGFIKQYGDCLGDIAARDLICAQKFNGLTVLPPLLTDEMIAQYCSALLAGTITSGWTFGAGAALQIPFAMQMAYRFNGIGVTQNVLYENQKLIANQFNSAIGKIQDSLSSAAPALGKLQDVVNQNAQALNTLVKQLSSNFGAISSVLNDILSRLDKVEAEVQIDRLITGRLQSLQTYVTQQLIRAAEIRASANLAATKMSECVLGQSKRVDFCGKGYHLMSFPQCAPHGVVFLHVTYVPAQEKNFTTAPAICHDGKAHFPREGVFVSNGTHWFVTQRNFYEPQIITTDNTFVSGNCDVVIGIVNNTVYDPLQPELDSFKEELDKYFKNHTSPDVDLGDISGINASVVNIQKEIDRLNEVAKNLNESLIDLQELGKYEQYIKGGGGSDIIKLLNEQVNKEMQSSNLYMSMSSWCYTHSLDGAGLFLFDHAAEEYEHAKKLIIFLNENNVPVQLTSISAPEHKFEGLTQIFQKAYEHEQHISESINNIVDHAIKSKDHATFNFLQWYVAEQHEEEVLFKDILDKIELIGNENHGLYLADQYVKGIAKSRKS

SEQ ID NO: 5590 - protein, 1379 aa, Artificial Sequence
  SARS-CoV-2/USA/WA8-UW5/2020__EPI_ISL_413486 spike protein (1-1211)(T874C_S1055C) Ferritin construct
MFVFLVLLPLVSSQCVNLTTRTQLPPAYTNSFTRGVYYPDKVFRSSVLHSTQDLFLPFFSNVTWFHAIHVSGTNGTKRFDNPVLPFNDGVYFASTEKSNIIRGWIFGTTLDSKTQSLLIVNNATNVVIKVCEFQFCNDPFLGVYYHKNNKSWMESEFRVYSSANNCTFEYVSQPFLMDLEGKQGNFKNLREFVFKNIDGYFKIYSKHTPINLVRDLPQGFSALEPLVDLPIGINITRFQTLLALHRSYLTPGDSSSGWTAGAAAYYVGYLQPRTFLLKYNENGTITDAVDCALDPLSETKCTLKSFTVEKGIYQTSNFRVQPTESIVRFPNITNLCPFGEVFNATRFASVYAWNRKRISNCVADYSVLYNSASFSTFKCYGVSPTKLNDLCFTNVYADSFVIRGDEVRQIAPGQTGKIADYNYKLPDDFTGCVIAWNSNNLDSKVGGNYNYLYRLFRKSNLKPFERDISTEIYQAGSTPCNGVEGFNCYFPLQSYGFQPTNGVGYQPYRVVVLSFELLHAPATVCGPKKSTNLVKNKCVNFNFNGLTGTGVLTESNKKFLPFQQFGRDIADTTDAVRDPQTLEILDITPCSFGGVSVITPGTNTSNQVAVLYQDVNCTEVPVAIHADQLTPTWRVYSTGSNVFQTRAGCLIGAEYVNNSYECDIPIGAGICASYQTQTNSPRRARSVASQSIIAYTMSLGAENSVAYSNNSIAIPTNFTISVTTEILPVSMTKTSVDCTMYICGDSTECSNLLLQYGSFCTQLNRALTGIAVEQDKNTQEVFAQVKQIYKTPPIKDFGGFNFSQILPDPSKPSKRSFIEDLLFNKVTLADAGFIKQYGDCLGDIAARDLICAQKFNGLTVLPPLLTDEMIAQYCSALLAGTITSGWTFGAGAALQIPFAMQMAYRFNGIGVTQNVLYENQKLIANQFNSAIGKIQDSLSSTASALGKLQDVVNQNAQALNTLVKQLSSNFGAISSVLNDILSRLDKVEAEVQIDRLITGRLQSLQTYVTQQLIRAAEIRASANLAATKMSECVLGQSKRVDFCGKGYHLMSFPQCAPHGVVFLHVTYVPAQEKNFTTAPAICHDGKAHFPREGVFVSNGTHWFVTQRNFYEPQIITTDNTFVSGNCDVVIGIVNNTVYDPLQPELDSFKEELDKYFKNHTSPDVDLGDISGINASVVNIQKEIDRLNEVAKNLNESLIDLQELGKYEQYIKGGGGSDIIKLLNEQVNKEMQSSNLYMSMSSWCYTHSLDGAGLFLFDHAAEEYEHAKKLIIFLNENNVPVQLTSISAPEHKFEGLTQIFQKAYEHEQHISESINNIVDHAIKSKDHATFNFLQWYVAEQHEEEVLFKDILDKIELIGNENHGLYLADQYVKGIAKSRKS

SEQ ID NO: 5591 - protein, 1379 aa, Artificial Sequence
  SARS-CoV-2/England/20102000506/2020__EPI_ISL_415147 spike protein (1-1211)(T874C_S1055C) Ferritin construct
MFVFLVLLPLVSSQCVNLTTRTQLPPAYTNSFTRGVYYPDKVFRSSVLHSTQDLFLPFFSNVTWFHAIHVSGTNGTKRFDNPVLPFNDGVYFASTEKSNIIRGWIFGTTLDSKTQSLLIVNNATNVVIKVCEFQFCNDPFLGVYYHKNNKSWMESEFRVYSSANNCTFEYVSQPFLMDLEGKQGNFKNLREFVFKNIDGYFKIYSKHTPINLVRDLPQGFSALEPLVDLPIGINITRFQTLLALHRSYLTPGDSSSGWTAGAAAYYVGYLQPRTFLLKYNENGTITDAVDCALDPLSETKCTLKSFTVEKGIYQTSNFRVQPTESIVRFPNITNLCPFGEVFNATRFASVYAWNRKRISNCVADYSVLYNSASFSTFKCYGVSPTKLNDLCFTNVYADSFVIRGDEVRQIAPGQTGKIADYNYKLPDDFTGCVIAWNSNNLDSKVGGNYNYLYRLFRKSNLKPFERDISTEIYQAGSTPCNGVEGFNCYFPLQSYGFQPTNGVGYQPYRVVVLSFELLHAPATVCGPKKSTNLVKNKCVNFNFNGLTGTGVLTESNKKFLPFQQFGRDIADTTDAVRDPQTLEILDITPCSFGGVSVITPGTNTSNQVAVLYQGVNCTEVPVAIHADQLTPTWRVYSTGSNVFQTRAGCLIGAEHVNNSYECDIPIGAGICASYQTQTNSPRRARSVASQSIIAYTMSLGAENSVAYSNNSIAIPTNFTISVTTEILPVSMTKTSVDCTMYICGDSTECSNLLLQYGSFCTQLNRALTGIAVEQDKNTQEVFAQVKQIYKTPPIKDFGGFNFSQILPDPSKPSKRSFIEDLLFNKVTLADAGFIKQYGYCLGDIAARDLICAQKFNGLTVLPPLLTDEMIAQYCSALLAGTITSGWTFGAGAALQIPFAMQMAYRFNGIGVTQNVLYENQKLIANQFNSAIGKIQDSLSSTASALGKLQDVVNQNAQALNTLVKQLSSNFGAISSVLNDILSRLDKVEAEVQIDRLITGRLQSLQTYVTQQLIRAAEIRASANLAATKMSECVLGQSKRVDFCGKGYHLMSFPQCAPHGVVFLHVTYVPAQEKNFTTAPAICHDGKAHFPREGVFVSNGTHWFVTQRNFYEPQIITTDNTFVSGNCDVVIGIVNNTVYDPLQPELDSFKEELDKYFKNHTSPDVDLGDISGINASVVNIQKEIDRLNEVAKNLNESLIDLQELGKYEQYIKGGGGSDIIKLLNEQVNKEMQSSNLYMSMSSWCYTHSLDGAGLFLFDHAAEEYEHAKKLIIFLNENNVPVQLTSISAPEHKFEGLTQIFQKAYEHEQHISESINNIVDHAIKSKDHATFNFLQWYVAEQHEEEVLFKDILDKIELIGNENHGLYLADQYVKGIAKSRKS

SEQ ID NO: 5592 - protein, 1379 aa, Artificial Sequence
  SARS-CoV-2/Belgium/VAG-03013/2020__EPI_ISL_415155 spike protein (1-1211)(T874C_S1055C) Ferritin construct
MFVFLVLLPLVSSQCVNLTTRTQLPPAYTNSFTRGVYYPDKVFRSSVLHSTQDLFLPFFSNVTWFHAIHVSGTNGTKRFDNPVLPFNDGVYFASTEKSNIIRGWIFGTTLDSKTQSLLIVNNATNVVIKVCEFQFCNDPFLGVYYHKNNKSWMESEFRVYSSANNCTFEYVSQPFLMDLEGKQGNFKNLREFVFKNIDGYFKIYSKHTPINLVRDLPQGFSALEPLVDLPIGINITRFQTLLALHRSYLTPGDSSSGWTAGAAAYYVGYLQPRTFLLKYNENGTITDAVDCALDPLSETKCTLKSFTVEKGIYQTSNFRVQPTESIVRFPNITNLCPFGEVFNATRFASVYAWNRKRISNCVADYSVLYNSASFSTFKCYGVSPTKLNDLCFTNVYADSFVIRGDEVRQIAPGQTGKIADYNYKLPDDFTGCVIAWNSNNLDSKVGGNYNYLYRLFRKSNLKPFERDISTEIYQAGSTPCNGVEGFNCYFPLQSYGFQPTNGVGYQPYRVVVLSFELLHAPATVCGPKKSTNLVKNKCVNFNFNGLTGTGVLTESNKKFLPFQQFGRDIADTTDAVRDPQTLEILDITPCSFGGVSVITPGTNTSNQVAVLYQGVNCTEVPVAIHADQLTPTWRVYSTGSNVFQTRAGCLIGAEHVNNSYECDIPIGAGICASYQTQTNSPRRARSVASQSIIAYTMSLGAENSVAYSNNSIAIPTNFTISVTTEILPVSMTKTSVDCTMYICGDSTECSNLLLQYGSFCTQLNRALTGIAVEQDKNTQEVFAQVKQIYKTPPIKDFGGFNFSQILPDPSKPSKRSFIEDLLFNKVTLADAGFIKQYGDCLGDIAARDLICAQKFNGLTVLPPLLTDEMIAQYCSALLAGTITSGWTFGAGAALQIPFAMQMAYRFNGIGVTQNVLYENQKLIANQFNSAIGKIQDSLSSTATALGKLQDVVNQNAQALNTLVKQLSSNFGAISSVLNDILSRLDKVEAEVQIDRLITGRLQSLQTYVTQQLIRAAEIRASANLAATKMSECVLGQSKRVDFCGKGYHLMSFPQCAPHGVVFLHVTYVPAQEKNFTTAPAICHDGKAHFPREGVFVSNGTHWFVTQRNFYEPQIITTDNTFVSGNCDVVIGIVNNTVYDPLQPELDSFKEELDKYFKNHTSPDVDLGDISGINASVVNIQKEIDRLNEVAKNLNESLIDLQELGKYEQYIKGGGGSDIIKLLNEQVNKEMQSSNLYMSMSSWCYTHSLDGAGLFLFDHAAEEYEHAKKLIIFLNENNVPVQLTSISAPEHKFEGLTQIFQKAYEHEQHISESINNIVDHAIKSKDHATFNFLQWYVAEQHEEEVLFKDILDKIELIGNENHGLYLADQYVKGIAKSRKS

SEQ ID NO: 5593 - protein, 1379 aa, Artificial Sequence
  SARS-CoV-2/Belgium/BC-03016/2020__EPI_ISL_415157 spike protein (1-1211)(T874C_S1055C) Ferritin construct
MFVFLVLLPLVSSQCVNLTTRTQLPPAYTNSFTRGVYYPDKVFRSSVLHSTQDLFLPFFSNVTWFHAIHVSGTNGTKRFDNPVLPFNDGVYFASTEKSNIIRGWIFGTTLDSKTQSLLIVNNATNVVIKVCEFQFCNDPFLGVYYHKNNKSWMESEFRVYSSANNCTFEYVSQPFLMDLEGKQGNFKNLREFVFKNIDGYFKIYSKHTPINLVRDLPQGFSALEPLVDLPIGINITRFQTLLALHRSYLTPGDSSSGWTAGAAAYYVGYLQPRTFLLKYNENGTITDAVDCALDPLSETKCTLKSFTVEKGIYQTSNFRVQPTESIVRFPNITNLCPFGEVFNATRFASVYAWNRKRISNCVADYSVLYNSASFSTFKCYGVSPTKLNDLCFTNVYADSFVIRGDEVRQIAPGQTGKIADYNYKLPDDFTGCVIAWNSNNLDSKVGGNYNYLYRLFRKSNLKPFERDISTEIYQAGSTPCNGVEGFNCYFPLQSYGFQPTNGVGYQPYRVVVLSFELLHAPATVCGPKKSTNLVKNKCVNFNFNGLTGTGVLTESNKKFLPFQQFGRDIADTTDAVRDPQTLEILDITPCSFGGVSVITPGTNTSNQVAVLYQGVNCTEVPVAIHADQLTPTWRVYSTGSNVFQTRAGCLIGAEHVNNSYECDIPIGAGICASYQTQTNSPRRARSVASQSIIAYTMSLGAENSVAYSNNSIAIPTNFTISVTTEILPVSMTKTSVDCTMYICGDSTECSNLLLQYGSFCTQLNRALTGIAVEQDKNTQEVFAQVKQIYKTPPIKDFGGFNFSQILPDPSKPSKRSFIEDLLFNKVTLADAGFIKQYGDCLGDIAARDLICAQKFNGLTVLPPLLTDEMIAQYCSALLAGTITSGWTFGAGAALQIPFAMQMAYRFNGIGVTQNVLYENQKLIANQFNSAIGKIQDSLSSTAPALGKLQDVVNQNAQALNTLVKQLSSNFGAISSVLNDILSRLDKVEAEVQIDRLITGRLQSLQTYVTQQLIRAAEIRASANLAATKMSECVLGQSKRVDFCGKGYHLMSFPQCAPHGVVFLHVTYVPAQEKNFTTAPAICHDGKAHFPREGVFVSNGTHWFVTQRNFYEPQIITTDNTFVSGNCDVVIGIVNNTVYDPLQPELDSFKEELDKYFKNHTSPDVDLGDISGINASVVNIQKEIDRLNEVAKNLNESLIDLQELGKYEQYIKGGGGSDIIKLLNEQVNKEMQSSNLYMSMSSWCYTHSLDGAGLFLFDHAAEEYEHAKKLIIFLNENNVPVQLTSISAPEHKFEGLTQIFQKAYEHEQHISESINNIVDHAIKSKDHATFNFLQWYVAEQHEEEVLFKDILDKIELIGNENHGLYLADQYVKGIAKSRKS

SEQ ID NO: 5594 - protein, 1379 aa, Artificial Sequence
  SARS-CoV-2/Germany/BavPat3/2020__EPI_ISL_414521 spike protein (1-1211)(T874C_S1055C) Ferritin construct
MFVFLVLLPLVSSQCVNLTTRTQLPPAYTNSFTRGVYYPDKVFRSSVLHSTQDLFLPFFSNVTWFHAIHVSGTNGTKRFDNPVLPFNDGVYFASTEKSNIIRGWIFGTTLDSKTQSLLIVNNATNVVIKVCEFQFCNDPFLGVYYHKNNKSWMESEFRVYSSANNCTFEYVSQPFLMDLEGKQGNFKNLREFVFKNIDGYFKIYSKHTPINLVRDLPQGFSALEPLVDLPIGINITRFQTLLALHRSYLTPGDSSSGWTAGAAAYYVGYLQPRTFLLKYNENGTITDAVDCALDPLSETKCTLKSFTVEKGIYQTSNFRVQPTESIVRFPNITNLCPFGEVFNATRFASVYAWNRKRISNCVADYSVLYNSASFSTFKCYGVSPTKLNDLCFTNVYADSFVIRGDEVRQIAPGQTGKIADYNYKLPDDFTGCVIAWNSNNLDSKVGGNYNYLYRLFRKSNLKPFERDISTEIYQAGSTPCNGVEGFNCYFPLQSYGFQPTNGVGYQPYRVVVLSFELLHAPATVCGPKKSTNLVKNKCVNFNFNGLTGTGVLTESNKKFLPFQQFGRDIADTTDAVRDPQTLEILDITPCSFGGVSVITPGTNTSNQVAVLYQDVNCTEVPVAIHADQLTPTWRVYSTGSNVFQTRAGCLIGAEHVNNSYECDIPIGAGICASYQTQTNSPRRARSVASQSIIAYTMSLGAENSVAYSNNSIAIPTNFTISVTTEILPVSMTKTSVDCTMYICGDSTECSNLLLQYGSFCTQLNRALTGIAVEQDKNTQQVFAQVKQIYKTPPIKDFGGFNFSQILPDPSKPSKRSFIEDLLFNKVTLADAGFIKQYGDCLGDIAARDLICAQKFNGLTVLPPLLTDEMIAQYCSALLAGTITSGWTFGAGAALQIPFAMQMAYRFNGIGVTQNVLYENQKLIANQFNSAIGKIQDSLSSTASALGKLQDVVNQNAQALNTLVKQLSSNFGAISSVLNDILSRLDKVEAEVQIDRLITGRLQSLQTYVTQQLIRAAEIRASANLAATKMSECVLGQSKRVDFCGKGYHLMSFPQCAPHGVVFLHVTYVPAQEKNFTTAPAICHDGKAHFPREGVFVSNGTHWFVTQRNFYEPQIITTDNTFVSGNCDVVIGIVNNTVYDPLQPELDSFKEELDKYFKNHTSPDVDLGDISGINASVVNIQKEIDRLNEVAKNLNESLIDLQELGKYEQYIKGGGGSDIIKLLNEQVNKEMQSSNLYMSMSSWCYTHSLDGAGLFLFDHAAEEYEHAKKLIIFLNENNVPVQLTSISAPEHKFEGLTQIFQKAYEHEQHISESINNIVDHAIKSKDHATFNFLQWYVAEQHEEEVLFKDILDKIELIGNENHGLYLADQYVKGIAKSRKS

SEQ ID NO: 5595 - protein, 1379 aa, Artificial Sequence
  SARS-CoV-2/France/HF1805/2020__EPI_ISL_414628 spike protein (1-1211)(T874C_S1055C) Ferritin construct
MFVFLVLLPLVSSQCVNLTTRTQLPPAYTNSFTRGVYYPDKVFRSSVLHSTQDLFLPFFSNVTWFHAIHVSGTNGTKRFDNPVLPFNDGVYFASTEKSNIIRGWIFGTTLDSKTQSLLIVNNATNVVIKVCEFQFCNDPFLGVYYHKNNKSWMESEFRVYSSANNCTFEYVSQPFLMDLEGKQGNFKNLREFVFKNIDGYFKIYSKHTPINLVRDLPQGFSALEPLVDLPIGINITRFQTLLALHRSYLTPGDSSSGWTAGAAAYYVGYLQPRTFLLKYNENGTITDAVDCALDPLSETKCTLKSFTVEKGIYQTSNFRVQPTESIVRFPNITNLCPFGEVFNATRFASVYAWNRKRISNCVADYSVLYNSASFSTFKCYGVSPTKLNDLCFTNVYADSFVIRGDEVRQIAPGQTGKIADYNYKLPDDFTGCVIAWNSNNLDSKVGGNYNYLYRLFRKSNLKPFERDISTEIYQAGSTPCNGVEGFNCYFPLQSYGFQPTNGVGYQPYRVVVLSFELLHAPATVCGPKKSTNLVKNKCVNFNFNGLTGTGVLTESNKKFLPFQQFGRDIADTTDAVRDPQTLEILDITPCSFGGVSVITPGTNTSNQVAVLYQGVNCTEVPVAIHADQLTPTWRVYSTGSNVFQTRAGCLIGAEHVNNSYECDIPIGAGICASYQTQTNSPRRARSVASQSIIAYTMSLGAENSVAYSNNSIAIPTNFTISVTTEILPVSMTKTSVDCTMYICGDSTECSNLLLQYGSFCTQLNRALTGIAVEQDKNTQEVFAQVKQIYKTPPIKDFGGFNFSQILPDPSKPSKRSFIEDLLFNKVTLADAGFIKQYGDCLGDIAARDLICAQKFNGLTVLPPLLTDEMIAQYCSALLAGTITSGWTFGAGAALQIPFAMQMAYRFNGIGVTQNVLYENQKLIANQFNSAIGKIQDSLSSTASALGKLQDVVNQNAQALNTLVKQLSSNFGAISSVLNDILSRLDKVEAEVQIDRLITGRLQSLQTYVTQQLIRAAEIRASANLAATKMSECVLGQSKRVDFCGKGYHLMSFPQCAPHGVVFLHVTYVPAQEKNFTTAPAICHDGKAHFPREGVFVSNGTHWFVTQRNFYEPQIITTDNTFVSGNCDVVIGVVNNTVYDPLQPELDSFKEELDKYFKNHTSPDVDLGDISGINASVVNIQKEIDRLNEVAKNLNESLIDLQELGKYEQYIKGGGGSDIIKLLNEQVNKEMQSSNLYMSMSSWCYTHSLDGAGLFLFDHAAEEYEHAKKLIIFLNENNVPVQLTSISAPEHKFEGLTQIFQKAYEHEQHISESINNIVDHAIKSKDHATFNFLQWYVAEQHEEEVLFKDILDKIELIGNENHGLYLADQYVKGIAKSRKS

SEQ ID NO: 5596 - protein, 1379 aa, Artificial Sequence
  SARS-CoV-2/Netherlands/ZuidHolland_9/2020__EPI_ISL_414445 spike protein (1-1211)(T874C_S1055C) Ferritin construct
MFVFLVLLPLVSSQCVNLTTRTQLPPAYTNSFTRGVYYPDKVFRSSVLHSTQDLFLPFFSNVTWFHAIHVSGTNGTKRFDNPVLPFNDGVYFASTEKSNIIRGWIFGTTLDSKTQSLLIVNNATNVVIKVCEFQFCNDPFLGVYYHKNNKSWMESEFRVYSSANNCTFEYVSQPFLMDLEGKQGNFKNLREFVFKNIDGYFKIYSKHTPINLVRDLPQGFSALEPLVDLPIGINITRFQTLLALHRSYLTPGDSSSGWTAGAAAYYVGYLQPRTFLLKYNENGTITDAVDCALDPLSETKCTLKSFTVEKGIYQTSNFRVQPTESIVRFPNITNLCPFGEVFNATRFASVYAWNRKRISNCVADYSVLYNSASFSTFKCYGVSPTKLNDLCFTNVYADSFVIRGDEVRQIAPGQTGKIADYNYKLPDDFTGCVIAWNSNNLDSKVGGNYNYLYRLFRKSNLKPFERDISTEIYQAGSTPCNGVEGFNCYFPLQSYGFQPTNGVGYQPYRVVVLSFELLHAPATVCGPKKSTNLVKNKCVNFNFNGLTGTGVLTESNKKFLPFQQFGRDIADTTDAVRDPQTLEILDITPCSFGGVSVITPGTNTSNQVAVLYQGVNCTEVPVAIHADQLTPTWRVYSTGSNVFQTRAGCLIGAEHVNNSYECDIPIGAGICASYQTQTNSPRRARSVASQSIIAYTMSLGAENSVAYSNNSIAIPTNFTISVTTEILPVSMTKTSVDCTMYICGDSTECSNLLLQYGSFCTQLNRALTGIAVEQDKNTQEVFAQVKQIYKTPPIKDFGGFNFSQILPDPSKPSKRSFIEDLLFNKVTLADAGFIKQYGDCLGDIAARDLICVQKFNGLTVLPPLLTDEMIAQYCSALLAGTITSGWTFGAGAALQIPFAMQMAYRFNGIGVTQNVLYENQKLIANQFNSAIGKIQDSLSSTASALGKLQDVVNQNAQALNTLVKQLSSNFGAISSVLNDILSRLDKVEAEVQIDRLITGRLQSLQTYVTQQLIRAAEIRASANLAATKMSECVLGQSKRVDFCGKGYHLMSFPQCAPHGVVFLHVTYVPAQEKNFTTAPAICHDGKAHFPREGVFVSNGTHWFVTQRNFYEPQIITTDNTFVSGNCDVVIGIVNNTVYDPLQPELDSFKEELDKYFKNHTSPDVDLGDISGINASVVNIQKEIDRLNEVAKNLNESLIDLQELGKYEQYIKGGGGSDIIKLLNEQVNKEMQSSNLYMSMSSWCYTHSLDGAGLFLFDHAAEEYEHAKKLIIFLNENNVPVQLTSISAPEHKFEGLTQIFQKAYEHEQHISESINNIVDHAIKSKDHATFNFLQWYVAEQHEEEVLFKDILDKIELIGNENHGLYLADQYVKGIAKSRKS

SEQ ID NO: 5597 - protein, 1379 aa, Artificial Sequence
  SARS-CoV-2/Finland/FIN03032020A/2020__EPI_ISL_413602 spike protein (1-1211)(T874C_S1055C) Ferritin construct
MFVFLVLLPLVSSQCVNLTTRTQLPPAYTNSFTRGVYYPDKVFRSSVLHSTQDLFLPFFSNVTWFHAIHVSGTNGTKRFDNPVLPFNDGVYFASTEKSNIIRGWIFGTTLDSKTQSLLIVNNATNVVIKVCEFQFCNDPFLGVYYHKNNKSWMESEFRVYSSANNCTFEYVSQPFLMDLEGKQGNFKNLREFVFKNIDGYFKIYSKHTPINLVRDLPQGFSALEPLVDLPIGINITRFQTLLALHRSYLTPGDSSSGWTAGAAAYYVGYLQPRTFLLKYNENGTITDAVDCALDPLSETKCTLKSFTVEKGIYQTSNFRVQPTESIVRFPNITNLCPFGEVFNATRFASVYAWNRKRISNCVADYSVLYNSASFSTFKCYGVSPTKLNDLCFTNVYADSFVIRGDEVRQIAPGQTGKIADYNYKLPDDFTGCVISWNSNNLDSKVGGNYNYLYRLFRKSNLKPFERDISTEIYQAGSTPCNGVEGFNCYFPLQSYGFQPTNGVGYQPYRVVVLSFELLHAPATVCGPKKSTNLVKNKCVNFNFNGLTGTGVLTESNKKFLPFQQFGRDIADTTDAVRDPQTLEILDITPCSFGGVSVITPGTNTSNQVAVLYQGVNCTEVPVAIHADQLTPTWRVYSTGSNVFQTRAGCLIGAEHVNNSYECDIPIGAGICASYQTQTNSPRRARSVASQSIIAYTMSLGAENSVAYSNNSIAIPTNFTISVTTEILPVSMTKTSVDCTMYICGDSTECSNLLLQYGSFCTQLNRALTGIAVEQDKNTQEVFAQVKQIYKTPPIKDFGGFNFSQILPDPSKPSKRSFIEDLLFNKVTLADAGFIKQYGDCLGDIAARDLICAQKFNGLTVLPPLLTDEMIAQYCSALLAGTITSGWTFGAGAALQIPFAMQMAYRFNGIGVTQNVLYENQKLIANQFNSAIGKIQDSLSSTASALGKLQDVVNQNAQALNTLVKQLSSNFGAISSVLNDILSRLDKVEAEVQIDRLITGRLQSLQTYVTQQLIRAAEIRASANLAATKMSECVLGQSKRVDFCGKGYHLMSFPQCAPHGVVFLHVTYVPAQEKNFTTAPAICHDGKAHFPREGVFVSNGTHWFVTQRNFYEPQIITTDNTFVSGNCDVVIGIVNNTVYDPLQPELDSFKEELDKYFKNHTSPDVDLGDISGINASVVNIQKEIDRLNEVAKNLNESLIDLQELGKYEQYIKGGGGSDIIKLLNEQVNKEMQSSNLYMSMSSWCYTHSLDGAGLFLFDHAAEEYEHAKKLIIFLNENNVPVQLTSISAPEHKFEGLTQIFQKAYEHEQHISESINNIVDHAIKSKDHATFNFLQWYVAEQHEEEVLFKDILDKIELIGNENHGLYLADQYVKGIAKSRKS

SEQ ID NO: 5598 - protein, 1379 aa, Artificial Sequence
  SARS-CoV-2/France/GE1977/2020__EPI_ISL_414632 spike protein (1-1211)(T874C_S1055C) Ferritin construct
MFVFLVLLPLVSSQCVNLTTRTQLPPAYTNSFTRGVYYPDKVFRSSVLHSTQDLFLPFFSNVTWFHAIHVSGTNGTKRFDNPVLPFNDGVYFASTEKSNIIRGWIFGTTLDSKTQSLLIVNNATNVVIKVCEFQFCNDPFLGVYYHKNNKSWMESEFRVYSSANNCTFEYVSQPFLMDLEGKQGNFKNLREFVFKNIDGYFKIYSKHTPINLVRDLPQGFSALEPLVDLPIGINITRFQTLLALHRSYLTPGDSSSGWTAGAAAYYVGYLQPRTFLLKYNENGTITDAVDCALDPLSETKCTLKSFTVEKGIYQTSNFRVQPTESIVRFPNITNLCPFGEVFNATRFASVYAWNRKRISNCVADYSVLYNSASFSTFKCYGVSPTKLNDLCFTNVYADSFVIRGDEVRQIAPGQTGKIADYNYKLPDDFTGCVIAWNSNNLDSKVGGNYNYLYRLFRKSNLKPFERDISTEIYQAGSTPCNGVEGFNCYFPLQSYGFQPTNGVGYQPYRVVVLSFELLHAPATVCGPKKSTNLVKNKCVNFNFNGLTGTGVLTESNKKFLPFQQFGRDIADTTDAVRDPQTLEILDITPCSFGGVSVITPGTNTSNQVAVLYQGVNCTEVPVAIHADQLTPTWRVYSTGSNVFQTRAGCLIGAEHVNNSYECDIPIGAGICASYQTQTNSPRRARSVASQSIIAYTMSLGAENSVAYSNNSIAIPTNFTISVTTEILPVSMTKTSVDCTMYICGDSTECSNLLLQYGSFCTQLNRALTGIAVEQDKNTQEVFAQVKQIYKTPPIKDFGGFNFSQILPDPSKPSKRSFIEDLLFNKVTLADAGFIKQYGDCLGDIAARDLICAQKFNGLTVLPPLLTDEMIAQYCSALLAGTITSGWTFGAGAALQIPFAMQMAYRFNGIGVTQNVLYENQKLIANQFNSAIGKIQDSLFSTASALGKLQDVVNQNAQALNTLVKQLSSNFGAISSVLNDILSRLDKVEAEVQIDRLITGRLQSLQTYVTQQLIRAAEIRASANLAATKMSECVLGQSKRVDFCGKGYHLMSFPQCAPHGVVFLHVTYVPAQEKNFTTAPAICHDGKAHFPREGVFVSNGTHWFVTQRNFYEPQIITTDNTFVSGNCDVVIGIVNNTVYDPLQPELDSFKEELDKYFKNHTSPDVDLGDISGINASVVNIQKEIDRLNEVAKNLNESLIDLQELGKYEQYIKGGGGSDIIKLLNEQVNKEMQSSNLYMSMSSWCYTHSLDGAGLFLFDHAAEEYEHAKKLIIFLNENNVPVQLTSISAPEHKFEGLTQIFQKAYEHEQHISESINNIVDHAIKSKDHATFNFLQWYVAEQHEEEVLFKDILDKIELIGNENHGLYLADQYVKGIAKSRKS

SEQ ID NO: 5599 - protein, 1379 aa, Artificial Sequence
  SARS-CoV-2/Finland/FIN-313/2020__EPI_ISL_414641 spike protein (1-1211)(T874C_S1055C) Ferritin construct
MFVFLVLLPLVSSQCVNLTTRTQLPPAYTNSFTRGVYYPDKVFRSSVLHSTQDLFLPFFSNVTWFHAIHVSGTNGTKRFDNPVLPFNDGVYFASTEKSNIIRGWIFGTTLDSKTQSLLIVNNATNVVIKVCEFQFCNDPFLGVYYHKNNKSWMESEFRVYSSANNCTFEYVSQPFLMDLEGKQGNFKNLREFVFKNIDGYFKIYSKHTPINLVRDLPQGFSALEPLVDLPIGINITRFKTLLALHRSYLTPGDSSSGWTAGAAAYYVGYLQPRTFLLKYNENGTITDAVDCALDPLSETKCTLKSFTVEKGIYQTSNFRVQPTESIVRFPNITNLCPFGEVFNATRFASVYAWNRKRISNCVADYSVLYNSASFSTFKCYGVSPTKLNDLCFTNVYADSFVIRGDEVRQIAPGQTGKIADYNYKLPDDFTGCVIAWNSNNLDSKVGGNYNYLYRLFRKSNLKPFERDISTEIYQAGSTPCNGVEGFNCYFPLQSYGFQPTNGVGYQPYRVVVLSFELLHAPATVCGPKKSTNLVKNKCVNFNFNGLTGTGVLTESNKKFLPFQQFGRDIADTTDAVRDPQTLEILDITPCSFGGVSVITPGTNTSNQVAVLYQGVNCTEVPVAIHADQLTPTWRVYSTGSNVFQTRAGCLIGAEHVNNSYECDIPIGAGICASYQTQTNSPRRARSVASQSIIAYTMSLGAENSVAYSNNSIAIPTNFTISVTTEILPVSMTKTSVDCTMYICGDSTECSNLLLQYGSFCTQLNRALTGIAVEQDKNTQEVFAQVKQIYKTPPIKDFGGFNFSQILPDPSKPSKRSFIEDLLFNKVTLADAGFIKQYGDCLGDIAARDLICAQKFNGLTVLPPLLTDEMIAQYCSALLAGTITSGWTFGAGAALQIPFAMQMAYRFNGIGVTQNVLYENQKLIANQFNSAIGKIQDSLSSTASALGKLQDVVNQNAQALNTLVKQLSSNFGAISSVLNDILSRLDKVEAEVQIDRLITGRLQSLQTYVTQQLIRAAEIRASANLAATKMSECVLGQSKRVDFCGKGYHLMSFPQCAPHGVVFLHVTYVPAQEKNFTTAPAICHDGKAHFPREGVFVSNGTHWFVTQRNFYEPQIITTDNTFVSGNCDVVIGIVNNTVYDPLQPELDSFKEELDKYFKNHTSPDVDLGDISGINASVVNIQKEIDRLNEVAKNLNESLIDLQELGKYEQYIKGGGGSDIIKLLNEQVNKEMQSSNLYMSMSSWCYTHSLDGAGLFLFDHAAEEYEHAKKLIIFLNENNVPVQLTSISAPEHKFEGLTQIFQKAYEHEQHISESINNIVDHAIKSKDHATFNFLQWYVAEQHEEEVLFKDILDKIELIGNENHGLYLADQYVKGIAKSRKS

SEQ ID NO: 5600 - protein, 1379 aa, Artificial Sequence
  SARS-CoV-2/Netherlands/ZuidHolland_2/2020__EPI_ISL_414556 spike protein (1-1211)(T874C_S1055C) Ferritin construct
MFVFLVLLPLVSSQCVNLTTRTQLPPAYTNSFTRGVYYPDKVFRSSVLHSTQDLFLPFFSNVTWFHAIHVSGTNGTKRFDNPVLPFNDGVYFASTEKSNIIRGWIFGTTLDSKTQSLLIVNNATNVVIKVCEFQFCNDPFLGVYYHKNNKSWMESEFRVYSSANNCTFEYVSQPFLMDLEGKQGNFKNLREFVFKNIDGYFKIYSKHTPINLVRDLPQGFSALEPLVDLPIGINITRFQTLLALHRSYLTPGDSSSGWTAGAAAYYVGYLQPRTFLLKYNENGTITDAVDCALDPLSETKCTLKSFTVEKGIYQTSNFRVQPTESIVRFPNITNLCPFGEVFNATRFASVYAWNRKRISNCVADYSVLYNSASFSTFKCYGVSPTKLNDLCFTNVYADSFVIRGDEVRQIAPGQTGKIADYNYKLPDDFTGCVIAWNSNNLDSKVGGNYNYLYRLFRKSNLKPFERDISTEIYQAGSTPCNGVEGFNCYFPLQSYGFQPTNGVGYQPYRVVVLSFELLHAPATVCGPKKSTNLVKNKCVNFNFNGLTGTGVLTESNKKFLPFQQFGRDIADTTDAVRDPQTLEILDITPCSFGGVSVITPGTNTSNQVAVLYQGVNCTEVPVAIHADQLTPTWRVYSTGSNVFQTRAGCLIGAEHVNNSYECDIPIGAGICASYQTQTNSPRRARSVASQSIIAYTMSLGAENSVAYSNNSIAIPTNFTISVTTEILPVSMTKTSVDCTMYICGDSTECSNLLLQYGSFCTQLNRALTGIALEQDKNTQEVFAQVKQIYKTPPIKDFGGFNFSQILPDPSKPSKRSFIEDLLFNKVTLADAGFIKQYGDCLGDIAARDLICAQKFNGLTVLPPLLTDEMIAQYCSALLAGTITSGWTFGAGAALQIPFAMQMAYRFNGIGVTQNVLYENQKLIANQFNSAIGKIQDSLSSTASALGKLQDVVNQNAQALNTLVKQLSSNFGAISSVLNDILSRLDKVEAEVQIDRLITGRLQSLQTYVTQQLIRAAEIRASANLAATKMSECVLGQSKRVDFCGKGYHLMSFPQCAPHGVVFLHVTYVPAQEKNFTTAPAICHDGKAHFPREGVFVSNGTHWFVTQRNFYEPQIITTDNTFVSGNCDVVIGIVNNTVYDPLQPELDSFKEELDKYFKNHTSPDVDLGDISGINASVVNIQKEIDRLNEVAKNLNESLIDLQELGKYEQYIKGGGGSDIIKLLNEQVNKEMQSSNLYMSMSSWCYTHSLDGAGLFLFDHAAEEYEHAKKLIIFLNENNVPVQLTSISAPEHKFEGLTQIFQKAYEHEQHISESINNIVDHAIKSKDHATFNFLQWYVAEQHEEEVLFKDILDKIELIGNENHGLYLADQYVKGIAKSRKS

SEQ ID NO: 5601 - protein, 1379 aa, Artificial Sequence
  SARS-CoV-2/USA/WA-UW31/2020__EPI_ISL_414618 spike protein (1-1211)(T874C_S1055C) Ferritin construct
MFVFLVLLPLVSSQCVNLTTRTQLPPAYTNSFTRGVYYPDKVFRSSVLHSTQDLFLPFFSNVTWFHAIHVSGTNGTKRFDNPVLPFNDGVYFASTEKSNIIRGWIFGTTLDSKTQSLLIVNNATNVVIKVCEFQFCNDPFLGVYYHKNNKSWMESEFRVYSSANNCTFEYVSQPFLMDLEGKQGNFKNLREFVFKNIDGYFKIYSKHTPINLVRDLPQGFSALEPLVDLPIGINITRFQTLLALHRSYLTPGDSSSGWTAGAAAYYVGYLQPRTFLLKYNENGTITDAVDCALDPLSETKCTLKSFTVEKGIYQTSNFRVQPTESIVRFPNITNLCPFGEVFNATRFASVYAWNRKRISNCVADYSVLYNSASFSTFKCYGVSPTKLNDLCFTNVYADSFVIRGDEVRQIAPGQTGKIADYNYKLPDDFTGCVIAWNSNNLDSKVGGNYNYLYRLFRKSNLKPFERDISTEIYQAGSTPCNGAEGFNCYFPLQSYGFQPTNGVGYQPYRVVVLSFELLHAPATVCGPKKSTNLVKNKCVNFNFNGLTGTGVLTESNKKFLPFQQFGRDIADTTDAVRDPQTLEILDITPCSFGGVSVITPGTNTSNQVAVLYQDVNCTEVPVAIHADQLTPTWRVYSTGSNVFQTRAGCLIGAEHVNNSYECDIPIGAGICASYQTQTNSPRRARSVASQSIIAYTMSLGAENSVAYSNNSIAIPTNFTISVTTEILPVSMTKTSVDCTMYICGDSTECSNLLLQYGSFCTQLNRALTGIAVEQDKNTQEVFAQVKQIYKTPPIKDFGGFNFSQILPDPSKPSKRSFIEDLLFNKVTLADAGFIKQYGDCLGDIAARDLICAQKFNGLTVLPPLLTDEMIAQYCSALLAGTITSGWTFGAGAALQIPFAMQMAYRFNGIGVTQNVLYENQKLIANQFNSAIGKIQDSLSSTASALGKLQDVVNQNAQALNTLVKQLSSNFGAISSVLNDILSRLDKVEAEVQIDRLITGRLQSLQTYVTQQLIRAAEIRASANLAATKMSECVLGQSKRVDFCGKGYHLMSFPQCAPHGVVFLHVTYVPAQEKNFTTAPAICHDGKAHFPREGVFVSNGTHWFVTQRNFYEPQIITTDNTFVSGNCDVVIGIVNNTVYDPLQPELDSFKEELDKYFKNHTSPDVDLGDISGINASVVNIQKEIDRLNEVAKNLNESLIDLQELGKYEQYIKGGGGSDIIKLLNEQVNKEMQSSNLYMSMSSWCYTHSLDGAGLFLFDHAAEEYEHAKKLIIFLNENNVPVQLTSISAPEHKFEGLTQIFQKAYEHEQHISESINNIVDHAIKSKDHATFNFLQWYVAEQHEEEVLFKDILDKIELIGNENHGLYLADQYVKGIAKSRKS

SEQ ID NO: 5602 - protein, 1379 aa, Artificial Sequence
  SARS-CoV-2/South Korea/SNU01/2020__EPI_ISL_411929 spike protein (1-1211)(T874C_S1055C) Ferritin construct
MFVFLVLLPLVSSQCVNLTTRTQLPPAYTNSFTRGVYYPDKVFRSSVLHSTQDLFLPFFSNVTWFHAIHVSGTNGTKRFDNPVLPFNDGVYFASTEKSNIIRGWIFGTTLDSKTQSLLIVNNATNVVIKVCEFQFCNDPFLGVYYHKNNKSWMESEFRVYSSANNCTFEYVSQPFLMDLEGKQGNFKNLREFVFKNIDGYFKIYSKHTPINLVRDLPQGFWALEPLVDLPIGINITRFQTLLALHRSYLTPGDSSSGWTAGAAAYYVGYLQPRTFLLKYNENGTITDAVDCALDPLSETKCTLKSFTVEKGIYQTSNFRVQPTESIVRFPNITNLCPFGEVFNATRFASVYAWNRKRISNCVADYSVLYNSASFSTFKCYGVSPTKLNDLCFTNVYADSFVIRGDEVRQIAPGQTGKIADYNYKLPDDFTGCVIAWNSNNLDSKVGGNYNYLYRLFRKSNLKPFERDISTEIYQAGSTPCNGVEGFNCYFPLQSYGFQPTNGVGYQPYRVVVLSFELLHAPATVCGPKKSTNLVKNKCVNFNFNGLTGTGVLTESNKKFLPFQQFGRDIADTTDAVRDPQTLEILDITPCSFGGVSVITPGTNTSNQVAVLYQDVNCTEVPVAIHADQLTPTWRVYSTGSNVFQTRAGCLIGAEHVNNSYECDIPIGAGICASYQTQTNSPRRARSVASQSIIAYTMSLGAENSVAYSNNSIAIPTNFTISVTTEILPVSMTKTSVDCTMYICGDSTECSNLLLQYGSFCTQLNRALTGIAVEQDKNTQEVFAQVKQIYKTPPIKDFGGFNFSQILPDPSKPSKRSFIEDLLFNKVTLADAGFIKQYGDCLGDIAARDLICAQKFNGLTVLPPLLTDEMIAQYCSALLAGTITSGWTFGAGAALQIPFAMQMAYRFNGIGVTQNVLYENQKLIANQFNSAIGKIQDSLSSTASALGKLQDVVNQNAQALNTLVKQLSSNFGAISSVLNDILSRLDKVEAEVQIDRLITGRLQSLQTYVTQQLIRAAEIRASANLAATKMSECVLGQSKRVDFCGKGYHLMSFPQCAPHGVVFLHVTYVPAQEKNFTTAPAICHDGKAHFPREGVFVSNGTHWFVTQRNFYEPQIITTDNTFVSGNCDVVIGIVNNTVYDPLQPELDSFKEELDKYFKNHTSPDVDLGDISGINASVVNIQKEIDRLNEVAKNLNESLIDLQELGKYEQYIKGGGGSDIIKLLNEQVNKEMQSSNLYMSMSSWCYTHSLDGAGLFLFDHAAEEYEHAKKLIIFLNENNVPVQLTSISAPEHKFEGLTQIFQKAYEHEQHISESINNIVDHAIKSKDHATFNFLQWYVAEQHEEEVLFKDILDKIELIGNENHGLYLADQYVKGIAKSRKS

SEQ ID NO: 5603 - protein, 1379 aa, Artificial Sequence
  SARS-CoV-2/China/WF0004/2020__EPI_ISL_413694 spike protein (1-1211)(T874C_S1055C) Ferritin construct
MFVFLVLLPLVSSQCVNLTTRTQLPPAYTNSFTRGVYYPDKVFRSSVLHSTQDLFLPFFSNVTWFHAIHVSGTNGTKRFDNPVLPFNDGVYFASTEKSNIIRGWIFGTTLDSKTQSLLIVNNATNVVIKVCEFQFCNDPFLGVYYHKNNKSWTESEFRVYSSANNCTFEYVSQPFLMDLEGKQGNFKNLREFVFKNIDGYFKIYSKHTPINLVRDLPQGFSALEPLVDLPIGINITRFQTLLALHRSYLTPGDSSSGWTAGAAAYYVGYLQPRTFLLKYNENGTITDAVDCALDPLSETKCTLKSFTVEKGIYQTSNFRVQPTESIVRFPNITNLCPFGEVFNATRFASVYAWNRKRISNCVADYSVLYNSASFSTFKCYGVSPTKLNDLCFTNVYADSFVIRGDEVRQIAPGQTGKIADYNYKLPDDFTGCVIAWNSNNLDSKVGGNYNYLYRLFRKSNLKPFERDISTEIYQAGSTPCNGVEGFNCYFPLQSYGFQPTNGVGYQPYRVVVLSFELLHAPATVCGPKKSTNLVKNKCVNFNFNGLTGTGVLTESNKKFLPFQQFGRDIADTTDAVRDPQTLEILDITPCSFGGVSVITPGTNTSNQVAVLYQDVNCTEVPVAIHADQLTPTWRVYSTGSNVFQTRAGCLIGAEHVNNSYECDIPIGAGICASYQTQTNSPRRARSVASQSIIAYTMSLGAENSVAYSNNSIAIPTNFTISVTTEILPVSMTKTSVDCTMYICGDSTECSNLLLQYGSFCTQLNRALTGIAVEQDKNTQEVFAQVKQIYKTPPIKDFGGFNFSQILPDPSKPSKRSFIEDLLFNKVTLADAGFIKQYGDCLGDIAARDLICAQKFNGLTVLPPLLTDEMIAQYCSALLAGTITSGWTFGAGAALQIPFAMQMAYRFNGIGVTQNVLYENQKLIANQFNSAIGKIQDSLSSTASALGKLQDVVNQNAQALNTLVKQLSSNFGAISSVLNDILSRLDKVEAEVQIDRLITGRLQSLQTYVTQQLIRAAEIRASANLAATKMSECVLGQSKRFDFCGKGYHLMSFPQCAPHGVVFLHVTYVPAQEKNFTTAPAICHDGKAHFPREGVFVSNGTHWFVTQRNFYEPQIITTDNTFVSGNCDVVIGIVNNTVYDPLQPELDSFKEELDKYFKNHTSPDVDLGDISGINASVVNIQKEIDRLNEVAKNLNESLIDLQELGKYEQYIKGGGGSDIIKLLNEQVNKEMQSSNLYMSMSSWCYTHSLDGAGLFLFDHAAEEYEHAKKLIIFLNENNVPVQLTSISAPEHKFEGLTQIFQKAYEHEQHISESINNIVDHAIKSKDHATFNFLQWYVAEQHEEEVLFKDILDKIELIGNENHGLYLADQYVKGIAKSRKS

SEQ ID NO: 5604 - protein, 1379 aa, Artificial Sequence
  SARS-CoV-2/China/WF0028/2020__EPI_ISL_413791 spike protein (1-1211)(T874C_S1055C) Ferritin construct
MFVFLVLLPLVSSQCVNLTTRTQLPPAYTNSFTRGVYYPDKVFRSSVLHSTQDLFLPFFSNVTWFHAIHVSGTNGTKRFDNPVLPFNDGVYFASTEKSNIIRGWIFGTTLDSKTQSLLIVNNATNVVIKVCEFQFCNDPFLGVYYHKNNKSWMESEFRVYSSANNCTFEYVSQPFLMDLEGKQGNFKNLREFVFKNIDGYFKIYSKHTPINLVRDLPQGFSALEPLVDLPIGINITRFQTLLALHRSYLTPGDSSSGWTAGAAAYYVGYLQPRTFLLKYNENGTITDAVDCALDPLSETKCTLKSFTVEKGIYQTSNFRVQPTESIVRFPNITNLCPFGEVFNATRFASVYAWNRKRISNCVADYSVLYNSASFSTFKCYGVSPTKLNDLCFTNVYADSFVIRGDEVRQIAPGQTGKIADYNYKLPDDFTGCVIAWNSNNLDSKVGGNYNYLYRLFRKSNLKPFERDISTEIYQAGSTPCNGVEGFNCYFPLQSYGFQPTNGVGYQPYRVVVLSFELLHAPATVCGPKKSTNLVKNKCVNFNFNGLTGTGVLTESNKKFLPFQQFGRDIADTTDAVRDPQTLEILDITPCSFGGVSVITPGTNTSNQVAVLYQDVNCTEVPVAIHADQLTPTWRVYSTGSNVFQTRAGCLIGAEHVNNSYECDIPIGAGICASYQTQTNSPRRARSVASQSIIAYTMSLGAENSVAYSNNSIAIPTNFTISVTTEILPVSMTKTSVDCTMYICGDSTECSNLLLQYGSFCTQLNRALTGIAVEQDKNTQEVFAQVKQIYKTPPIKDFGGFNFSQILPDPSKPSKRSFIEDLLFNKVTLADAGFIKQYGDCLGDIAARDLICAQKFNGLTVLPPLLTDEMIAQYCSALLAGTITSGWTFGAGAALQIPFAMQMAYRFNGIGVTQNVLYENQKLIANQFNSAIGKIQDSLSSTASALGKLQDVVNQNAQALNTLVKQLSSNFGAISSVLNDILSRLDKVEAEVQIDRLITGRLQSLQTYVTQQLIRAAEIRASANLAATKMSECVLGQSKRVDFCGKGYHLMSFPQCAPHGVVFLHVTYVPAQEKNFTTAPAICHDGKAHFPREGVFVSNGTHWFVTQRNFYEPQIITTDNTFVSGNCDVVIGIVNNTVYDPLQPELESFKEELDKYFKNHTSPDVDLGDISGINASVVNIQKEIDRLNEVAKNLNESLIDLQELGKYEQYIKGGGGSDIIKLLNEQVNKEMQSSNLYMSMSSWCYTHSLDGAGLFLFDHAAEEYEHAKKLIIFLNENNVPVQLTSISAPEHKFEGLTQIFQKAYEHEQHISESINNIVDHAIKSKDHATFNFLQWYVAEQHEEEVLFKDILDKIELIGNENHGLYLADQYVKGIAKSRKS

SEQ ID NO: 5605 - protein, 1379 aa, Artificial Sequence
  SARS-CoV-2/2019-nCoV/USA-CruiseA-18/2020__MT159716.1 spike protein (1-1211)(T874C_S1055C) Ferritin construct
MFVFLVLLPLVSSQCVNLTTRTQLPPAYTNSFTRGVYYPDKVFRSSVLHSTQDLFLPFFSNVTWFHAIHVSGTNGTKRFDNPVLPFNDGVYFASTEKSNIIRGWIFGTTLDSKTQSLLIVNNATNVVIKVCEFQFCNDPFLGVYYHKNNKSWMESELRVYSSANNCTFEYVSQPFLMDLEGKQGNFKNLREFVFKNIDGYFKIYSKHTPINLVRDLPQGFSALEPLVDLPIGINITRFQTLLALHRSYLTPGDSSSGWTAGAAAYYVGYLQPRTFLLKYNENGTITDAVDCALDPLSETKCTLKSFTVEKGIYQTSNFRVQPTESIVRFPNITNLCPFGEVFNATRFASVYAWNRKRISNCVADYSVLYNSASFSTFKCYGVSPTKLNDLCFTNVYADSFVIRGDEVRQIAPGQTGKIADYNYKLPDDFTGCVIAWNSNNLDSKVGGNYNYLYRLFRKSNLKPFERDISTEIYQAGSTPCNGVEGFNCYFPLQSYGFQPTNGVGYQPYRVVVLSFELLHAPATVCGPKKSTNLVKNKCVNFNFNGLTGTGVLTESNKKFLPFQQFGRDIADTTDAVRDPQTLEILDITPCSFGGVSVITPGTNTSNQVAVLYQDVNCTEVPVAIHADQLTPTWRVYSTGSNVFQTRAGCLIGAEHVNNSYECDIPIGAGICASYQTQTNSPRRARSVASQSIIAYTMSLGAENSVAYSNNSIAIPTNFTISVTTEILPVSMTKTSVDCTMYICGDSTECSNLLLQYGSFCTQLNRALTGIAVEQDKNTQEVFAQVKQIYKTPPIKDFGGFNFSQILPDPSKPSKRSFIEDLLFNKVTLADAGFIKQYGDCLGDIAARDLICAQKFNGLTVLPPLLTDEMIAQYCSALLAGTITSGWTFGAGAALQIPFAMQMAYRFNGIGVTQNVLYENQKLIANQFNSAIGKIQDSLSSTASALGKLQDVVNQNAQALNTLVKQLSSNFGAISSVLNDILSRLDKVEAEVQIDRLITGRLQSLQTYVTQQLIRAAEIRASANLAATKMSECVLGQSKRVDFCGKGYHLMSFPQCAPHGVVFLHVTYVPAQEKNFTTAPAICHDGKAHFPREGVFVSNGTHWFVTQRNFYEPQIITTDNTFVSGNCDVVIGIVNNTVYDPLQPELDSFKEELDKYFKNHTSPDVDLGDISGINASVVNIQKEIDRLNEVAKNLNESLIDLQELGKYEQYIKGGGGSDIIKLLNEQVNKEMQSSNLYMSMSSWCYTHSLDGAGLFLFDHAAEEYEHAKKLIIFLNENNVPVQLTSISAPEHKFEGLTQIFQKAYEHEQHISESINNIVDHAIKSKDHATFNFLQWYVAEQHEEEVLFKDILDKIELIGNENHGLYLADQYVKGIAKSRKS

SEQ ID NO: 5606 - protein, 1379 aa, Artificial Sequence
  SARS-CoV-2/SARS-CoV-2/Yunnan-01/human/2020/CHN__MT049951.1 spike protein (1-1211)(T874C_S1055C) Ferritin construct
MFVFLVLLPLVSSQCVNLTTRTQLPPANTNSFTRGVYYPDKVFRSSVLHSTQDLFLPFFSNVTWFHAIHVSGTNGTKRFDNPVLPFNDGVYFASTEKSNIIRGWIFGTTLDSKTQSLLIVNNATNVVIKVCEFQFCNDPFLGVYYHKNNKSWMESEFRVYSSANNCTFEYVSQPFLMDLEGKQGNFKNLREFVFKNIDGYFKIYSKHTPINLVRDLPQGFSALEPLVDLPIGINITRFQTLLALHRSYLTPGDSSSGWTAGAAAYYVGYLQPRTFLLKYNENGTITDAVDCALDPLSETKCTLKSFTVEKGIYQTSNFRVQPTESIVRFPNITNLCPFGEVFNATRFASVYAWNRKRISNCVADYSVLYNSASFSTFKCYGVSPTKLNDLCFTNVYADSFVIRGDEVRQIAPGQTGKIADYNYKLPDDFTGCVIAWNSNNLDSKVGGNYNYLYRLFRKSNLKPFERDISTEIYQAGSTPCNGVEGFNCYFPLQSYGFQPTNGVGYQPYRVVVLSFELLHAPATVCGPKKSTNLVKNKCVNFNFNGLTGTGVLTESNKKFLPFQQFGRDIADTTDAVRDPQTLEILDITPCSFGGVSVITPGTNTSNQVAVLYQDVNCTEVPVAIHADQLTPTWRVYSTGSNVFQTRAGCLIGAEHVNNSYECDIPIGAGICASYQTQTNSPRRARSVASQSIIAYTMSLGAENSVAYSNNSIAIPTNFTISVTTEILPVSMTKTSVDCTMYICGDSTECSNLLLQYGSFCTQLNRALTGIAVEQDKNTQEVFAQVKQIYKTPPIKDFGGFNFSQILPDPSKPSKRSFIEDLLFNKVTLADAGFIKQYGDCLGDIAARDLICAQKFNGLTVLPPLLTDEMIAQYCSALLAGTITSGWTFGAGAALQIPFAMQMAYRFNGIGVTQNVLYENQKLIANQFNSAIGKIQDSLSSTASALGKLQDVVNQNAQALNTLVKQLSSNFGAISSVLNDILSRLDKVEAEVQIDRLITGRLQSLQTYVTQQLIRAAEIRASANLAATKMSECVLGQSKRVDFCGKGYHLMSFPQCAPHGVVFLHVTYVPAQEKNFTTAPAICHDGKAHFPREGVFVSNGTHWFVTQRNFYEPQIITTDNTFVSGNCDVVIGIVNNTVYDPLQPELDSFKEELDKYFKNHTSPDVDLGDISGINASVVNIQKEIDRLNEVAKNLNESLIDLQELGKYEQYIKGGGGSDIIKLLNEQVNKEMQSSNLYMSMSSWCYTHSLDGAGLFLFDHAAEEYEHAKKLIIFLNENNVPVQLTSISAPEHKFEGLTQIFQKAYEHEQHISESINNIVDHAIKSKDHATFNFLQWYVAEQHEEEVLFKDILDKIELIGNENHGLYLADQYVKGIAKSRKS

SEQ ID NO: 5607 - protein, 1379 aa, Artificial Sequence
  SARS-CoV-2/USA/WA-UW292/2020__EPI_ISL_418077 spike protein (1-1211)(T874C_S1055C) Ferritin construct
MFVFLVLLPLVSSQCVNLTTRTQLPPAYTNSFTRGVYYPDKVFRSSVLHSTQDLFLPFFSNVTWFHAIHVSGTNGTKRFDNPVLPFNDGVYFASTEKSNIIRGWIFGTTLDSKTQSLLIVNNATNVVIKVCEFQFCNDPFLGVYYHKNNKSWMESEFRVYSSANNCTFEYVSQPFLMDLEGKQGNFKNLREFVFKNIDGYFKIYSKHTPINLVRDLPQGFSALEPLVDLPIGINITRFQTLLALHRSYLTPGDSSSGWTAGAAAYYVGYLQPRTFLLKYNENGTITDAVDCALDPLSETKCTLKSFTVEKGIYQTSNFRVQPTESIVRFPNITNLCPFGEVFNATRFASVYAWNRKRISNCVADYSVLYNSASFSTFKCYGVSPTKLNDLCFTNVYADSFVIRGDEVRQIAPGQTGKIADYNYKLPDDFTGCVIAWNSNNLDSKVGGNYNYLYRLFRKSNLKPFERDISTEIYQASSTPCNGVEGFNCYFPLQSYGFQPTNGVGYQPYRVVVLSFELLHAPATVCGPKKSTNLVKNKCVNFNFNGLTGTGVLTESNKKFLPFQQFGRDIADTTDAVRDPQTLEILDITPCSFGGVSVITPGTNTSNQVAVLYQDVNCTEVPVAIHADQLTPTWRVYSTGSNVFQTRAGCLIGAEHVNNSYECDIPIGAGICASYQTQTNSPRRARSVASQSIIAYTMSLGAENSVAYSNNSIAIPTNFTISVTTEILPVSMTKTSVDCTMYICGDSTECSNLLLQYGSFCTQLNRALTGIAVEQDKNTQEVFAQVKQIYKTPPIKDFGGFNFSQILPDPSKPSKRSFIEDLLFNKVTLADAGFIKQYGDCLGDIAARDLICAQKFNGLTVLPPLLTDEMIAQYCSALLAGTITSGWTFGAGAALQIPFAMQMAYRFNGIGVTQNVLYENQKLIANQFNSAIGKIQDSLSSTASALGKLQDVVNQNAQALNTLVKQLSSNFGAISSVLNDILSRLDKVEAEVQIDRLITGRLQSLQTYVTQQLIRAAEIRASANLAATKMSECVLGQSKRVDFCGKGYHLMSFPQCAPHGVVFLHVTYVPAQEKNFTTAPAICHDGKAHFPREGVFVSNGTHWFVTQRNFYEPQIITTDNTFVSGNCDVVIGIVNNTVYDPLQPELDSFKEELDKYFKNHTSPDVDLGDISGINASVVNIQKEIDRLNEVAKNLNESLIDLQELGKYEQYIKGGGGSDIIKLLNEQVNKEMQSSNLYMSMSSWCYTHSLDGAGLFLFDHAAEEYEHAKKLIIFLNENNVPVQLTSISAPEHKFEGLTQIFQKAYEHEQHISESINNIVDHAIKSKDHATFNFLQWYVAEQHEEEVLFKDILDKIELIGNENHGLYLADQYVKGIAKSRKS

SEQ ID NO: 5608 - protein, 1379 aa, Artificial Sequence
  SARS-CoV-2/Iceland/192/2020__EPI_ISL_417819 spike protein (1-1211)(T874C_S1055C) Ferritin construct
MFVFFVLLPLVSSQCVNLTTRTQLPPAYTNSFTRGVYYPDKVFRSSVLHSTQDLFLPFFSNVTWFHAIHVSGTNGTKRFDNPVLPFNDGVYFASTEKSNIIRGWIFGTTLDSKTQSLLIVNNATNVVIKVCEFQFCNDPFLGVYYHKNNKSWMESEFRVYSSANNCTFEYVSQPFLMDLEGKQGNFKNLREFVFKNIDGYFKIYSKHTPINLVRDLPQGFSALEPLVDLPIGINITRFQTLLALHRSYLTPGDSSSGWTAGAAAYYVGYLQPRTFLLKYNENGTITDAVDCALDPLSETKCTLKSFTVEKGIYQTSNFRVQPTESIVRFPNITNLCPFGEVFNATRFASVYAWNRKRISNCVADYSVLYNSASFSTFKCYGVSPTKLNDLCFTNVYADSFVIRGDEVRQIAPGQTGKIADYNYKLPDDFTGCVIAWNSNNLDSKVGGNYNYLYRLFRKSNLKPFERDISTEIYQAGSTPCNGVEGFNCYFPLQSYGFQPTNGVGYQPYRVVVLSFELLHAPATVCGPKKSTNLVKNKCVNFNFNGLTGTGVLTESNKKFLPFQQFGRDIADTTDAVRDPQTLEILDITPCSFGGVSVITPGTNTSNQVAVLYQGVNCTEVPVAIHADQLTPTWRVYSTGSNVFQTRAGCLIGAEHVNNSYECDIPIGAGICASYQTQTNSPRRARSVASQSIIAYTMSLGAENSVAYSNNSIAIPTNFTISVTTEILPVSMTKTSVDCTMYICGDSTECSNLLLQYGSFCTQLNRALTGIAVEQDKNTQEVFAQVKQIYKTPPIKDFGGFNFSQILPDPSKPSKRSFIEDLLFNKVTLADAGFIKQYGDCLGDIAARDLICAQKFNGLTVLPPLLTDEMIAQYCSALLAGTITSGWTFGAGAALQIPFAMQMAYRFNGIGVTQNVLYENQKLIANQFNSAIGKIQDSLSSTASALGKLQDVVNQNAQALNTLVKQLSSNFGAISSVLNDILSRLDKVEAEVQIDRLITGRLQSLQTYVTQQLIRAAEIRASANLAATKMSECVLGQSKRVDFCGKGYHLMSFPQCAPHGVVFLHVTYVPAQEKNFTTAPAICHDGKAHFPREGVFVSNGTHWFVTQRNFYEPQIITTDNTFVSGNCDVVIGIVNNTVYDPLQPELDSFKEELDKYFKNHTSPDVDLGDISGINASVVNIQKEIDRLNEVAKNLNESLIDLQELGKYEQYIKGGGGSDIIKLLNEQVNKEMQSSNLYMSMSSWCYTHSLDGAGLFLFDHAAEEYEHAKKLIIFLNENNVPVQLTSISAPEHKFEGLTQIFQKAYEHEQHISESINNIVDHAIKSKDHATFNFLQWYVAEQHEEEVLFKDILDKIELIGNENHGLYLADQYVKGIAKSRKS

SEQ ID NO: 5609 - protein, 1379 aa, Artificial Sequence
  SARS-CoV-2/Belgium/ULG-6939/2020__EPI_ISL_417020 spike protein (1-1211)(T874C_S1055C) Ferritin construct
MFVFLVLLPLVSSQCVNLTTRTQLPPAYTNSFTRGVYYPDKVFRSSVLHSTQDLFLPFFSNVTWFHAIHVSGTNGTKRFDNPVLPFNDGVYFASTEKSNIIRGWIFGTTLDSKTQSLLIVNNATNVVIKVCEFQFCNDPFLGVYYHKNNKSWMESEFRVYSSANNCTFEYVSQPFLMDLEGKQGNFKNLREFVFKNIDGYFKIYSKHTPINLVRDLPQGFSALEPLVDLPIGINITRFQTLLALHRSYLTPGDSSSGWTAGAAAYYVGYLQPRTFLLKYNENGTITDAVDCALDPLSETKCTLKSFTVEKGIYQTSNFRVQPTESIVRFPNITNLCPFGEVFNATRFASVYAWNRKRISNCVADYSVLYNSASFSTFKCYGVSPTKLNDLCFTNVYADSFVIRGDEVRQIAPGQTGKIADYNYKLPDDFTGCVIAWNSNNLDSKVGGNYNYLYRLFRKSNLKPFERDISTEIYQAGSTPCNGVEGFNCYFPLQSYGFQPTNGVGYQPYRVVVLSFELLHAPATVCGPKKSTNLVKNKCVNFNFNGLTGTGVLTESNKKFLPFQQFGRDIADTTDAVRDPQTLEILDITPCSFGGVSVITPGTNTSNQVAVLYQGVNCTEVPVAIHADQLTPTWRVYSTGSNVFQTRAGCLIGAEHVNNSYECDIPIGAGICASYQTQTNSPRRARSVASQSIIAYTMSLGAENSVVYSNNSIAIPTNFTISVTTEILPVSMTKTSVDCTMYICGDSTECSNLLLQYGSFCTQLNRALTGIAVEQDKNTQEVFAQVKQIYKTPPIKDFGGFNFSQILPDPSKPSKRSFIEDLLFNKVTLADAGFIKQYGDCLGDIAARDLICAQKFNGLTVLPPLLTDEMIAQYCSALLAGTITSGWTFGAGAALQIPFAMQMAYRFNGIGVTQNVLYENQKLIANQFNSAIGKIQDSLSSTASALGKLQDVVNQNAQALNTLVKQLSSNFGAISSVLNDILSRLDKVEAEVQIDRLITGRLQSLQTYVTQQLIRAAEIRASANLAATKMSECVLGQSKRVDFCGKGYHLMSFPQCAPHGVVFLHVTYVPAQEKNFTTAPAICHDGKAHFPREGVFVSNGTHWFVTQRNFYEPQIITTDNTFVSGNCDVVIGIVNNTVYDPLQPELDSFKEELDKYFKNHTSPDVDLGDISGINASVVNIQKEIDRLNEVAKNLNESLIDLQELGKYEQYIKGGGGSDIIKLLNEQVNKEMQSSNLYMSMSSWCYTHSLDGAGLFLFDHAAEEYEHAKKLIIFLNENNVPVQLTSISAPEHKFEGLTQIFQKAYEHEQHISESINNIVDHAIKSKDHATFNFLQWYVAEQHEEEVLFKDILDKIELIGNENHGLYLADQYVKGIAKSRKS

SEQ ID NO: 5610 - protein, 1379 aa, Artificial Sequence
  SARS-CoV-2/France/HF2496/2020__EPI_ISL_418231 spike protein (1-1211)(T874C_S1055C) Ferritin construct
MFVFLVLLPLVSSQCVNLTTRTQLPPAYTNSFTRGVYYPDKVFRSSVLHSTQDLFLPFFSNVTWFHAIHVSGTNGTKRFDNPVLPFNDGVYFASTEKSNIIRGWIFGTTLDSKTQSLLIVNNATNVVIKVCEFQFCNDPFLGVYYHKNNKSWMESEFRVYSSANNCTFEYVSQPFLMDLEGKQGNFKNLREFVFKNIDGYFKIYSKHTPINLVRDLPQGFSALEPLVDLPIGINITRFQTLLALHRSYLTPGDSSSGWTAGAAAYYVGYLQPRTFLLKYNENGTITDAVDCALDPLSETKCTLKSFTVEKGIYQTSNFRVQPTESIVRFPNITNLCPFGEVFNATRFASVYAWNRKRISNCVADYSVLYNSASFSTFKCYGVSPTKLNDLCFTNVYADSFVIRGDEVRQIAPGQTGKIADYNYKLPDDFTGCVIAWNSNNLDSKVGGNYNYLYRLFRKSNLKPFERDISTEIYQAGSTPCNGVEGFNCYFPLQSYGFQPTNGVGYQPYRVVVLSFELLHAPATVCGPKKSTNLVKNKCVNFNFNGLTGTGVLTESNKKFLPFQQFGRDIADTTDAVRDPQTLEILDITPCSFGGVSVITPGTNTSNQVAVLYQGVNCTEVPVAIHADQLTPTWRVYSTGSNVFQTRAGCLIGAEHVNNSYECDIPIGAGICASYQTQTNSPRRARSVASQSIIAYTMSLGAENSVAYSNNSIAIPTNFTISVTTEILPVSMTKTSVDCTMYICGDSTECSNLLLQYGSFCTQLNRALTGIAVEQDKNTQEVFAQVKQIYKTPPIKDFGGFNFSQILPDPSKPSKRSFIEDLLFNKVTLADAGFIKQYGDCLGDIVARDLICAQKFNGLTVLPPLLTDEMIAQYCSALLAGTITSGWTFGAGAALQIPFAMQMAYRFNGIGVTQNVLYENQKLIANQFNSAIGKIQDSLSSTASALGKLQDVVNQNAQALNTLVKQLSSNFGAISSVLNDILSRLDKVEAEVQIDRLITGRLQSLQTYVTQQLIRAAEIRASANLAATKMSECVLGQSKRVDFCGKGYHLMSFPQCAPHGVVFLHVTYVPAQEKNFTTAPAICHDGKAHFPREGVFVSNGTHWFVTQRNFYEPQIITTDNTFVSGNCDVVIGIVNNTVYDPLQPELDSFKEELDKYFKNHTSPDVDLGDISGINASVVNIQKEIDRLNEVAKNLNESLIDLQELGKYEQYIKGGGGSDIIKLLNEQVNKEMQSSNLYMSMSSWCYTHSLDGAGLFLFDHAAEEYEHAKKLIIFLNENNVPVQLTSISAPEHKFEGLTQIFQKAYEHEQHISESINNIVDHAIKSKDHATFNFLQWYVAEQHEEEVLFKDILDKIELIGNENHGLYLADQYVKGIAKSRKS

SEQ ID NO: 5611 - protein, 1379 aa, Artificial Sequence
  SARS-CoV-2/USA/WA-UW291/2020__EPI_ISL_418076 spike protein (1-1211)(T874C_S1055C) Ferritin construct
MFVFLVLLPLVSSQCVNLTTRTQLPPAYTNSFTRGVYYPDKVFRSSVLHSTQDLFLPFFSNVTWFHAIHVSGTNGTKRFDNPVLPFNDGVYFASTEKSNIIRGWIFGTTLDSKTQSLLIVNNATNVVIKVCEFQFCNDPFLGVYYHKNNKSWMESEFRVYSSANNCTFEYVSQPFLMDLEGKQGNFKNLREFVFKNIDGYFKIYSKHTPINLVRDLPQGFSALEPLVDLPIGINITRFQTLLALHRSYLTPGDSSSGWTAGAAAYYVGYLQPRTFLLKYNENGTITDAVDCALDPLSETKCTLKSFTVEKGIYQTSNFRVQPTESIVRFPNITNLCPFGEVFNATRFASVYAWNRKRISNCVADYSVLYNSASFSTFKCYGVSPTKLNDLCFTNVYADSFVIRGDEVRQIAPGQTGKIADYNYKLPDDFTGCVIAWNSNNLDSKVGGNYNYLYRLFRKSNLKPFERDISTEIYQAGSTPCNGVEGFNCYFPLQSYGFQPTNGVGYQPYRVVVLSFELLHAPATVCGPKKSTNLVKNKCVNFNFNGLTGTGVLTESNKKFLPFQQFGRDIADTTDAVRDPQTLEILDITPCSFGGVSVITPGTNTSNQVAVLYQGVNCTEVPVAIHADQLTPTWRVYSTGSNVFQTRAGCLIGAEHVNNSYECDIPIGAGICASYQTQTNSPRRARSVASQSIIAYTMSLGAENSVAYSNNSIAIPTNFTISVTTEILPVSMTKTSVDCTMYICGDSTECSNLLLQYGSFCTQLNRALTGIAVEQDKNTQEVFAQVKQIYKTPPIKDFGGFNFSQILPDPSKPSKRSFIEDLLFNKVTLADAGFIKQYGDCLGDIAARDLICAQKFNGLTVLPPLLTDEMIAQYCSALLAGTITSGWTFGAGAALQIPFAMQMAYRFNGIGVTQNVLYENQKLIANQFNSAIGKIQYSLSSTASALGKLQDVVNQNAQALNTLVKQLSSNFGAISSVLNDILSRLDKVEAEVQIDRLITGRLQSLQTYVTQQLIRAAEIRASANLAATKMSECVLGQSKRVDFCGKGYHLMSFPQCAPHGVVFLHVTYVPAQEKNFTTAPAICHDGKAHFPREGVFVSNGTHWFVTQRNFYEPQIITTDNTFVSGNCDVVIGIVNNTVYDPLQPELDSFKEELDKYFKNHTSPDVDLGDISGINASVVNIQKEIDRLNEVAKNLNESLIDLQELGKYEQYIKGGGGSDIIKLLNEQVNKEMQSSNLYMSMSSWCYTHSLDGAGLFLFDHAAEEYEHAKKLIIFLNENNVPVQLTSISAPEHKFEGLTQIFQKAYEHEQHISESINNIVDHAIKSKDHATFNFLQWYVAEQHEEEVLFKDILDKIELIGNENHGLYLADQYVKGIAKSRKS

SEQ ID NO: 5612 - protein, 1379 aa, Artificial Sequence; identical to SEQ ID NO: 5575
  SARS-CoV-2/Portugal/PT0034/2020__EPI_ISL_418019 spike protein (1-1211)(T874C_S1055C) Ferritin construct

SEQ ID NO: 5613 - protein, 1379 aa, Artificial Sequence
  SARS-CoV-2/Iceland/202/2020__EPI_ISL_417750 spike protein (1-1211)(T874C_S1055C) Ferritin construct
MFVFLVLLPLVSSQCVNLTTRTQLPPAYTNSFTRGVYYPDKVFRSSVLHSTQDLFLPFFSNVTWFHAIHVSGTNGTKRFDNPVLPFNDGVYFASTEKSNIIRGWIFGTTLDSKTQSLLIVNNATNVVIKVCEFQFCNDPFLGVYYHKNNKSWMESEFRVYSSANNCTFEYVSQPFLMDLEGKQGNFKNLREFVFKNIDGYFKIYSKHTPINLVRDLPQGFSALEPLVDLPIGINITRFQTLLALHRSYLTPGDSSSGWTAGAAAYYVGYLQPRTFLLKYNENGTITDAVDCALDPLSETKCTLKSFTVEKGIYQTSNFRVQPTESIVRFPNITNLCPFGEVFNATRFASVYAWNRKRISNCVADYSVLYNSASFSTFKCYGVSPTKLNDLCFTNVYADSFVIRGDEVRQIAPGQTGKIADYNYKLPDDFTGCVIAWNSNNLDSKVGGNYNYLYRLFRKSNLKPFERDISTEIYQAGSTPCNGVEGFNCYFPLQSYGFQPTNGVGYQPYRVVVLSFELLHAPATVCGPKKSTNLVKNKCVNFNFNGLTGTGVLTESNKKFLPFQQFGRDIADTTDAVRDPQTLEILDITPCSFGGVSVITPGTNTSNQVAVLYQDVNCTEVPVAIHADQLTPTWRVYSTGSNVFQTRAGCLIGAEHVNNSYECDIPIGAGICASYQTQTNSPRRARSVASQSIIAYTMSLGAENSVAYSNNSIAIPTNFTISVTTEILPVSMTKTSVDCTMYICGDSTECSNLLLQYGSFCTQLNRALTGIAVEQDKNTQEVFAQVKQIYKTPPIKDFGGFNFSQILPDPSKPSKRSFIEDLLFNKVTLADAGFIKQYGDCLGDIAARDLICAQKFNGLTVLPPLLTDEMIAQYCSALLAGTITSGWTFGAGAALQIPFAMQMAYRFNGIGVTQNVLYENQKLIANQFNSAIGKIQDSLSSTASALGKLQDVVNQNAQALNTLVKQLSSNFGAISSVLNDILSRLDKVEAEVQIDRLITGRLQSLQTYVTQQLIRAAEIRASANLAATKMSECVLGQSKRVDFCGKGYHLMSFPQCAPHGVVFLHVTYVPAQEKNFTTAPAICHDGKAHFPREGVFVSNGTHWFVTQRNFYEPQIITTDNTFVSGNCDVVIGIVNNTVYDPLQPELDSFKEELDKYFKNHTSPDVDLGDIPGINASVVNIQKEIDRLNEVAKNLNESLIDLQELGKYEQYIKGGGGSDIIKLLNEQVNKEMQSSNLYMSMSSWCYTHSLDGAGLFLFDHAAEEYEHAKKLIIFLNENNVPVQLTSISAPEHKFEGLTQIFQKAYEHEQHISESINNIVDHAIKSKDHATFNFLQWYVAEQHEEEVLFKDILDKIELIGNENHGLYLADQYVKGIAKSRKS

SEQ ID NO: 5614 - protein, 1379 aa, Artificial Sequence
  SARS-CoV-2/USA/WA-UW261/2020__EPI_ISL_418046 spike protein (1-1211)(T874C_S1055C) Ferritin construct
MFVFLVLLPLVSSQCVNLTTRTQLPPAYTNSFTRGVYYPDKVFRSSVLHSTQDLFLPFFSNVTWFHAIHVSGTNGTKRFDNPVLPFNDGVYFASTEKSNIIRGWIFGTTLDSKTQSLLIVNNATNVVIKVCEFQFCNDPFLGVYYHKNNKSWMESEFRVYSSANNCTFEYVSQPFLMDLEGKQGNFKNLREFVFKNIDGYFKIYSKHTPINLVRDLPQGFSALEPLVDLPIGINITRFQTLLALHRSYLTPGDSSSGWTAGAAAYYVGYLQPRTFLLKYNENGTITDAVDCALDPLSETKCTLKSFTVEKGIYQTSNFRVQPTESIVRFPNITNLCPFGEVFNATRFTSVYAWNRKRISNCVADYSVLYNSASFSTFKCYGVSPTKLNDLCFTNVYADSFVIRGDEVRQIAPGQTGKIADYNYKLPDDFTGCVIAWNSNNLDSKVGGNYNYLYRLFRKSNLKPFERDISTEIYQAGSTPCNGVEGFNCYFPLQSYGFQPTNGVGYQPYRVVVLSFELLHAPATVCGPKKSTNLVKNKCVNFNFNGLTGTGVLTESNKKFLPFQQFGRDIADTTDAVRDPQTLEILDITPCSFGGVSVITPGTNTSNQVAVLYQDVNCTEVPVAIHADQLTPTWRVYSTGSNVFQTRAGCLIGAEHVNNSYECDIPIGAGICASYQTQTNSPRRARSVASQSIIAYTMSLGAENSVAYSNNSIAIPTNFTISVTTEILPVSMTKTSVDCTMYICGDSTECSNLLLQYGSFCTQLNRALTGIAVEQDKNTQEVFAQVKQIYKTPPIKDFGGFNFSQILPDPSKPSKRSFIEDLLFNKVTLADAGFIKQYGDCLGDIAARDLICAQKFNGLTVLPPLLTDEMIAQYCSALLAGTITSGWTFGAGAALQIPFAMQMAYRFNGIGVTQNVLYENQKLIANQFNSAIGKIQDSLSSTASALGKLQDVVNQNAQALNTLVKQLSSNFGAISSVLNDILSRLDKVEAEVQIDRLITGRLQSLQTYVTQQLIRAAEIRASANLAATKMSECVLGQSKRVDFCGKGYHLMSFPQCAPHGVVFLHVTYVPAQEKNFTTAPAICHDGKAHFPREGVFVSNGTHWFVTQRNFYEPQIITTDNTFVSGNCDVVIGIVNNTVYDPLQPELDSFKEELDKYFKNHTSPDVDLGDISGINASVVNIQKEIDRLNEVAKNLNESLIDLQELGKYEQYIKGGGGSDIIKLLNEQVNKEMQSSNLYMSMSSWCYTHSLDGAGLFLFDHAAEEYEHAKKLIIFLNENNVPVQLTSISAPEHKFEGLTQIFQKAYEHEQHISESINNIVDHAIKSKDHATFNFLQWYVAEQHEEEVLFKDILDKIELIGNENHGLYLADQYVKGIAKSRKS

SEQ ID NO: 5615 - protein, 1379 aa, Artificial Sequence
  SARS-CoV-2/Portugal/PT0035/2020__EPI_ISL_418020 spike protein (1-1211)(T874C_S1055C) Ferritin construct
MFVFLVLLPLVSSQCVNLTTRTQLPPAYTNSFTRGVYYPDKVFRSSVLHSTQDLFLPFFSNVTWFHAIHVSGTNGTKRFDNPVLPFNDGVYFASTEKSNIIRGWIFGTTLDSKTQSLLIVNNATNVVIKVCEFQFCNDPFLGVYYHKNNKSWMESEFRVYSSANNCTFEYVSQPFLMDLEGKQGNFKNLREFVFKNIDGYFKIYSKHTPINLVRDLPQGFSALEPLVDLPIGINITRFQTLLALHRSYLTPGDSSSGWTAGAAAYYVGYLQPRTFLLKYNENGTITDAVDCALDPLSETKCTLKSFTVEKGIYQTSNFRVQPTESIVRFPNITNLCPFGEVFNATRFASVYAWNRKRISNCVADYSVLYNSASFSTFKCYGVSPTKLNDLCFTNVYADSFVIRGDEVRQIAPGQTGKIADYNYKLPDDFTGCVIAWNSNNLDSKVGGNYNYLYRLFRKSNLKPFERDISTEIYQAGSTPCNGVEGFNCYFPLQSYGFQPTNGVGYQPYRVVVLSFELLHAPATVCGPKKSTNLVKNKCVNFNFNGLTGTGVLTESNKKFLPFQQFGRDIADTTDAVRDPQTLEILDITPCSFGGVSVITPGTNTSNQVAVLYQDVNCTEVPVAIHADQLTPTWRVYSTGSNVFQTRAGCLIGAEHVNNSYECDIPIGAGICASYQTQTNSPRRARSVASQSIIAYTMSLGAENSVAYSNNSIAIPTNFTISVTTEILPVSMTKTSVDCTMYICGDSTECSNLLLQYGSFCTQLNRALTGIAVEQDKNTQEVFAQVKQIYKTPPIKDFGGFNFSQILPDPSKPSKRSFIEDLLFNKVTLADAGFIKQYGDCLGDISARDLICAQKFNGLTVLPPLLTDEMIAQYCSALLAGTITSGWTFGAGAALQIPFAMQMAYRFNGIGVTQNVLYENQKLIANQFNSAIGKIQDSLSSTASALGKLQDVVNQNAQALNTLVKQLSSNFGAISSVLNDILSRLDKVEAEVQIDRLITGRLQSLQTYVTQQLIRAAEIRASANLAATKMSECVLGQSKRVDFCGKGYHLMSFPQCAPHGVVFLHVTYVPAQEKNFTTAPAICHDGKAHFPREGVFVSNGTHWFVTQRNFYEPQIITTDNTFVSGNCDVVIGIVNNTVYDPLQPELDSFKEELDKYFKNHTSPDVDLGDISGINASVVNIQKEIDRLNEVAKNLNESLIDLQELGKYEQYIKGGGGSDIIKLLNEQVNKEMQSSNLYMSMSSWCYTHSLDGAGLFLFDHAAEEYEHAKKLIIFLNENNVPVQLTSISAPEHKFEGLTQIFQKAYEHEQHISESINNIVDHAIKSKDHATFNFLQWYVAEQHEEEVLFKDILDKIELIGNENHGLYLADQYVKGIAKSRKS

SEQ ID NO: 5616 - protein, 1379 aa, Artificial Sequence
  SARS-CoV-2/USA/NY-NYUMC7/2020__EPI_ISL_418192 spike protein (1-1211)(T874C_S1055C) Ferritin construct
MFVFLVLLPLVSSQCVNLTTRTQLPPAYTNSFTRGVYYPDKVFRSSVLHSTQDLFLPFFSNVTWFHAIHVSGTNGTKRFDNPVLPFNDGVYFASTEKSNIIRGWIFGTTLDSKTQSLLIVNNATNVVIKVCEFQFCNDPFLGVYHHKNNKSWMESEFRVYSSANNCTFEYVSQPFLMDLEGKQGNFKNLREFVFKNIDGYFKIYSKHTPINLVRDLPQGFSALEPLVDLPIGINITRFQTLLALHRSYLTPGDSSSGWTAGAAAYYVGYLQPRTFLLKYNENGTITDAVDCALDPLSETKCTLKSFTVEKGIYQTSNFRVQPTESIVRFPNITNLCPFGEVFNATRFASVYAWNRKRISNCVADYSVLYNSASFSTFKCYGVSPTKLNDLCFTNVYADSFVIRGDEVRQIAPGQTGKIADYNYKLPDDFTGCVIAWNSNNLDSKVGGNYNYLYRLFRKSNLKPFERDISTEIYQAGSTPCNGVEGFNCYFPLQSYGFQPTNGVGYQPYRVVVLSFELLHAPATVCGPKKSTNLVKNKCVNFNFNGLTGTGVLTESNKKFLPFQQFGRDIADTTDAVRDPQTLEILDITPCSFGGVSVITPGTNTSNQVAVLYQGVNCTEVPVAIHADQLTPTWRVYSTGSNVFQTRAGCLIGAEHVNNSYECDIPIGAGICASYQTQTNSPRRARSVASQSIIAYTMSLGAENSVAYSNNSIAIPTNFTISVTTEILPVSMTKTSVDCTMYICGDSTECSNLLLQYGSFCTQLNRALTGIAVEQDKNTQEVFAQVKQIYKTPPIKDFGGFNFSQILPDPSKPSKRSFIEDLLFNKVTLADAGFIKQYGDCLGDIAARDLICAQKFNGLTVLPPLLTDEMIAQYCSALLAGTITSGWTFGAGAALQIPFAMQMAYRFNGIGVTQNVLYENQKLIANQFNSAIGKIQDSLSSTASALGKLQDVVNQNAQALNTLVKQLSSNFGAISSVLNDILSRLDKVEAEVQIDRLITGRLQSLQTYVTQQLIRAAEIRASANLAATKMSECVLGQSKRVDFCGKGYHLMSFPQCAPHGVVFLHVTYVPAQEKNFTTAPAICHDGKAHFPREGVFVSNGTHWFVTQRNFYEPQIITTDNTFVSGNCDVVIGIVNNTVYDPLQPELDSFKEELDKYFKNHTSPDVDLGDISGINASVVNIQKEIDRLNEVAKNLNESLIDLQELGKYEQYIKGGGGSDIIKLLNEQVNKEMQSSNLYMSMSSWCYTHSLDGAGLFLFDHAAEEYEHAKKLIIFLNENNVPVQLTSISAPEHKFEGLTQIFQKAYEHEQHISESINNIVDHAIKSKDHATFNFLQWYVAEQHEEEVLFKDILDKIELIGNENHGLYLADQYVKGIAKSRKS

SEQ ID NO: 5617 - protein, 1379 aa, Artificial Sequence
  SARS-CoV-2/Iceland/189/2020__EPI_ISL_417709 spike protein (1-1211)(T874C_S1055C) Ferritin construct
MFVFLVLLPLVSSQCVNLTTRTQLPPAYTNSFTRGVYYPDKVFRSSVLHSTQDLFLPFFSNVTWFHAIHVSGTNGTKRFDNPVLPFNDGVYFASTEKSNIIRGWIFGTTLDSKTQSLLIVNNATNVVIKVCEFQFCNDPFLGVYYHKNNKSWMESEFRVYSSANNCTFEYVSQPFLMDLEGKQGNFKNLREFVFKNIDGYFKIYSKHTPINLVRDLPQGFSALEPLVDLPIGINITRFQTLLALHRSYLTPGDSSSGWTAGAAAYYVGYLQPRTFLLKYNENGTITDAVDCALDPLSETKCTLKSFTVEKGIYQTSNFRVQPTESIVRFPNITNLCPFGEVFNATRFASVYAWNRKRISNCVADYSVLYNSASFSTFKCYGVSPTKLNDLCFTNVYADSFVIRGDEVRQIAPGQTGKIADYNYKLPDDFTGCVIAWNSNNLDSKVGGNYNYLYRLFRKSNLKPFERDISTEIYQAGSTPCNGVEGFNCYFPLQSYGFQPTNGVGYQPYRVVVLSFELLHAPATVCGPKKSTNLVKNKCVNFNFNGLTGTGVLTESNKKFLPFQQFGRDIADTTDAVRDPQTLEILDITPCSFGGVSVITPGTNTSNQVAVLYQGVNCTEVPVAIHADQLTPTWRVYSTGSNVFQTRAGCLIGAEHVNNSYECDIPIGAGICASYQTQTNSPRRARSVASQSIIAYTMSLGAENSVAYSNNSIAIPTNFTISVTTEILPVSMTKTSVDCTMYICGDSTECSNLLLQYGSFCTQLNRALTGIAVEQDKNTQEVFAQVKQIYKTPPIKDFGGFNFSQILPDPSKPSKRSFIEDLLFNKVTLADAGFTKQYGDCLGDIAARDLICAQKFNGLTVLPPLLTDEMIAQYCSALLAGTITSGWTFGAGAALQIPFAMQMAYRFNGIGVTQNVLYENQKLIANQFNSAIGKIQDSLSSTASALGKLQDVVNQNAQALNTLVKQLSSNFGAISSVLNDILSRLDKVEAEVQIDRLITGRLQSLQTYVTQQLIRAAEIRASANLAATKMSECVLGQSKRVDFCGKGYHLMSFPQCAPHGVVFLHVTYVPAQEKNFTTAPAICHDGKAHFPREGVFVSNGTHWFVTQRNFYEPQIITTDNTFVSGNCDVVIGIVNNTVYDPLQPELDSFKEELDKYFKNHTSPDVDLGDISGINASVVNIQKEIDRLNEVAKNLNESLIDLQELGKYEQYIKGGGGSDIIKLLNEQVNKEMQSSNLYMSMSSWCYTHSLDGAGLFLFDHAAEEYEHAKKLIIFLNENNVPVQLTSISAPEHKFEGLTQIFQKAYEHEQHISESINNIVDHAIKSKDHATFNFLQWYVAEQHEEEVLFKDILDKIELIGNENHGLYLADQYVKGIAKSRKS

SEQ ID NO: 5618 - protein, 1379 aa, Artificial Sequence
  SARS-CoV-2/Australia/NSW56/2020__EPI_ISL_417408 spike protein (1-1211)(T874C_S1055C) Ferritin construct
MFVFLVLLPLVSSQCVNLTTRTQLPPAYTNSFTRGVYYPDKVFRSSVLHSTQDLFLPFFSNVTWFHAIHVSGTNGTKRFDNPVLPFNDGVYFASTEKSNIIRGWIFGTTLDSKTQSLLIVNNATNVVIKVCEFQFCNDPFLGVYYHKNNKSWMESEFRVYSSANNCTFEYVSQPFLMDLEGKQGNFKNLREFVFKNIDGYFKIYSKHTPINLVRDLPQGFSALEPLVDLPIGINITRFQTLLALHRSYLTPGDSSSGWTAGAAAYYVGYLQPRTFLLKYNENGTITDAVDCALDPLSETKCTLKSFTVEKGIYQTSNFRVQPTESIVRFPNITNLCPFGEVFNATRFASVYAWNRKRISNCVADYSVLYNSASFSTFKCYGVSPTKLNDLCFTNVYADSFVIRGDEVRQIAPGQTGKIADYNYKLPDDFTGCVIAWNSNNLDSKVGGNYNYLYRLFRKSNLKPFERDISTEIYQAGSTPCNGVEGFNCYFPLQSYGFQPTNGVGYQPYRVVVLSFELLHAPATVCGPKKSTNLVKNKCVNFNFNGLTGTGVLTESNKKFLPFQQFGRDIADTTDAVRDPQTLEILDITPCSFGGVSVITPGTNTSNQVAVLYQDVNCTEVPVAIHADQLTPTWRVYSTGSNVFQTRAGCLIGAEHVNNSYECDIPIGAGICASYQTQTNSPRRARSVASQSIIAYTMSLGAENSVAYSNNSIAIPTNFTISVTTEILPVSMTKTSVDCTMYICGDSTECSNLLLQYGSFCTQLNRALTGIAVEQDKNTQEVFAQVKQIYKTPPIKDFGGFNFSQILPDSSKPSKRSFIEDLLFNKVTLADAGFIKQYGDCLGDIAARDLICAQKFNGLTVLPPLLTDEMIAQYCSALLAGTITSGWTFGAGAALQIPFAMQMAYRFNGIGVTQNVLYENQKLIANQFNSAIGKIQDSLSSTASALGKLQDVVNQNAQALNTLVKQLSSNFGAISSVLNDILSRLDKVEAEVQIDRLITGRLQSLQTYVTQQLIRAAEIRASANLAATKMSECVLGQSKRVDFCGKGYHLMSFPQCAPHGVVFLHVTYVPAQEKNFTTAPAICHDGKAHFPREGVFVSNGTHWFVTQRNFYEPQIITTDNTFVSGNCDVVIGIVNNTVYDPLQPELDSFKEELDKYFKNHTSPDVDLGDISGINASVVNIQKEIDRLNEVAKNLNESLIDLQELGKYEQYIKGGGGSDIIKLLNEQVNKEMQSSNLYMSMSSWCYTHSLDGAGLFLFDHAAEEYEHAKKLIIFLNENNVPVQLTSISAPEHKFEGLTQIFQKAYEHEQHISESINNIVDHAIKSKDHATFNFLQWYVAEQHEEEVLFKDILDKIELIGNENHGLYLADQYVKGIAKSRKS

SEQ ID NO: 5619 - protein, 1379 aa, Artificial Sequence
  SARS-CoV-2/Iceland/280/2020__EPI_ISL_417608 spike protein (1-1211)(T874C_S1055C) Ferritin construct
MFVFLVLLPLVSSQCVNLTTRTQLPPAYTNSFTRGVYYPDKVFRSSVLHSTQDLFLPFFSNVTWFHAIHVSGTNGTKRFDNPVLPFNDGVYFASTEKSNIIRGWIFGTTLDSKTQSLLIVNNATNVVIKVCEFQFCNDPFLGVYYHKNNKSWMESEFRVYSSANNCTFEYVSQPFLMDLEGKQGNFKNLREFVFKNIDGYFKIYSKHTPINLVRDLPQGFSALEPLVDLPIGINITRFQTLLALHRSYLTPGDSSSGWTAGAAAYYVGYLQPRTFLLKYNENGTITDAVDCALDPLSETKCTLKSFTVEKGIYQTSNFRVQPTESIVRFPNITNLCPFGEVFNATRFASVYAWNRKRISNCVADYSVLYNSASFSTFKCYGVSPTKLNDLCFTNVYADSFVIRGDEVRQIAPGQTGKIADYNYKLPDDFTGCVIAWNSNNLDSKVGGNYNYLYRLFRKSNLKPFERDISTEIYQAGSTPCNGVEGFNCYFPLQSYGFQPTNGVGYQPYRVVVLSFELLHAPATVCGPKKSTNLVKNKCVNFNFNGLTGTGVLTESNKKFLPFQQFGRDIADTTDAVRDPQTLEILDITPCSFGGVSVITPGTNTSNQVAVLYQGVNCTEVPVAIHADQLTPTWRVYSTGSNVFQTRAGCLIGAEHVNNSYECDIPIGAGICASYHTQTNSPRRARSVASQSIIAYTMSLGAENSVAYSNNSIAIPTNFTISVTTEILPVSMTKTSVDCTMYICGDSTECSNLLLQYGSFCTQLNRALTGIAVEQDKNTQEVFAQVKQIYKTPPIKDFGGFNFSQILPDPSKPSKRSFIEDLLFNKVTLADAGFIKQYGDCLGDIAARDLICAQKFNGLTVLPPLLTDEMIAQYCSALLAGTITSGWTFGAGAALQIPFAMQMAYRFNGIGVTQNVLYENQKLIANQFNSAIGKIQDSLSSTASALGKLQDVVNQNAQALNTLVKQLSSNFGAISSVLNDILSRLDKVEAEVQIDRLITGRLQSLQTYVTQQLIRAAEIRASANLAATKMSECVLGQSKRVDFCGKGYHLMSFPQCAPHGVVFLHVTYVPAQEKNFTTAPAICHDGKAHFPREGVFVSNGTHWFVTQRNFYEPQIITTDNTFVSGNCDVVIGIVNNTVYDPLQPELDSFKEELDKYFKNHTSPDVDLGDISGINASVVNIQKEIDRLNEVAKNLNESLIDLQELGKYEQYIKGGGGSDIIKLLNEQVNKEMQSSNLYMSMSSWCYTHSLDGAGLFLFDHAAEEYEHAKKLIIFLNENNVPVQLTSISAPEHKFEGLTQIFQKAYEHEQHISESINNIVDHAIKSKDHATFNFLQWYVAEQHEEEVLFKDILDKIELIGNENHGLYLADQYVKGIAKSRKS

SEQ ID NO: 5620 - protein, 1379 aa, Artificial Sequence; identical to SEQ ID NO: 5575
  SARS-CoV-2/Iceland/247/2020__EPI_ISL_417575 spike protein (1-1211)(T874C_S1055C) Ferritin construct

SEQ ID NO: 5621 - protein, 1379 aa, Artificial Sequence
  SARS-CoV-2/Iceland/238/2020__EPI_ISL_417566 spike protein (1-1211)(T874C_S1055C) Ferritin construct
MFVFLVLLPLVSSQCVNLTTRTQLPPAYTNSFTRGVYYPDKVFRSSVLHSTQDLFLPFFSNVTWFHAIHVSGTNGTKRFDNPVLPFNDGVYFASTEKSNIIRGWIFGTTLDSKTQSLLIVNNATNVVIKVCEFQFCNDPFLGVYYHKNNKSWMESEFRVYSSANNCTFEYVSQPFLMDLEGKQGNFKNLREFVFKNIDGYFKIYSKHTPINLVRDLPQGFSALEPLVDLPIGINITRFQTLLALHRSYLTPGDSSSGWTAGAAAYYVGYLQPRTFLLKYNENGTITDAVDCALDPLSETKCTLKSFTVEKGIYQTSNFRVQPTESIVRFPNITNLCPFGEVFNATRFASVYAWNRKRISNCVADYSVLYNSASFSTFKCYGVSPTKLNDLCFTNVYADSFVIRGDEVRQIAPGQTGKIADYNYKLPDDFTGCVIAWNSNNLDSKVGGNYNYLYRLFRKSNLKPFERDISTEIYQAGSTPCNGVEGFNCYFPLQSYGFQPTNGVGYQPYRVVVLSFELLHAPATVCGPKKSTNLVKNKCVNFNFNGLTGTGVLTESNKKFLPFQQFGRDIADTTDAVRDPQTLEILDITPCSFGGVSVITPGTNTSNQVAVLYQGVNCTEVPVAIHADQLTPTWRVYSTGSNVFQTRAGCLIGAEHVNNSYECDIPIGAGICASYQTQTNSPRRARSVASQSIIAYTMSLGAENSVAYSNNSIAIPTNFTISVTTEILPVSMTKTSVDCTMYICGDSTECSNLLLQYGSFCTQLNRALTGIAVEQDKNTQEVFAQVKQIYKTPPIKDFGGFNFSQILPDPSKPSKRSFIEDLLFNKVTLADVGFIKQYGDCLGDIAARDLICAQKFNGLTVLPPLLTDEMIAQYCSALLAGTITSGWTFGAGAALQIPFAMQMAYRFNGIGVTQNVLYENQKLIANQFNSAIGKIQDSLSSTASALGKLQDVVNQNAQALNTLVKQLSSNFGAISSVLNDILSRLDKVEAEVQIDRLITGRLQSLQTYVTQQLIRAAEIRASANLAATKMSECVLGQSKRVDFCGKGYHLMSFPQCAPHGVVFLHVTYVPAQEKNFTTAPAICHDGKAHFPREGVFVSNGTHWFVTQRNFYEPQIITTDNTFVSGNCDVVIGIVNNTVYDPLQPELDSFKEELDKYFKNHTSPDVDLGDISGINASVVNIQKEIDRLNEVAKNLNESLIDLQELGKYEQYIKGGGGSDIIKLLNEQVNKEMQSSNLYMSMSSWCYTHSLDGAGLFLFDHAAEEYEHAKKLIIFLNENNVPVQLTSISAPEHKFEGLTQIFQKAYEHEQHISESINNIVDHAIKSKDHATFNFLQWYVAEQHEEEVLFKDILDKIELIGNENHGLYLADQYVKGIAKSRKS

SEQ ID NO: 5622 - protein, 1379 aa, Artificial Sequence
  SARS-CoV-2/Greece/16/2020__EPI_ISL_418265 spike protein (1-1211)(T874C_S1055C) Ferritin construct
MFVFLVLLPLVSSQCVNLTTRTQLPPAYTNSFTRGVYYPDKVFRSSVLHSTQDLFLPFFSNVTWFHAIHVSGTNGTKRFDNPVLPFNDGVYFASTEKSNIIRGWIFGTTLDSKTQSLLIVNNATNVVIKVCEFQFCNDPFLGVYYHKNNKSWMESEFRVYSSANNCTFEYVSQPFLMDLEGKQGNFKNLREFVFKNVDGYFKIYSKHTPINLVRDLPQGFSALEPLVDLPIGINITRFQTLLALHRSYLTPGDSSSGWTAGAAAYYVGYLQPRTFLLKYNENGTITDAVDCALDPLSETKCTLKSFTVEKGIYQTSNFRVQPTESIVRFPNITNLCPFGEVFNATRFASVYAWNRKRISNCVADYSVLYNSASFSTFKCYGVSPTKLNDLCFTNVYADSFVIRGDEVRQIAPGQTGKIADYNYKLPDDFTGCVIAWNSNNLDSKVGGNYNYLYRLFRKSNLKPFERDISTEIYQAGSTPCNGVEGFNCYFPLQSYGFQPTNGVGYQPYRVVVLSFELLHAPATVCGPKKSTNLVKNKCVNFNFNGLTGTGVLTESNKKFLPFQQFGRDIADTTDAVRDPQTLEILDITPCSFGGVSVITPGTNTSNQVAVLYQDVNCTEVPVAIHADQLTPTWRVYSTGSNVFQTRAGCLIGAEHVNNSYECDIPIGAGICASYQTQTNSPRRARSVASQSIIAYTMSLGAENSVAYSNNSIAIPTNFTISVTTEILPVSMTKTSVDCTMYICGDSTECSNLLLQYGSFCTQLNRALTGIAVEQDKNTQEVFAQVKQIYKTPPIKDFGGFNFSQILPDPSKPSKRSFIEDLLFNKVTLADAGFIKQYGDCLGDIAARDLICAQKFNGLTVLPPLLTDEMIAQYCSALLAGTITSGWTFGAGAALQIPFAMQMAYRFNGIGVTQNVLYENQKLIANQFNSAIGKIQDSLSSTASALGKLQDVVNQNAQALNTLVKQLSSNFGAISSVLNDILSRLDKVEAEVQIDRLITGRLQSLQTYVTQQLIRAAEIRASANLAATKMSECVLGQSKRVDFCGKGYHLMSFPQCAPHGVVFLHVTYVPAQEKNFTTAPAICHDGKAHFPREGVFVSNGTHWFVTQRNFYEPQIITTDNTFVSGNCDVVIGIVNNTVYDPLQPELDSFKEELDKYFKNHTSPDVDLGDISGINASVVNIQKEIDRLNEVAKNLNESLIDLQELGKYEQYIKGGGGSDIIKLLNEQVNKEMQSSNLYMSMSSWCYTHSLDGAGLFLFDHAAEEYEHAKKLIIFLNENNVPVQLTSISAPEHKFEGLTQIFQKAYEHEQHISESINNIVDHAIKSKDHATFNFLQWYVAEQHEEEVLFKDILDKIELIGNENHGLYLADQYVKGIAKSRKS

SEQ ID NO: 5623 - protein, 1379 aa, Artificial Sequence
  SARS-CoV-2/Iceland/319/2020__EPI_ISL_417648 spike protein (1-1211)(T874C_S1055C) Ferritin construct
MFVFLVLLPLVSSQCVNLTTRTQLPPAYTNSFTRGVYYPDKVFRSSVLHSTQDLFLPFFSNVTWFHAIHVSGTNGTKRFDNPVLPFNDGVYFASTEKSNIIRGWIFGTTLDSKTQSLLIVNNATNVVIKVCEFQFCNDPFLGVYYHKNNKSWMESEFRVYSSANNCTFEYVSQPFLIDLEGKQGNFKNLREFVFKNIDGYFKIYSKHTPINLVRDLPQGFSALEPLVDLPIGINITRFQTLLALHRSYLTPGDSSSGWTAGAAAYYVGYLQPRTFLLKYNENGTITDAVDCALDPLSETKCTLKSFTVEKGIYQTSNFRVQPTESIVRFPNITNLCPFGEVFNATRFASVYAWNRKRISNCVADYSVLYNSASFSTFKCYGVSPTKLNDLCFTNVYADSFVIRGDEVRQIAPGQTGKIADYNYKLPDDFTGCVIAWNSNNLDSKVGGNYNYLYRLFRKSNLKPFERDISTEIYQAGSTPCNGVEGFNCYFPLQSYGFQPTNGVGYQPYRVVVLSFELLHAPATVCGPKKSTNLVKNKCVNFNFNGLTGTGVLTESNKKFLPFQQFGRDIADTTDAVRDPQTLEILDITPCSFGGVSVITPGTNTSNQVAVLYQGVNCTEVPVAIHADQLTPTWRVYSTGSNVFQTRAGCLIGAEHVNNSYECDIPIGAGICASYQTQTNSPRRARSVASQSIIAYTMSLGAENSVAYSNNSIAIPTNFTISVTTEILPVSMTKTSVDCTMYICGDSTECSNLLLQYGSFCTQLNRALTGIAVEQDKNTQEVFAQVKQIYKTPPIKDFGGFNFSQILPDPSKPSKRSFIEDLLFNKVTLADAGFIKQYGDCLGDIAARDLICAQKFNGLTVLPPLLTDEMIAQYCSALLAGTITSGWTFGAGAALQIPFAMQMAYRFNGIGVTQNVLYENQKLIANQFNSAIGKIQDSLSSTASALGKLQDVVNQNAQALNTLVKQLSSNFGAISSVLNDILSRLDKVEAEVQIDRLITGRLQSLQTYVTQQLIRAAEIRASANLAATKMSECVLGQSKRVDFCGKGYHLMSFPQCAPHGVVFLHVTYVPAQEKNFTTAPAICHDGKAHFPREGVFVSNGTHWFVTQRNFYEPQIITTDNTFVSGNCDVVIGIVNNTVYDPLQPELDSFKEELDKYFKNHTSPDVDLGDISGINASVVNIQKEIDRLNEVAKNLNESLIDLQELGKYEQYIKGGGGSDIIKLLNEQVNKEMQSSNLYMSMSSWCYTHSLDGAGLFLFDHAAEEYEHAKKLIIFLNENNVPVQLTSISAPEHKFEGLTQIFQKAYEHEQHISESINNIVDHAIKSKDHATFNFLQWYVAEQHEEEVLFKDILDKIELIGNENHGLYLADQYVKGIAKSRKS

SEQ ID NO: 5624 - protein, 1379 aa, Artificial Sequence
  SARS-CoV-2/Congo/94/2020__EPI_ISL_417947 spike protein (1-1211)(T874C_S1055C) Ferritin construct
MFVFLVLLPLVSSQCVNLTTRTQLPPAYTNSFTRGVYYPDKVFRSSVLHSTQDLFLPFFSNVTWFHAIHVSGTNGTKRFDNPVLPFNDGVYFASTEKSNIIRGWIFGTTLDSKTQSLLIVNNATNVVIKVCEFQFCNDPFLGVYYHKNNKSWMESEFRVYSSANNCTFEYVSQPFLMDLEGKQGNFKNLREFVFKNIDGYFKIYSKHTPINLVRDLPQGFSALEPLVDLPIGINITRFQTLLALHRSYLTPGDSSSGWTAGAAAYYVGYLQPRTFLLKYNENGTITDAVDCALDPLSETKCTLKSFTVEKGIYQTSNFRVQPTESIVRFPNITNLCPFGEVFNATRFASVYAWNRKRISNCVADYSVLYNSASFSTFKCYGVSPTKLNDLCFTNVYADSFVIRGDEVRQIAPGQTGKIADYNYKLPDDFTGCVIAWNSNNLDSKVGGNYNYLYRLFRKSNLKPFERDISTEIYQAGSTPCNGVEGFNCYFPLQSYGFQPTNGVGYQPYRVVVLSFELLHAPATVCGPKKSTNLVKNKCVNFNFNGLTGTGVLTESNKKFLPFQQFGRDIADTTDAVRDPQTLEILDITPCSFGGVSVITPGTNTSNQVAVLYQGVNCTEVPVAIHADQLTPTWRVYSTGSNVFQTRAGCLIGAEHVNNSYECDIPIGAGICASYQTQTNSPRRARSVASQSIIAYTMSLGAENSVAYSNNSIAIPTNFTISVTTEILPVSMTKTSVDCTMYICGDSTECSNLLLQYGSFCTQLNRALTGIAVEQDKNTQEVFAQVKQIYKTPPIKDFGGFNFSQILPDPSKPSKRSFIEDILFNKVTLADAGFIKQYGDCLGDIAARDLICAQKFNGLTVLPPLLTDEMIAQYCSALLAGTITSGWTFGAGAALQIPFAMQMAYRFNGIGVTQNVLYENQKLIANQFNSAIGKIQDSLSSTASALGKLQDVVNQNAQALNTLVKQLSSNFGAISSVLNDILSRLDKVEAEVQIDRLITGRLQSLQTYVTQQLIRAAEIRASANLAATKMSECVLGQSKRVDFCGKGYHLMSFPQCAPHGVVFLHVTYVPAQEKNFTTAPAICHDGKAHFPREGVFVSNGTHWFVTQRNFYEPQIITTDNTFVSGNCDVVIGIVNNTVYDPLQPELDSFKEELDKYFKNHTSPDVDLGDISGINASVVNIQKEIDRLNEVAKNLNESLIDLQELGKYEQYIKGGGGSDIIKLLNEQVNKEMQSSNLYMSMSSWCYTHSLDGAGLFLFDHAAEEYEHAKKLIIFLNENNVPVQLTSISAPEHKFEGLTQIFQKAYEHEQHISESINNIVDHAIKSKDHATFNFLQWYVAEQHEEEVLFKDILDKIELIGNENHGLYLADQYVKGIAKSRKS

SEQ ID NO: 5625 - protein, 1379 aa, Artificial Sequence
  SARS-CoV-2/Congo/158/2020__EPI_ISL_417950 spike protein (1-1211)(T874C_S1055C) Ferritin construct
MFVFLVLLPLVSSQCVNLTTRTQLPPAYTNSFTRGVYYPDKVFRSSVLHSTQDLFLPFFSNVTWFHAIHVSGTNGTKRFDNPVLPFNDGVYFASTEKSNIIRGWIFGTTLDSKTQSLLIVNNATNVVIKVCEFQFCNDPFLGVYYHKNNKSWMESEFRVYSSANNCTFEYVSQPFLMDLEGKQGNFKNLREFVFKNIDGYFKIYSKHTPINLVRDLPQGFSALEPLVDLPIGINITRFQTLLALHRSYLTPGDSSSGWTAGAAAYYVGYLQPRTFLLKYNENGTITDAVDCALDPLSETKCTLKSFTVEKGIYQTSNFRVQPTESIVRFPNITNLCPFGEVFNATRFASVYAWNRKRISNCVADYSVLYNSASFSTFKCYGVSPTKLNDLCFTNVYADSFVIRGDEVRQIAPGQTGKIADYNYKLPDDFTGCVIAWNSNNLDSKVGGNYNYLYRLFRKSNLKPFERDISTEIYQAGSTPCNGVEGFNCYFPLQSYGFQPTNGVGYQPYRVVVLSFELLHAPATVCGPKKSTNLVKNKCVNFNFNGLTGTGVLTESNKKFLPFQQFGRDIADTTDAVRDPQTLEILDITPCSFGGVSVITPGTNTSNQVAVLYQDVNCTEVPVAIHADQLTPTWRVYSTGSNVFQTRAGCLIGAEHVNNSYECDIPIGAGICASYQTQTNSPRRARSVASQSIIAYTMSLGAENSVAYSNNSIAIPTNFTISVTTEILPVSMTKTSVDCTMYICGDSTECSNLLLQYGSFCTQLNRALTGIAVEQDKNTQEVFAQVKQIYKTPPIKDFGGFNFSQILPDPSKPSKRSFIEDLLFNKVTLADAGFIKQYGDCLGDIAARDLICAQKFNGLTVLPPLLTDEMIAQYCSALLAGTITSGWTFGAGAALQIPFAMQMAYRFNGIGVTQNVLYENQKLIANQFNSAIGKIQDSLSSTASALGKLQDVVNQNAQALNTLVKQLSSNFGAISSVLNDILSRLDKVEAEVQIDRLITGRLQSLQTYVTQQLIRAAEIRASANLAATKMSECVLGQSKRVDFCGKGYHLMSFPQCAPHGVVFLHVTYVPAQEKNFTTAPAICHDGKAHFPREGVFVSNGTHWFVTQRNFYEPQIITTDNTFLSGNCDVVIGIVNNTVYDPLQPELDSFKEELDKYFKNHTSPDVDLGDISGINASVVNIQKEIDRLNEVAKNLNESLIDLQELGKYEQYIKGGGGSDIIKLLNEQVNKEMQSSNLYMSMSSWCYTHSLDGAGLFLFDHAAEEYEHAKKLIIFLNENNVPVQLTSISAPEHKFEGLTQIFQKAYEHEQHISESINNIVDHAIKSKDHATFNFLQWYVAEQHEEEVLFKDILDKIELIGNENHGLYLADQYVKGIAKSRKS

SEQ ID NO: 5626 - protein, 1379 aa, Artificial Sequence
  SARS-CoV-2/USA/UT-00034/2020__EPI_ISL_417977 spike protein (1-1211)(T874C_S1055C) Ferritin construct
MFVFLVLLPLVSSQCVNLTTRTQLPPAYTNSFTRGVYYPDKVFRSSVLHSTQDLFLPFFSNVTWFHAIHVSGTNGTKRFDNPVLPFNDGVYFASTEKSNIIRGWIFGTTLDSKTQSLLIVNNATNVVIKVCEFQFCNDPFLGVYYYKNNKSWMESEFRVYSSANNCTFEYVSQPFLMDLEGKQGNFKNLREFVFKNIDGYFKIYSKHTPINLVRDLPQGFSALEPLVDLPIGINITRFQTLLALHRSYLTPGDSSSGWTAGAAAYYVGYLQPRTFLLKYNENGTITDAVDCALDPLSETKCTLKSFTVEKGIYQTSNFRVQPTESIVRFPNITNLCPFGEVFNATRFASVYAWNRKRISNCVADYSVLYNSASFSTFKCYGVSPTKLNDLCFTNVYADSFVIRGDEVRQIAPGQTGKIADYNYKLPDDFTGCVIAWNSNNLDSKVGGNYNYLYRLFRKSNLKPFERDISTEIYQAGSTPCNGVEGFNCYFPLQSYGFQPTNGVGYQPYRVVVLSFELLHAPATVCGPKKSTNLVKNKCVNFNFNGLTGTGVLTESNKKFLPFQQFGRDIADTTDAVRDPQTLEILDITPCSFGGVSVITPGTNTSNQVAVLYQGVNCTEVPVAIHADQLTPTWRVYSTGSNVFQTRAGCLIGAEHVNNSYECDIPIGAGICASYQTQTNSPRRARSVASQSIIAYTMSLGAENSVAYSNNSIAIPTNFTISVTTEILPVSMTKTSVDCTMYICGDSTECSNLLLQYGSFCTQLNRALTGIAVEQDKNTQEVFAQVKQIYKTPPIKDFGGFNFSQILPDPSKPSKRSFIEDLLFNKVTLADAGFIKQYGDCLGDIAARDLICAQKFNGLTVLPPLLTDEMIAQYCSALLAGTITSGWTFGAGAALQIPFAMQMAYRFNGIGVTQNVLYENQKLIANQFNSAIGKIQDSLSSTASALGKLQDVVNQNAQALNTLVKQLSSNFGAISSVLNDILSRLDKVEAEVQIDRLITGRLQSLQTYVTQQLIRAAEIRASANLAATKMSECVLGQSKRVDFCGKGYHLMSFPQCAPHGVVFLHVTYVPAQEKNFTTAPAICHDGKAHFPREGVFVSNGTHWFVTQRNFYEPQIITTDNTFVSGNCDVVIGIVNNTVYDPLQPELDSFKEELDKYFKNHTSPDVDLGDISGINASVVNIQKEIDRLNEVAKNLNESLIDLQELGKYEQYIKGGGGSDIIKLLNEQVNKEMQSSNLYMSMSSWCYTHSLDGAGLFLFDHAAEEYEHAKKLIIFLNENNVPVQLTSISAPEHKFEGLTQIFQKAYEHEQHISESINNIVDHAIKSKDHATFNFLQWYVAEQHEEEVLFKDILDKIELIGNENHGLYLADQYVKGIAKSRKS

SEQ ID NO: 5627 - protein, 1379 aa, Artificial Sequence
  SARS-CoV-2/USA/UT-00033/2020__EPI_ISL_417976 spike protein (1-1211)(T874C_S1055C) Ferritin construct
MFVFLVLLPLVSSQCVNLTTRTQLPPAYTNSFTRGVYYPDKVFRSSVLHSTQDLFLPFFSNVTWFHAIHVSGTNGTKRFDNPVLPFNDGVYFASTEKSNIIRGWIFGTTLDSKTQSLLIVNNATNVVIKVCEFQFCNDPFLGVYYHKNNKSWMESEFRVYSSANNCTFEYVSQPFLMDLEGKQGNFKNLREFVFKNIDGYFKIYSKHTPINLVRDLPQGFSALEPLVDLPIGINITRFQTLLALHRSYLTPGDSSSGLTAGAAAYYVGYLQPRTFLLKYNENGTITDAVDCALDPLSETKCTLKSFTVEKGIYQTSNFRVQPTESIVRFPNITNLCPFGEVFNATRFASVYAWNRKRISNCVADYSVLYNSASFSTFKCYGVSPTKLNDLCFTNVYADSFVIRGDEVRQIAPGQTGKIADYNYKLPDDFTGCVIAWNSNNLDSKVGGNYNYLYRLFRKSNLKPFERDISTEIYQAGSTPCNGVEGFNCYFPLQSYGFQPTNGVGYQPYRVVVLSFELLHAPATVCGPKKSTNLVKNKCVNFNFNGLTGTGVLTESNKKFLPFQQFGRDIADTTDAVRDPQTLEILDITPCSFGGVSVITPGTNTSNQVAVLYQGVNCTEVPVAIHADQLTPTWRVYSTGSNVFQTRAGCLIGAEHVNNSYECDIPIGAGICASYQTQTNSPRRARSVASQSIIAYTMSLGAENSVAYSNNSIAIPTNFTISVTTEILPVSMTKTSVDCTMYICGDSTECSNLLLQYGSFCTQLNRALTGIAVEQDKNTQEVFAQVKQIYKTPPIKDFGGFNFSQILPDPSKPSKRSFIEDLLFNKVTLADAGFIKQYGDCLGDIAARDLICAQKFNGLTVLPPLLTDEMIAQYCSALLAGTITSGWTFGAGAALQIPFAMQMAYRFNGIGVTQNVLYENQKLIANQFNSAIGKIQDSLSSTASALGKLQDVVNQNAQALNTLVKQLSSNFGAISSVLNDILSRLDKVEAEVQIDRLITGRLQSLQTYVTQQLIRAAEIRASANLAATKMSECVLGQSKRVDFCGKGYHLMSFPQCAPHGVVFLHVTYVPAQEKNFTTAPAICHDGKAHFPREGVFVSNGTHWFVTQRNFYEPQIITTDNTFVSGNCDVVIGIVNNTVYDPLQPELDSFKEELDKYFKNHTSPDVDLGDISGINASVVNIQKEIDRLNEVAKNLNESLIDLQELGKYEQYIKGGGGSDIIKLLNEQVNKEMQSSNLYMSMSSWCYTHSLDGAGLFLFDHAAEEYEHAKKLIIFLNENNVPVQLTSISAPEHKFEGLTQIFQKAYEHEQHISESINNIVDHAIKSKDHATFNFLQWYVAEQHEEEVLFKDILDKIELIGNENHGLYLADQYVKGIAKSRKS

SEQ ID NO: 5628 - protein, 1379 aa, Artificial Sequence
  SARS-CoV-2/USA/WI-13/2020__EPI_ISL_417516 spike protein (1-1211)(T874C_S1055C) Ferritin construct
MFVFLVLLPLVSSQCVNLTTRTQLPPAYTNSFTRGVYYPDKVFRSSVLHSTQDLFLPFFSNVTWFHAIHVSGTNGTKRFDNPVLPFNDGVYFASTEKSNIIRGWIFGTTLDSKTQSLLIVNNATNVVIKVCEFQFCNDPFLGVYYHKNNKSWMESEFRVYSSANNCTFEYVSQPFLMDLEGKQGNFKNLREFVFKNIDGYFKIYSKHTPINLVRDLPQGFSALEPLVDLPIGINITRFQTLLALHRSYLTPGDSSSGWTAGAAAYYVGYLQPRTFLLKYNENGTITDAVDCALDPLSETKCTLKSFTVEKGIYQTSNFRVLPTESIVRFPNITNLCPFGEVFNATRFASVYAWNRKRISNCVADYSVLYNSASFSTFKCYGVSPTKLNDLCFTNVYADSFVIRGDEVRQIAPGQTGKIADYNYKLPDDFTGCVIAWNSNNLDSKVGGNYNYLYRLFRKSNLKPFERDISTEIYQAGSTPCNGVEGFNCYFPLQSYGFQPTNGVGYQPYRVVVLSFELLHAPATVCGPKKSTNLVKNKCVNFNFNGLTGTGVLTESNKKFLPFQQFGRDIADTTDAVRDPQTLEILDITPCSFGGVSVITPGTNTSNQVAVLYQGVNCTEVPVAIHADQLTPTWRVYSTGSNVFQTRAGCLIGAEHVNNSYECDIPIGAGICASYQTQTNSPRRARSVASQSIIAYTMSLGAENSVAYSNNSIAIPTNFTISVTTEILPVSMTKTSVDCTMYICGDSTECSNLLLQYGSFCTQLNRALTGIAVEQDKNTQEVFAQVKQIYKTPPIKDFGGFNFSQILPDPSKPSKRSFIEDLLFNKVTLADAGFIKQYGDCLGDIAARDLICAQKFNGLTVLPPLLTDEMIAQYCSALLAGTITSGWTFGAGAALQIPFAMQMAYRFNGIGVTQNVLYENQKLIANQFNSAIGKIQDSLSSTASALGKLQDVVNQNAQALNTLVKQLSSNFGAISSVLNDILSRLDKVEAEVQIDRLITGRLQSLQTYVTQQLIRAAEIRASANLAATKMSECVLGQSKRVDFCGKGYHLMSFPQCAPHGVVFLHVTYVPAQEKNFTTAPAICHDGKAHFPREGVFVSNGTHWFVTQRNFYEPQIITTDNTFVSGNCDVVIGIVNNTVYDPLQPELDSFKEELDKYFKNHTSPDVDLGDISGINASVVNIQKEIDRLNEVAKNLNESLIDLQELGKYEQYIKGGGGSDIIKLLNEQVNKEMQSSNLYMSMSSWCYTHSLDGAGLFLFDHAAEEYEHAKKLIIFLNENNVPVQLTSISAPEHKFEGLTQIFQKAYEHEQHISESINNIVDHAIKSKDHATFNFLQWYVAEQHEEEVLFKDILDKIELIGNENHGLYLADQYVKGIAKSRKS

SEQ ID NO: 5629 - protein, 1378 aa, Artificial Sequence
  SARS-CoV-2/India/1-27/2020__EPI_ISL_413522 spike protein (1-1210)(T873C_S1054C) Ferritin construct
MFVFLVLLPLVSSQCVNLTTRTQLPPAYTNSFTRGVYYPDKVFRSSVLHSTQDLFLPFFSNVTWFHAIHVSGTNGTKRFDNPVLPFNDGVYFASTEKSNIIRGWIFGTTLDSKTQSLLIVNNATNVVIKVCEFQFCNDPFLGVYHKNNKSWMESEFRVYSSANNCTFEYVSQPFLMDLEGKQGNFKNLREFVFKNIDGYFKIYSKHTPINLVRDLPQGFSALEPLVDLPIGINITRFQTLLALHRSYLTPGDSSSGWTAGAAAYYVGYLQPRTFLLKYNENGTITDAVDCALDPLSETKCTLKSFTVEKGIYQTSNFRVQPTESIVRFPNITNLCPFGEVFNATRFASVYAWNRKRISNCVADYSVLYNSASFSTFKCYGVSPTKLNDLCFTNVYADSFVIRGDEVIQIAPGQTGKIADYNYKLPDDFTGCVIAWNSNNLDSKVGGNYNYLYRLFRKSNLKPFERDISTEIYQAGSTPCNGVEGFNCYFPLQSYGFQPTNGVGYQPYRVVVLSFELLHAPATVCGPKKSTNLVKNKCVNFNFNGLTGTGVLTESNKKFLPFQQFGRDIADTTDAVRDPQTLEILDITPCSFGGVSVITPGTNTSNQVAVLYQDVNCTEVPVAIHADQLTPTWRVYSTGSNVFQTRAGCLIGAEHVNNSYECDIPIGAGICASYQTQTNSPRRARSVASQSIIAYTMSLGAENSVAYSNNSIAIPTNFTISVTTEILPVSMTKTSVDCTMYICGDSTECSNLLLQYGSFCTQLNRALTGIAVEQDKNTQEVFAQVKQIYKTPPIKDFGGFNFSQILPDPSKPSKRSFIEDLLFNKVTLADAGFIKQYGDCLGDIAARDLICAQKFNGLTVLPPLLTDEMIAQYCSALLAGTITSGWTFGAGAALQIPFAMQMAYRFNGIGVTQNVLYENQKLIANQFNSAIGKIQDSLSSTASALGKLQDVVNQNAQALNTLVKQLSSNFGAISSVLNDILSRLDKVEAEVQIDRLITGRLQSLQTYVTQQLIRAAEIRASANLAATKMSECVLGQSKRVDFCGKGYHLMSFPQCAPHGVVFLHVTYVPAQEKNFTTAPAICHDGKAHFPREGVFVSNGTHWFVTQRNFYEPQIITTDNTFVSGNCDVVIGIVNNTVYDPLQPELDSFKEELDKYFKNHTSPDVDLGDISGINASVVNIQKEIDRLNEVAKNLNESLIDLQELGKYEQYIKGGGGSDIIKLLNEQVNKEMQSSNLYMSMSSWCYTHSLDGAGLFLFDHAAEEYEHAKKLIIFLNENNVPVQLTSISAPEHKFEGLTQIFQKAYEHEQHISESINNIVDHAIKSKDHATFNFLQWYVAEQHEEEVLFKDILDKIELIGNENHGLYLADQYVKGIAKSRKS

SEQ ID NO: 5630 - protein, 1373 aa, Artificial Sequence
  SARS-CoV-2/pangolin/Guangxi/P4L/2017__EPI_ISL_410538 spike protein (1-1205)(T868C_S1049C) Ferritin construct
MFVFLFVLPLVSSQCVNLTTRTGIPPGYTNSSTRGVYYPDKVFRSSILHLTQDLFLPFFSNVTWFNTINYQGGFKKFDNPVLPFNDGVYFASTEKSNIIRGWIFGTTLDARTQSLLIVNNATNVVIKVCEFQFCTDPFLGVYYHNNNKTWVENEFRVYSSANNCTFEYISQPFLMDLEGKQGNFKNLREFVFKNVDGYFKIYSKHTPIDLVRDLPRGFAALEPLVDLPIGINITRFQTLLALHRSYLTPGNLESGWTTGAAAYYVGYLQQRTFLLSYNQNGTITDAVDCSLDPLSETKCTLKSLTVEKGIYQTSNFRVQPTISIVRFPNITNLCPFGEVFNASKFASVYAWNRKRISNCVADYSVLYNSTSFSTFKCYGVSPTKLNDLCFTNVYADSFVVKGDEVRQIAPGQTGVIADYNYKLPDDFTGCVIAWNSVKQDALTGGNYGYLYRLFRKSKLKPFERDISTEIYQAGSTPCNGQVGLNCYYPLERYGFHPTTGVNYQPFRVVVLSFELLNGPATVCGPKLSTTLVKDKCVNFNFNGLTGTGVLTTSKKQFLPFQQFGRDISDTTDAVRDPQTLEILDITPCSFGGVSVITPGTNTSNQVAVLYQDVNCTEVPMAIHAEQLTPAWRVYSAGANVFQTRAGCLVGAEHVNNSYECDIPVGAGICASYHSMSSLRSVNQRSIIAYTMSLGAENSVAYSNNSIAIPTNFTISVTTEILPVSMTKTSVDCTMYICGDSIECSNLLLQYGSFCTQLNRALTGIAVEQDKNTQEVFAQVKQIYKTPPIKDFGGFNFSQILPDPSKPSKRSFIEDLLFNKVTLADAGFIKQYGDCLGDIAARDLICAQKFNGLTVLPPLLTDEMIAQYCSALLAGTITSGWTFGAGAALQIPFAMQMAYRFNGIGVTQNVLYENQKLIANQFNSAIGKIQDSLSSTASALGKLQDVVNQNAQALNTLVKQLSSNFGAISSVLNDILSRLDKVEAEVQIDRLITGRLQSLQTYVTQQLIRAAEIRASANLAATKMSECVLGQSKRVDFCGKGYHLMSFPQCAPHGVVFLHVTYVPAQEKNFTTAPAICHEGKAHFPREGVFVSNGTHWFITQRNFYEPQIITTDNTFVSGSCDVVIGIVNNTVYDPLQPELDSFKEELDKYFKNHTSPDVDLGDISGINASVVNIQKEIDRLNEVAKNLNESPIDLQELGKYEQYIKGGGGSDIIKLLNEQVNKEMQSSNLYMSMSSWCYTHSLDGAGLFLFDHAAEEYEHAKKLIIFLNENNVPVQLTSISAPEHKFEGLTQIFQKAYEHEQHISESINNIVDHAIKSKDHATFNFLQWYVAEQHEEEVLFKDILDKIELIGNENHGLYLADQYVKGIAKSRKS

SEQ ID NO: 5631 - protein, 1373 aa, Artificial Sequence
  SARS-CoV-2/pangolin/Guangxi/P5L/2017__EPI_ISL_410540 spike protein (1-1205)(T868C_S1049C) Ferritin construct
MFVFLFVLPLVSSQCVNLTTRTGIPPGYTNSSTRGVYYPDKVFRSSILHLTQDLFLPFFSNVTWFNTINYQGGFKKFDNPVLPFNDGVYFASTEKSNIIRGWIFGTTLDARTQSLLIVNNATNVVIKVCEFQFCTDPFLGVYYHNNNKTWVENEFRVYSSANNCTFEYISQPFLMDLEGKQGNFKNLREFVFKNVDGYFKIYSKHTPIDLVRDLPRGFAALEPLVDLPIGINITRFQTLLALHRSYLTPGKLESGWTTGAAAYYVGYLQQRTFLLSYNQNGTITDAVDCSLDPLSETKCTLKSLTVEKGIYQTSNFRVQPTISIVRFPNITNLCPFGEVFNASKFASVYAWNRKRISNCVADYSVLYNSTSFSTFKCYGVSPTKLNDLCFTNVYADSFVVKGDEVRQIAPGQTGVIADYNYKLPDDFTGCVIAWNSVKQDALTGGNYGYLYRLFRKSKLKPFERDISTEIYQAGSTPCNGQVGLNCYYPLERYGFHPTTGVNYQPFRVVVLSFELLNGPATVCGPKLSTTLVKDKCVNFNFNGLTGTGVLTTSKKQFLPFQQFGRDISDTTDAVRDPQTLEILDITPCSFGGVSVITPGTNTSNQVAVLYQDVNCTEVPMAIHAEQLTPAWRVYSAGANVFQTRAGCLVGAEHVNNSYECDIPVGAGICASYHSMSSFRSVNQRSIIAYTMSLGAENSVAYSNNSIAIPTNFTISVTTEILPVSMTKTSVDCTMYICGDSIECSNLLLQYGSFCTQLNRALTGIAVEQDKNTQEVFAQVKQIYKTPPIKDFGGFNFSQILPDPSKPSKRSFIEDLLFNKVTLADAGFIKQYGDCLGDIAARDLICAQKFNGLTVLPPLLTDEMIAQYCSALLAGTITSGWTFGAGAALQIPFAMQMAYRFNGIGVTQNVLYENQKLIANQFNSAIGKIQDSLSSTASALGKLQDVVNQNAQALNTLVKQLSSNFGAISSVLNDILSRLDKVEAEVQIDRLITGRLQSLQTYVTQQLIRAAEIRASANLAATKMSECVLGQSKRVDFCGKGYHLMSFPQCAPHGVVFLHVTYVPAQEKNFTTAPAICHEGKAHFPREGVFVSNGTHWFITQRNFYEPQIITTDNTFVSGSCDVVIGIVNNTVYDPLQPELDSFKEELDKYFKNHTSPDVDLGDISGINASVVNIQKEIDRLNEVAKNLNESLIDLQELGKYEQYIKGGGGSDIIKLLNEQVNKEMQSSNLYMSMSSWCYTHSLDGAGLFLFDHAAEEYEHAKKLIIFLNENNVPVQLTSISAPEHKFEGLTQIFQKAYEHEQHISESINNIVDHAIKSKDHATFNFLQWYVAEQHEEEVLFKDILDKIELIGNENHGLYLADQYVKGIAKSRKS

SEQ ID NO: 5632 - protein, 1373 aa, Artificial Sequence
  SARS-CoV-2/pangolin/Guangxi/P5E/2017__EPI_ISL_410541 spike protein (1-1205)(T868C_S1049C) Ferritin construct
MFVFLFVLPLVSSQCVNLTTRTGIPPGYTNSSTRGVYYPDKVFRSSILHLTQDLFLPFFSNVTWFNTITYQGGSKKFDNPVLPFNDGVYFASTEKSNIIRGWIFGTTLDARTQSLLIVNNATNVVIKVCEFQFCTDPFLGVYYHNNNKTWVENEFRVYSSANNCTFEYISQPFLMDLEGKQGNFKNLREFVFKNVDGYFKIYSKHTPIDLVRDLPRGFAALEPLVDLPIGINITRFQTLLALHRSYLTPGKLESGWTTGAAAYYVGYLQQRTFLLSYNQNGTITDAVDCSLDPLSETKCTLKSLTVEKGIYQTSNFRVQPTISIVRFPNITNLCPFGEVFNASKFASVYAWNRKRISNCVADYSVLYNSTSFSTFKCYGVSPTKLNDLCFTNVYADSFVVKGDEVRQIAPGQTGVIADYNYKLPDDFTGCVIAWNSVKQDALTGDNYGYLYRLFRKSKLKPFERDISTEIYQAGSTPCNGQVGLNCYYPLERYGFHPTTGVNYQPFRVVVLSFELLNGPATVCGPKLSTTLVKDKCVNFNFNGLTGTGVLTTSKKQFLPFQQFGRDISDTTDAVRDPQTLEILDITPCSFGGVSVITPGTNTSNQVAVLYQDVNCTEVPMAIHAEQLTPAWRVYSAGANVFQTRAGCLVGAEHVNNSYECDIPVGAGICASYHSMSSFRSVNQRSIIAYTMSLGAENSVAYSNNSIAIPTNFTISVTTEILPVSMTKTSVDCTMYICGDSIECSNLLLQYGSFCTQLNRALTGIAVEQDKNTQEVFAQVKQIYKTPPIKDFGGFNFSQILPDPSKPSKRSFIEDLLFNKVTLADAGFIKQYGDCLGDIAARDLICAQKFNGLTVLPPLLTDEMIAQYCSALLAGTITSGWTFGAGAALQIPFAMQMAYRFNGIGVTQNVLYENQKLIANQFNSAIGKIQDSLSSTASALGKLQDVVNQNAQALNTLVKQLSSNFGAISSVLNDILSRLDKVEAEVQIDRLITGRLQSLQTYVTQQLIRAAEIRASANLAATKMSECVLGQSKRVDFCGKGYHLMSFPQCAPHGVVFLHVTYVPAQEKNFTTAPAICHEGKAHFPREGVFVSNGTHWFITQRNFYEPQIITTDNTFVSGSCDVVIGIVNNTVYDPLQPELDSFKEELDKYFKNHTSPDVDLGDISGINASVVNIQKEIDRLNEVAKNLNESLIDLQELGKYEQYIKGGGGSDIIKLLNEQVNKEMQSSNLYMSMSSWCYTHSLDGAGLFLFDHAAEEYEHAKKLIIFLNENNVPVQLTSISAPEHKFEGLTQIFQKAYEHEQHISESINNIVDHAIKSKDHATFNFLQWYVAEQHEEEVLFKDILDKIELIGNENHGLYLADQYVKGIAKSRKS

SEQ ID NO: 5633 - protein, 1371 aa, Artificial Sequence
  SARS-CoV-2/pangolin/Guangxi/P1E/2017__EPI_ISL_410539 spike protein (1-1203)(T866C_S1047C) Ferritin construct
MFVFLFVLPLVSSQCVNLTTRTGIQPGYTNSSTRGVYYPDKVFRSSILHLTQDLFLPFFSNVTWFNTINYQGGFKKFDNPVLPFNDGVYFASTEKSNIIRGWIFGTTLDARTQSLLIVNNATNVVIKVCEFQFCTDPFLGVYYHNNNKTWVENEFRVYSSANNCTFEYISQPFLMDLEGKQGNFKNLREFVFKNVDGYFKIYSKHTPIDLVRDLPRGFAALEPLVDLPIGINITRFQTLLALHRSYLTPGKLESGWTTGAAAYYVGYLQQRTFLLSYNQNGTITDAVDCSLDPLSETKCTLKSLTVEKGIYQTSNFRVQPTISIVRFPNITNLCPFGEVFNASKFASVYAWNRKRISNCVADYSVLYNSTSFSTFKCYGVSPTKLNDLCFTNVYADSFVVKGDEVRQIAPGQTGVIADYNYKLPDDFTGCVIAWNSVKQDALTGGNYLYRLFRKSKLKPFERDISTEIYQAGSTPCNGQVGLNCYYPLERYGFHPTTGVNYQPFRVVVLSFELLNGPATVCGPKLSTTLVKDKCVNFNFNGLTGTGVLTTSKKQFLPFQQFGRDISDTTDAVRDPQTLEILDITPCSFGGVSVITPGTNTSNQVAVLYQDVNCTEVPMAIHAEQLTPAWRVYSAGANVFQTRAGCLVGAEHVNNSYECDIPVGAGICASYHSMSSLRSVNQRSIIAYTMSLGAENSVAYSNNSIAIPTNFTISVTTEILPVSMTKTSVDCTMYICGDSIECSNLLLQYGSFCTQLNRALTGIAVEQDKNTQEVFAQVKQIYKTPPIKDFGGFNFSQILPDPSKPSKRSFIEDLLFNKVTLADAGFIKQYGDCLGDIAARDLICAQKFNGLTVLPPLLTDEMIAQYCSALLAGTITSGWTFGAGAALQIPFAMQMAYRFNGIGVTQNVLYENQKLIANQFNSAIGKIQDSLSSTASALGKLQDVVNQNAQALNTLVKQLSSNFGAISSVLNDILSRLDKVEAEVQIDRLITGRLQSLQTYVTQQLIRAAEIRASANLAATKMSECVLGQSKRVDFCGKGYHLMSFPQCAPHGVVFLHVTYVPAQEKNFTTAPAICHEGKAHFPREGVFVSNGTHWFITQRNFYEPQIITTDNTFVSGSCDVVIGIVNNTVYDPLQPELDSFKEELDKYFKNHTSPDVDLGDISGINASVVNIQKEIDRLNEVAKNLNESLIDLQELGKYEQYIKGGGGSDIIKLLNEQVNKEMQSSNLYMSMSSWCYTHSLDGAGLFLFDHAAEEYEHAKKLIIFLNENNVPVQLTSISAPEHKFEGLTQIFQKAYEHEQHISESINNIVDHAIKSKDHATFNFLQWYVAEQHEEEVLFKDILDKIELIGNENHGLYLADQYVKGIAKSRKS

SEQ ID NO: 5634 - protein, 1241 aa, Artificial Sequence; identical to SEQ ID NO: 76
  SARS-CoV-2/Wuhan/WIV05/2019__EPI_ISL_402128 spike protein (1-1211) Foldon construct

SEQ ID NO: 5635 - protein, 1237 aa, Artificial Sequence; identical to SEQ ID NO: 77
  SARS-CoV-2/bat/Yunnan/RaTG13/2013__EPI_ISL_402131 spike protein (1-1207) Foldon construct

SEQ ID NO: 5636 - protein, 1241 aa, Artificial Sequence; identical to SEQ ID NO: 78
  SARS-CoV-2/Wuhan/HBCDC-HB-01/2019__EPI_ISL_402132 spike protein (1-1211) Foldon construct

SEQ ID NO: 5637 - protein, 1241 aa, Artificial Sequence; identical to SEQ ID NO: 79
  SARS-CoV-2/Guangdong/20SF028/2020__EPI_ISL_403936 spike protein (1-1211) Foldon construct

SEQ ID NO: 5638 - protein, 1241 aa, Artificial Sequence; identical to SEQ ID NO: 80
  SARS-CoV-2/Shenzhen/SZTH-001/2020__EPI_ISL_406592 spike protein (1-1211) Foldon construct

SEQ ID NO: 5639 - protein, 1241 aa, Artificial Sequence; identical to SEQ ID NO: 81
  SARS-CoV-2/Shenzhen/SZTH-004/2020__EPI_ISL_406595 spike protein (1-1211) Foldon construct

SEQ ID NO: 5640 - protein, 1241 aa, Artificial Sequence; identical to SEQ ID NO: 82
  SARS-CoV-2/France/IDF0372/2020__EPI_ISL_406596 spike protein (1-1211) Foldon construct

SEQ ID NO: 5641 - protein, 1241 aa, Artificial Sequence; identical to SEQ ID NO: 83
  SARS-CoV-2/Australia/VIC01/2020__EPI_ISL_406844 spike protein (1-1211) Foldon construct

SEQ ID NO: 5642 - protein, 1241 aa, Artificial Sequence; identical to SEQ ID NO: 84
  SARS-CoV-2/Germany/BavPat1/2020__EPI_ISL_406862 spike protein (1-1211) Foldon construct

SEQ ID NO: 5643 - protein, 1241 aa, Artificial Sequence
  SARS-CoV-2/Wuhan/HBCDC-HB-02/2020__EPI_ISL_412978 spike protein (1-1211) Foldon construct
MFVFLVLLPLVSSQCVNLTTRTQLPPAYTNSFTRGVYYPDKVFRSSVLHSTQDLFLPFFSNVTWFHAIHVSGTNGTKRFDNPVLPFNDGVYFASTEKSNIIRGWIFGTTLDSKTQSLLIVNNATNVVIKVCEFQFCNDPFLGVYYHKNNKSWMESEFRVYSSANNCTFEYVSQPFLMDLEGKQGNFKNLREFVFKNIDGYFKIYSKHTPINLVRDLPQGFSALEPLVDLPIGINITRFQTLLALHRSYLTPGDSSSGWTAGAAAYYVGYLQPRTFLLKYNENGTITDAVDCALDPLSETKCTLKSFTVEKGIYQTSNFRVQPTESIVRFPNITNLCPFGEVFNATRFASVYAWNRKRISNCVADYSVLYNSASFSTFKCYGVSPTKLNDLCFTNVYADSFVIRGDEVRQIAPGQTGKIADYNYKLPDDFTGCVIAWNSNNLDSKVGGNYNYLYRLFRKSNLKPFERDISTEIYQAGSTPCNGVEGFNCYFPLQSYGFQPTNGVGYQPYRVVVLSFELLHAPATVCGPKKSTNLVKNKCVNFNFNGLTGTGVLTESNKKFLPFQQFGRDIADTTDAVRDPQTLEILDITPCSFGGVSVITPGTNTSNQVAVLYQDVNCTEVPVAIHADQLTPTWRVYSTGSNVFQTRAGCLIGAEHVNNSYECDIPIGAGICASYQTQTNSPRRARSVASQSIIAYTMSLGAENSVAYSNNSIAIPTNFTISVTTEILPVSMTKTSVDCTMYICGDSTECSNFLLQYGSFCTQLNRALTGIAVEQDKNTQEVFAQVKQIYKTPPIKDFGGFNFSQILPDPSKPSKRSFIEDLLFNKVTLADAGFIKQYGDCLGDIAARDLICAQKFNGLTVLPPLLTDEMIAQYTSALLAGTITSGWTFGAGAALQIPFAMQMAYRFNGIGVTQNVLYENQKLIANQFNSAIGKIQDSLSSTASALGKLQDVVNQNAQALNTLVKQLSSNFGAISSVLNDILSRLDKVEAEVQIDRLITGRLQSLQTYVTQQLIRAAEIRASANLAATKMSECVLGQSKRVDFCGKGYHLMSFPQSAPHGVVFLHVTYVPAQEKNFTTAPAICHDGKAHFPREGVFVSNGTHWFVTQRNFYEPQIITTDNTFVSGNCDVVIGIVNNTVYDPLQPELDSFKEELDKYFKNHTSPDVDLGDISGINASVVNIQKEIDRLNEVAKNLNESLIDLQELGKYEQYIKGGSGYIPEAPRDGQAYVRKDGEWVLLSTFL

SEQ ID NO: 5644 - protein, 1241 aa, Artificial Sequence
  SARS-CoV-2/Australia/QLD02/2020__EPI_ISL_407896 spike protein (1-1211) Foldon construct
MFVFLVLLPLVSSQCVNLTTRTQLPPAYTNSFTRGVYYPDKVFRSSVLHSTQDLFLPFFSNVTWFHAIHVSGTNGTKRFDNPVLPFNDGVYFASTEKSNIIRGWIFGTTLDSKTQSLLIVNNATNVVIKVCEFQFCNDPFLGVYYHKNNKSWMESEFRVYSSANNCTFEYVSQPFLMDLEGKQGNFKNLREFVFKNIDGYFKIYSKHTPINLVRDLPQGFSALEPLVDLPIGINITRFQTLLALHRSYLTPGDSSSGWTAGAAAYYVGYLQPRTFLLKYNENGTITDAVDCALDPLSETKCTLKSFTVEKGIYQTSNFRVQPTESIVRFPNITNLCPFGEVFNATRFASVYAWNRKRISNCVADYSVLYNSASFSTFKCYGVSPTKLNDLCFTNVYADSFVIRGDEVRQIAPGQTGKIADYNYKLPDDFTGCVIAWNSNNLDSKVGGNYNYLYRLFRKSNLKPFERDISTEIYQAGSTPCNGVEGFNCYFPLQSYGFQPTNGVGYQPYRVVVLSFELLHAPATVCGPKKSTNLVKNKCVNFNFNGLTGTGVLTESNKKFLPFQQFGRDIADTTDAVRDPQTLEILDITPCSFGGVSVITPGTNTSNQVAVLYQDVNCTEVPVAIHADQLTPTWRVYSTGSNVFQTRAGCLIGAEHVNNSYECDIPIGAGICASYQTQTNSPRRARSVASQSIIAYTMSLGAENSVAYSNNSIAIPTNFTISVTTEILPVSMTKTSVDCTMYICGDSTECSNLLLQYGSFCTQLNRALTGIAVEQDKNTQEVFAQVKQIYKTPPIKDFGGFNFSQILPDPSKPSKRSFIEDLLFNKVTLADAGFIKQYGDCLGDIAARDLICAQKFNGLTVLPPLLTDEMIAQYTSALLAGTITSGWTFGAGAALQIPFAMQMAYRFNGIGVTQNVLYENQKLIANQFNSAIGKIQDSLSSTASALGKLQDVVNQNAQALNTLVKQLSSNFGAISSVLNDILSRLDKVEAEVQIDRLITGRLQSLQTYVTQQLIRAAEIRASANLAATKMSECVLGQSKRVDFCGKGYHLMSFPQSAPHGVVFLHVTYVPAQEKNFTTAPAICHDGKAHFPREGVFVSNGTHWFVTQRNFYEPQIITTDNTFVSGNCDVVIGIVNNTVYDPLQLELDSFKEELDKYFKNHTSPDVDLGDISGINASVVNIQKEIDRLNEVAKNLNESLIDLQELGKYEQYIKGGSGYIPEAPRDGQAYVRKDGEWVLLSTFL

SEQ ID NO: 5645 - protein, 1241 aa, Artificial Sequence
  SARS-CoV-2/India/1-31/2020__EPI_ISL_413523 spike protein (1-1211) Foldon construct
MFVFLVLLPLVSSQCVNLTTRTQLPPAYTNSFTRGVYYPDKVFRSSVLHSTQDLFLPFFSNVTWFHAIHVSGTNGTKRFDNPVLPFNDGVYFASTEKSNIIRGWIFGTTLDSKTQSLLIVNNATNVVIKVCEFQFCNDPFLGVYYHKNNKSWMESEFRVYSSANNCTFEYVSQPFLMDLEGKQGNFKNLREFVFKNIDGYFKIYSKHTPINLVRDLPQGFSALEPLVDLPIGINITRFQTLLALHRSYLTPGDSSSGWTAGAAAYYVGYLQPRTFLLKYNENGTITDAVDCALDPLSETKCTLKSFTVEKGIYQTSNFRVQPTESIVRFPNITNLCPFGEVFNATRFASVYAWNRKRISNCVADYSVLYNSASFSTFKCYGVSPTKLNDLCFTNVYADSFVIRGDEVRQIAPGQTGKIADYNYKLPDDFTGCVIAWNSNNLDSKVGGNYNYLYRLFRKSNLKPFERDISTEIYQAGSTPCNGVEGFNCYFPLQSYGFQPTNGVGYQPYRVVVLSFELLHAPATVCGPKKSTNLVKNKCVNFNFNGLTGTGVLTESNKKFLPFQQFGRDIADTTDAVRDPQTLEILDITPCSFGGVSVITPGTNTSNQVAVLYQDVNCTEVPVAIHADQLTPTWRVYSTGSNVFQTRAGCLIGAEHVNNSYECDIPIGAGICASYQTQTNSPRRARSVASQSIIAYTMSLGAENSVAYSNNSIAIPTNFTISVTTEILPVSMTKTSVDCTMYICGDSTECSNLLLQYGSFCTQLNRALTGIAVEQDKNTQEVFAQVKQIYKTPPIKDFGGFNFSQILPDPSKPSKRSFIEDLLFNKVTLADAGFIKQYGDCLGDIAARDLICAQKFNGLTVLPPLLTDEMIAQYTSALLAGTITSGWTFGAGAALQIPFAMQMAYRFNGIGVTQNVLYENQKLIANQFNSVIGKIQDSLSSTASALGKLQDVVNQNAQALNTLVKQLSSNFGAISSVLNDILSRLDKVEAEVQIDRLITGRLQSLQTYVTQQLIRAAEIRASANLAATKMSECVLGQSKRVDFCGKGYHLMSFPQSAPHGVVFLHVTYVPAQEKNFTTAPAICHDGKAHFPREGVFVSNGTHWFVTQRNFYEPQIITTDNTFVSGNCDVVIGIVNNTVYDPLQPELDSFKEELDKYFKNHTSPDVDLGDISGINASVVNIQKEIDRLNEVAKNLNESLIDLQELGKYEQYIKGGSGYIPEAPRDGQAYVRKDGEWVLLSTFL

SEQ ID NO: 5646 - protein, 1241 aa, Artificial Sequence
  SARS-CoV-2/Guangdong/GD2020087-P0008/2020__EPI_ISL_413863 spike protein (1-1211) Foldon construct
MFVFLVLLPLVSSQCVNLTTRTQLPPAYTNSFTRGVYYPDKVFRSSVLHSTQDLFLPFFSNVTWFHAIHVSGTNGTKRFDNPVLPFNDGVYFASTEKSNIIRGWIFGTTLDSKTQSLLIVNNATNVVIKVCEFQFCNDPFLGVYYHKNNKSWMESEFRVYSSANNCTFEYVSQPFLMDLEGKQGNFKNLREFVFKNIDGYFKIYSKHTPINLVRDLPQGFSALEPLVDLPIGINITRFQTLLALHRSYLTPGDSSSGWTAGAAAYYVGYLQPRTFLLKYNENGTITDAVDCALDPLSETKCTLKSFTVEKGIYQTSNFRVQPTESIVRFPNITNLCPFGEVFNATRFASVYAWNRKRISNCVADYSVLYNSASFSTFKCYGVSPTKLNDLCFTNVYADSFVIRGDEVREIAPGQTGKIADYNYKLPDDFTGCVIAWNSNNLDSKVGGNYNYLYRLFRKSNLKPFERDISTEIYQAGSTPCNGVEGFNCYFPLQSYGFQPTNGVGYQPYRVVVLSFELLHAPATVCGPKKSTNLVKNKCVNFNFNGLTGTGVLTESNKKFLPFQQFGRDIADTTDAVRDPQTLEILDITPCSFGGVSVITPGTNTSNQVAVLYQDVNCTEVPVAIHADQLTPTWRVYSTGSNVFQTRAGCLIGAEHVNNSYECDIPIGAGICASYQTQTNSPRRARSVASQSIIAYTMSLGAENSVAYSNNSIAIPTNFTISVTTEILPVSMTKTSVDCTMYICGDSTECSNLLLQYGSFCTQLNRALTGIAVEQDKNTQEVFAQVKQIYKTPPIKDFGGFNFSQILPDPSKPSKRSFIEDLLFNKVTLADAGFIKQYGDCLGDIAARDLICAQKFNGLTVLPPLLTDEMIAQYTSALLAGTITSGWTFGAGAALQIPFAMQMAYRFNGIGVTQNVLYENQKLIANQFNSAIGKIQDSLSSTASALGKLQDVVNQNAQALNTLVKQLSSNFGAISSVLNDILSRLDKVEAEVQIDRLITGRLQSLQTYVTQQLIRAAEIRASANLAATKMSECVLGQSKRVDFCGKGYHLMSFPQSAPHGVVFLHVTYVPAQEKNFTTAPAICHDGKAHFPREGVFVSNGTHWFVTQRNFYEPQIITTDNTFVSGNCDVVIGIVNNTVYDPLQPELDSFKEELDKYFKNHTSPDVDLGDISGINASVVNIQKEIDRLNEVAKNLNESLIDLQELGKYEQYIKGGSGYIPEAPRDGQAYVRKDGEWVLLSTFL

SEQ ID NO: 5647 - protein, 1241 aa, Artificial Sequence
  SARS-CoV-2/Sweden/01/2020__EPI_ISL_411951 spike protein (1-1211) Foldon construct
MFVFLVLLPLVSSQCVNLTTRTQLPPAYTNSFTRGVYYPDKVFRSSVLHSTQDLFLPFFSNVTWFHAIHVSGTNGTKRFDNPVLPFNDGVYFASTEKSNIIRGWIFGTTLDSKTQSLLIVNNATNVVIKVCEFQFCNDPFLGVYYHKNNKSWMESEFRVYSSANNCTFEYVSQPFLMDLEGKQGNFKNLREFVFKNIDGYFKIYSKHTPINLVRDLPQGFSALEPLVDLPIGINITRFQTLLALHRSYLTPGDSSSGWTAGAAAYYVGYLQPRTFLLKYNENGTITDAVDCALDPLSETKCTLKSFTVEKGIYQTSNFRVQPTESIVRFPNITNLCPFGEVFNATRFASVYAWNRKRISNCVADYSVLYNSASFSTFKCYGVSPTKLNDLCFTNVYADSFVIRGDEVRQIAPGQTGKIADYNYKLPDDFTGCVIAWNSNNLDSKVGGNYNYLYRLFRKSNLKPFERDISTEIYQAGSTPCNGVEGFNCYFPLQSYGFQPTNGVGYQPYRVVVLSFELLHAPATVCGPKKSTNLVKNKCVNFNFNGLTGTGVLTESNKKFLPFQQFGRDIADTTDAVRDPQTLEILDITPCSFGGVSVITPGTNTSNQVAVLYQDVNCTEVPVAIHADQLTPTWRVYSTGSNVFQTRAGCLIGAEHVNNSYECDIPIGAGICASYQTQTNSPRRARSVASQSIIAYTMSLGAENSVAYSNNSIAIPTNFTISVTTEILPVSMTKTSVDCTMYICGDSTECSNLLLQYGSFCTQLNRALTGIAVEQDKNTQEVFAQVKQIYKTPPIKDCGGFNFSQILPDPSKPSKRSFIEDLLFNKVTLADAGFIKQYGDCLGDIAARDLICAQKFNGLTVLPPLLTDEMIAQYTSALLAGTITSGWTFGAGAALQIPFAMQMAYRFNGIGVTQNVLYENQKLIANQFNSAIGKIQDSLSSTASALGKLQDVVNQNAQALNTLVKQLSSNFGAISSVLNDILSRLDKVEAEVQIDRLITGRLQSLQTYVTQQLIRAAEIRASANLAATKMSECVLGQSKRVDFCGKGYHLMSFPQSAPHGVVFLHVTYVPAQEKNFTTAPAICHDGKAHFPREGVFVSNGTHWFVTQRNFYEPQIITTDNTFVSGNCDVVIGIVNNTVYDPLQPELDSFKEELDKYFKNHTSPDVDLGDISGINASVVNIQKEIDRLNEVAKNLNESLIDLQELGKYEQYIKGGSGYIPEAPRDGQAYVRKDGEWVLLSTFL

SEQ ID NO: 5648 - protein, 1241 aa, Artificial Sequence
  SARS-CoV-2/Tianmen/HBCDC-HB-07/2020__EPI_ISL_412983 spike protein (1-1211) Foldon construct
MFVFLVLLPLVSSQCVNLTTRTQLPPAYTNSFTRGVYYPDKVFRSSVLHSTQDLFLPFFSNVTWFHAIHVSGTNGTKRFDNPVLPFNDGVYFASTEKSNIIRGWIFGTTLDSKTQSLLIVNNATNVVIKVCEFQFCNDPFLGVYYHKNNKSWMESEFRVYSSANNCTFEYVSQPFLMDLEGKQGNFKNLREFVFKNIDGYFKIYSKHTPINLVRDLPQGFSALEPLVDLPIGINITRFQTLLALHRSYLTPGDSSSGWTAGAAAYYVGYLQPRTFLLKYNENGTITDAVDCALDPLSETKCTLKSFTVEKGIYQTSNFRVQPTESIVRFPNITNLCPFGEVFNATRFASVYAWNRKRISNCVADYSVLYNSASFSTFKCYGVSPTKLNDLCFTNVYADSFVIRGDEVRQIAPGQTGKIADYNYKLPDDFTGCVIAWNSNNLDSKVGGNYNYLYRLFRKSNLKPFERDISTEIYQAGSTPCNGVEGFNCYFPLQSYGFQPTNGVGYQPYRVVVLSFELLHAPATVCGPKKSTNLVKNKCVNFNFNGLTGTGVLTESNKKFLPFQQFGRDIADTTDAVRDPQTLEILDITPCSFGGVSVITPGTNTSNQVAVLYQDLNCTEVPVAIHADQLTPTWRVYSTGSNVFQTRAGCLIGAEHVNNSYECDIPIGAGICASYQTQTNSPRRARSVASQSIIAYTMSLGAENSVAYSNNSIAIPTNFTISVTTEILPVSMTKTSVDCTMYICGDSTECSNLLLQYGSFCTQLNRALTGIAVEQDKNTQEVFAQVKQIYKTPPIKDFGGFNFSQILPDPSKPSKRSFIEDLLFNKVTLADAGFIKQYGDCLGDIAARDLICAQKFNGLTVLPPLLTDEMIAQYTSALLAGTITSGWTFGAGAALQIPFAMQMAYRFNGIGVTQNVLYENQKLIANQFNSAIGKIQDSLSSTASALGKLQDVVNQNAQALNTLVKQLSSNFGAISSVLNDILSRLDKVEAEVQIDRLITGRLQSLQTYVTQQLIRAAEIRASANLAATKMSECVLGQSKRVDFCGKGYHLMSFPQSAPHGVVFLHVTYVPAQEKNFTTAPAICHDGKAHFPREGVFVSNGTHWFVTQRNFYEPQIITTDNTFVSGNCDVVIGIVNNTVYDPLQPELDSFKEELDKYFKNHTSPDVDLGDISGINASVVNIQKEIDRLNEVAKNLNESLIDLQELGKYEQYIKGGSGYIPEAPRDGQAYVRKDGEWVLLSTFL

SEQ ID NO: 5649 - protein, 1241 aa, Artificial Sequence
  SARS-CoV-2/Hong Kong/case42_VM20002493/2020__EPI_ISL_414527 spike protein (1-1211) Foldon construct
MFVFLVLLPLVSSQCVNLTTRTQLPPAYTNSFTRGVYYPDKVFRSSVLHSTQDLFLPFFSNVTWFHAIHVSGTNGTKRFDNPVLPFNDGVYFASTEKSNIIRGWIFGTTLDSKTQSLLIVNNATNVVIKVCEFQFCNDPFLGVYYHKNNKSWMESEFRVYSSANNCTFEYVSQPFLMDLEGKQGNFKNLREFVFKNIDGYFKIYSKHTPINLVRDLPQGFSALEPLVDLPIGINITRFQTLLALHRSYLTPGDSSSGWTAGAAAYYVGYLQPRTFLLKYNENGTITDAVDCALDPLSETKCTLKSFTVEKGIYQTSNFRVQPTESIVRFPNITNLCPFGEVFNATRFASVYAWNRKRISNCVADYSVLYNSASFSTFKCYGVSPTKLNDLCFTNVYADSFVIRGDEVRQIAPGQTGKIADYNYKLPDDFTGCVIAWNSNNLDSKVGGNYNYLYRLFRKSNLKPFERDISTEIYQAGSTPCNGVEGFNCYFPLQSYGFQPTNGVGYQPYRVVVLSFELLHAPATVCGPKKSTNLVKNKCVNFNFNGLTGTGVLTESNKKFLPFQQFGRDIADTTDAVRDPQTLEILDITPCSFGGVSVITPGTNTSNQVAVLYQDVNCTEVPVAIHADQLTPTWRVYSTGSNVFQTRAGCLIGAEHVNNSYECDIPIGAGICASYQTQTNSPRRARSVASQSIIAYTMSLGAENSVAYSNNSIAIPTNFAISVTTEILPVSMTKTSVDCTMYICGDSTECSNLLLQYGSFCTQLNRALTGIAVEQDKNTQEVFAQVKQIYKTPPIKDFGGFNFSQILPDPSKPSKRSFIEDLLFNKVTLADAGFIKQYGDCLGDIAARDLICAQKFNGLTVLPPLLTDEMIAQYTSALLAGTITSGWTFGAGAALQIPFAMQMAYRFNGIGVTQNVLYENQKLIANQFNSAIGKIQDSLSSTASALGKLQDVVNQNAQALNTLVKQLSSNFGAISSVLNDILSRLDKVEAEVQIDRLITGRLQSLQTYVTQQLIRAAEIRASANLAATKMSECVLGQSKRVDFCGKGYHLMSFPQSAPHGVVFLHVTYVPAQEKNFTTAPAICHDGKAHFPREGVFVSNGTHWFVTQRNFYEPQIITTDNTFVSGNCDVVIGIVNNTVYDPLQPELDSFKEELDKYFKNHTSPDVDLGDISGINASVVNIQKEIDRLNEVAKNLNESLIDLQELGKYEQYIKGGSGYIPEAPRDGQAYVRKDGEWVLLSTFL

SEQ ID NO: 5650 - protein, 1241 aa, Artificial Sequence
  SARS-CoV-2/USA/CruiseA-23/2020__EPI_ISL_414482 spike protein (1-1211) Foldon construct
MFVFLVLLPLVSSQCVNLTTRTQLPPAYTNSFTRGVYYPDKVFRSSVLHSTQDLFLPFFSNVTWFHAIHVSGTNGTKRFDNPVLPFNDGVYFASTEKSNIIRGWIFGTTLDSKTQSLLIVNNATNVVIKVCEFQFCNDPFLGVYYHKNNKSWMESEFRVYSSANNCTFEYVSQPFLMDLEVKQGNFKNLREFVFKNIDGYFKIYSKHTPINLVRDLPQGFSALEPLVDLPIGINITRFQTLLALHRSYLTPGDSSSGWTAGAAAYYVGYLQPRTFLLKYNENGTITDAVDCALDPLSETKCTLKSFTVEKGIYQTSNFRVQPTESIVRFPNITNLCPFGEVFNATRFASVYAWNRKRISNCVADYSVLYNSASFSTFKCYGVSPTKLNDLCFTNVYADSFVIRGDEVRQIAPGQTGKIADYNYKLPDDFTGCVIAWNSNNLDSKVGGNYNYLYRLFRKSNLKPFERDISTEIYQAGSTPCNGVEGFNCYFPLQSYGFQPTNGVGYQPYRVVVLSFELLHAPATVCGPKKSTNLVKNKCVNFNFNGLTGTGVLTESNKKFLPFQQFGRDIADTTDAVRDPQTLEILDITPCSFGGVSVITPGTNTSNQVAVLYQDVNCTEVPVAIHADQLTPTWRVYSTGSNVFQTRAGCLIGAEHVNNSYECDIPIGAGICASYQTQTNSPRRARSVASQSIIAYTMSLGAENSVAYSNNSIAIPTNFTISVTTEILPVSMTKTSVDCTMYICGDSTECSNLLLQYGSFCTQLNRALTGIAVEQDKNTQEVFAQVKQIYKTPPIKDFGGFNFSQILPDPSKPSKRSFIEDLLFNKVTLADAGFIKQYGDCLGDIAARDLICAQKFNGLTVLPPLLTDEMIAQYTSALLAGTITSGWTFGAGAALQIPFAMQMAYRFNGIGVTQNVLYENQKLIANQFNSAIGKIQDSLSSTASALGKLQDVVNQNAQALNTLVKQLSSNFGAISSVLNDILSRLDKVEAEVQIDRLITGRLQSLQTYVTQQLIRAAEIRASANLAATKMSECVLGQSKRVDFCGKGYHLMSFPQSAPHGVVFLHVTYVPAQEKNFTTAPAICHDGKAHFPREGVFVSNGTHWFVTQRNFYEPQIITTDNTFVSGNCDVVIGIVNNTVYDPLQPELDSFKEELDKYFKNHTSPDVDLGDISGINASVVNIQKEIDRLNEVAKNLNESLIDLQELGKYEQYIKGGSGYIPEAPRDGQAYVRKDGEWVLLSTFL

SEQ ID NO: 5651 - protein, 1241 aa, Artificial Sequence
  SARS-CoV-2/Hong Kong/case85_VM20002868/2020__EPI_ISL_414519 spike protein (1-1211) Foldon construct
MFVFLVLVPLVSSQCVNLTTRTQLPPAYTNSFTRGVYYPDKVFRSSVLHSTQDLFLPFFSNVTWFHAIHVSGTNGTKRFDNPVLPFNDGVYFASTEKSNIIRGWIFGTTLDSKTQSLLIVNNATNVVIKVCEFQFCNDPFLGVYYHKNNKSWMESEFRVYSSANNCTFEYVSQPFLMDLEGKQGNFKNLREFVFKNIDGYFKIYSKHTPINLVRDLPQGFSALEPLVDLPIGINITRFQTLLALHRSYLTPGDSSSGWTAGAAAYYVGYLQPRTFLLKYNENGTITDAVDCALDPLSETKCTLKSFTVEKGIYQTSNFRVQPTESIVRFPNITNLCPFGEVFNATRFASVYAWNRKRISNCVADYSVLYNSASFSTFKCYGVSPTKLNDLCFTNVYADSFVIRGDEVRQIAPGQTGKIADYNYKLPDDFTGCVIAWNSNNLDSKVGGNYNYLYRLFRKSNLKPFERDISTEIYQAGSTPCNGVEGFNCYFPLQSYGFQPTNGVGYQPYRVVVLSFELLHAPATVCGPKKSTNLVKNKCVNFNFNGLTGTGVLTESNKKFLPFQQFGRDIADTTDAVRDPQTLEILDITPCSFGGVSVITPGTNTSNQVAVLYQDVNCTEVPVAIHADQLTPTWRVYSTGSNVFQTRAGCLIGAEHVNNSYECDIPIGAGICASYQTQTNSPRRARSVASQSIIAYTMSLGAENSVAYSNNSIAIPTNFTISVTTEILPVSMTKTSVDCTMYICGDSTECSNLLLQYGSFCTQLNRALTGIAVEQDKNTQEVFAQVKQIYKTPPIKDFGGFNFSQILPDPSKPSKRSFIEDLLFNKVTLADAGFIKQYGDCLGDIAARDLICAQKFNGLTVLPPLLTDEMIAQYTSALLAGTITSGWTFGAGAALQIPFAMQMAYRFNGIGVTQNVLYENQKLIANQFNSAIGKIQDSLSSTASALGKLQDVVNQNAQALNTLVKQLSSNFGAISSVLNDILSRLDKVEAEVQIDRLITGRLQSLQTYVTQQLIRAAEIRASANLAATKMSECVLGQSKRVDFCGKGYHLMSFPQSAPHGVVFLHVTYVPAQEKNFTTAPAICHDGKAHFPREGVFVSNGTHWFVTQRNFYEPQIITTDNTFVSGNCDVVIGIVNNTVYDPLQPELDSFKEELDKYFKNHTSPDVDLGDISGINASVVNIQKEIDRLNEVAKNLNESLIDLQELGKYEQYIKGGSGYIPEAPRDGQAYVRKDGEWVLLSTFL

SEQ ID NO: 5652 - protein, 1241 aa, Artificial Sequence; identical to SEQ ID NO: 84
  SARS-CoV-2/England/200990660/2020__EPI_ISL_414523 spike protein (1-1211) Foldon construct

SEQ ID NO: 5653 - protein, 1241 aa, Artificial Sequence
  SARS-CoV-2/Australia/NSW09/2020__EPI_ISL_413595 spike protein (1-1211) Foldon construct
MFVFLVLLPLVSSQCVNLTTRTQLPPAYTNSFTRGVYYPDKVFRSSVLHSTQDLFLPFFSNVTWFHAIHVSGTNGTKRFDNPVLPFNDGVYFASTEKSNIIRGWIFGTTLDSKTQSLLIVNNATNVVIKVCEFQFCNDPFLGVYYHKNNKSWMESEFRVYSSANNCTFEYVSQPFLMDLEGKQGNFKNLREFVFKNIDGYFKIYSKHTPINLVRDLPQGFSALEPLVDLPIGINITRFQTLLALHRSYLTPGDSSSGWTAGAAAYYVGYLQPRTFLLKYNENGTITDAVDCALDPLSETKCTLKSFTVEKGIYQTSNFRVQPTESIVRFPNITNLCPFGEVFNATRFASVYAWNRKRISNCVADYSVLYNSASFSTFKCYGVSPTKLNDLCFTNVYADSFVIRGDEVRQIAPGQTGKIADYNYKLPDDFTGCVIAWNSNNLDSKVGGNYNYLYRLFRKSNLKPFERDISTEIYQAGSTPCNGVEGFNCYFPLQSYGFQPTNGVGYQPYRVVVLSFELLHAPATVCGPKKSTNLVKNKCVNFNFNGLTGTGVLTESNKKFLPFQQFGRDIADTTDAVRDPQTLEILDITPCSFGGVSVITPGTNTSNQVAVLYQDVNCTEVPVAIHADQLTPTWRVYSTGSNVFQTRAGCLIGAEHVNNSYECDIPIGAGICASYQTQTNSPRRARSVASQSIIAYTMSLGAENSVAYSNNSIAIPTNFTISVTTEILPVSMTKTSVDCTMYICGDSTECSNLLLQYGSFCTQLNRALTGIAVEQDKNTQEVFAQVKQIYKTPPIKDFGGFNFSQILPDPSKPSKRSFIEDLLFNKVTLADAGFIKQYGDCLGDIAARDLICAQKFNGLTVLPPLLTDEMIAQYTSALLAGTITSGWTFGAGAALQIPFAMQMAYRFNGIGVTQNVLYENQKLIANQFNSAIGKIQDSLSFTASALGKLQDVVNQNAQALNTLVKQLSSNFGAISSVLNDILSRLDKVEAEVQIDRLITGRLQSLQTYVTQQLIRAAEIRASANLAATKMSECVLGQSKRVDFCGKGYHLMSFPQSAPHGVVFLHVTYVPAQEKNFTTAPAICHDGKAHFPREGVFVSNGTHWFVTQRNFYEPQIITTDNTFVSGNCDVVIGIVNNTVYDPLQPELDSFKEELDKYFKNHTSPDVDLGDISGINASVVNIQKEIDRLNEVAKNLNESLIDLQELGKYEQYIKGGSGYIPEAPRDGQAYVRKDGEWVLLSTFL

SEQ ID NO: 5654 - protein, 1241 aa, Artificial Sequence; identical to SEQ ID NO: 76
  SARS-CoV-2/Australia/NSW10/2020__EPI_ISL_413596 spike protein (1-1211) Foldon construct

SEQ ID NO: 5655 - protein, 1241 aa, Artificial Sequence
  SARS-CoV-2/Switzerland/1000477797/2020__EPI_ISL_413023 spike protein (1-1211) Foldon construct
MFVFLVLLPLVSSQCVNLTTRTQLPPAYTNSFTRGVYYPDKVFRSSVLHSTQDLFLPFFSNVTWFHAIHVSGTNGTKRFDNPVLPFNDGVYFASTEKSNIIRGWIFGTTLDSKTQSLLIVNNATNVVIKVCEFQFCNDPFLGVYYHKNNKSWMESEFRVYSSANNCTFEYVSQPFLMDLEGKQGNFKNLREFVFKNIDGYFNIYSKHTPINLVRDLPQGFSALEPLVDLPIGINITRFQTLLALHRSYLTPGDSSSGWTAGAAAYYVGYLQPRTFLLKYNENGTITDAVDCALDPLSETKCTLKSFTVEKGIYQTSNFRVQPTESIVRFPNITNLCPFGEVFNATRFASVYAWNRKRISNCVADYSVLYNSASFSTFKCYGVSPTKLNDLCFTNVYADSFVIRGDEVRQIAPGQTGKIADYNYKLPDDFTGCVIAWNSNNLDSKVGGNYNYLYRLFRKSNLKPFERDISTEIYQAGSTPCNGVEGFNCYFPLQSYGFQPTNGVGYQPYRVVVLSFELLHAPATVCGPKKSTNLVKNKCVNFNFNGLTGTGVLTESNKKFLPFQQFGRDIADTTDAVRDPQTLEILDITPCSFGGVSVITPGTNTSNQVAVLYQGVNCTEVPVAIHADQLTPTWRVYSTGSNVFQTRAGCLIGAEHVNNSYECDIPIGAGICASYQTQTNSPRRARSVASQSIIAYTMSLGAENSVAYSNNSIAIPTNFTISVTTEILPVSMTKTSVDCTMYICGDSTECSNLLLQYGSFCTQLNRALTGIAVEQDKNTQEVFAQVKQIYKTPPIKDFGGFNFSQILPDPSKPSKRSFIEDLLFNKVTLADAGFIKQYGDCLGDIAARDLICAQKFNGLTVLPPLLTDEMIAQYTSALLAGTITSGWTFGAGAALQIPFAMQMAYRFNGIGVTQNVLYENQKLIANQFNSAIGKIQDSLSSTASALGKLQDVVNQNAQALNTLVKQLSSNFGAISSVLNDILSRLDKVEAEVQIDRLITGRLQSLQTYVTQQLIRAAEIRASANLAATKMSECVLGQSKRVDFCGKGYHLMSFPQSAPHGVVFLHVTYVPAQEKNFTTAPAICHDGKAHFPREGVFVSNGTHWFVTQRNFYEPQIITTDNTFVSGNCDVVIGIVNNTVYDPLQPELDSFKEELDKYFKNHTSPDVDLGDISGINASVVNIQKEIDRLNEVAKNLNESLIDLQELGKYEQYIKGGSGYIPEAPRDGQAYVRKDGEWVLLSTFL

SEQ ID NO: 5656 - protein, 1241 aa, Artificial Sequence
  SARS-CoV-2/Belgium/BA-02291/2020__EPI_ISL_415159 spike protein (1-1211) Foldon construct
MFVFLVLLPLVSSQCVNLTTRTQLPPAYTNSFTRGVYYPDKVFRSSVLHSTQDLFLPFFSNVTWFHAIHVSGTNGTKRFDNPVLPFNDGVYFASTEKSNIIRGWIFGTTLDSKTQSLLIVNNATNVVIKVCEFQFCNDPFLGVYYHKNNKSWMESEFRVYSSANNCTFEYVSQPFLMDLEGKQGNFKNLREFVFKNIDGYFKIYSKHTPINLVRDLPQGFSALEPLVDLPIGINITRFQTLLALHRSYLTPGDSSSGWTAGAAAYYVGYLQPRTFLLKYNENGTITDAVDCALDPLSETKCTLKSFTVEKGIYQTSNFRVQPTESIVRFPNITNLCPFGEVFNATRFASVYAWNRKRISNCVADYSVLYNSASFSTFKCYGVSPTKLNDLCFTNVYADSFVIRGDEVRQIAPGQTGKIADYNYKLPDDFTGCVIAWNSNNLDSKVGGNYNYLYRLFRRSNLKPFERDISTEIYQAGSTPCNGVEGFNCYFPLQSYGFQPTNGVGYQPYRVVVLSFELLPAPATVCGPKKSTNLVKNKCVNFNFNGLTGTGVLTESNKKFLPFQQFGRDIADTTDAVRDPQTLEILDITPCSFGGVSVITPGTNTSNQVAVLYQGVNCTEVPVAIHADQLTPTWRVYSTGSNVFQTRAGCLIGAEHVNNSYECDIPIGAGICASYQTQTNSPRRARSVASQSIIAYTMSLGAENSVAYSNNSIAIPTNFTISVTTEILPVSMTKTSVDCTMYICGDSTECSNLLLQYGSFCTQLNRALTGIAVEQDKNTQEVFAQVKQIYKTPPIKDFGGFNFSQILPDPSKPSKRSFIEDLLFNKVTLADAGFIKQYGDCLGDIAARDLICAQKFNGLTVLPPLLTDEMIAQYTSALLAGTITSGWTFGAGAALQIPFAMQMAYRFNGIGVTQNVLYENQKLIANQFNSAIGKIQDSLSSAAPALGKLQDVVNQNAQALNTLVKQLSSNFGAISSVLNDILSRLDKVEAEVQIDRLITGRLQSLQTYVTQQLIRAAEIRASANLAATKMSECVLGQSKRVDFCGKGYHLMSFPQSAPHGVVFLHVTYVPAQEKNFTTAPAICHDGKAHFPREGVFVSNGTHWFVTQRNFYEPQIITTDNTFVSGNCDVVIGIVNNTVYDPLQPELDSFKEELDKYFKNHTSPDVDLGDISGINASVVNIQKEIDRLNEVAKNLNESLIDLQELGKYEQYIKGGSGYIPEAPRDGQAYVRKDGEWVLLSTFL

SEQ ID NO: 5657 - protein, 1241 aa, Artificial Sequence
  SARS-CoV-2/USA/WA8-UW5/2020__EPI_ISL_413486 spike protein (1-1211) Foldon construct
MFVFLVLLPLVSSQCVNLTTRTQLPPAYTNSFTRGVYYPDKVFRSSVLHSTQDLFLPFFSNVTWFHAIHVSGTNGTKRFDNPVLPFNDGVYFASTEKSNIIRGWIFGTTLDSKTQSLLIVNNATNVVIKVCEFQFCNDPFLGVYYHKNNKSWMESEFRVYSSANNCTFEYVSQPFLMDLEGKQGNFKNLREFVFKNIDGYFKIYSKHTPINLVRDLPQGFSALEPLVDLPIGINITRFQTLLALHRSYLTPGDSSSGWTAGAAAYYVGYLQPRTFLLKYNENGTITDAVDCALDPLSETKCTLKSFTVEKGIYQTSNFRVQPTESIVRFPNITNLCPFGEVFNATRFASVYAWNRKRISNCVADYSVLYNSASFSTFKCYGVSPTKLNDLCFTNVYADSFVIRGDEVRQIAPGQTGKIADYNYKLPDDFTGCVIAWNSNNLDSKVGGNYNYLYRLFRKSNLKPFERDISTEIYQAGSTPCNGVEGFNCYFPLQSYGFQPTNGVGYQPYRVVVLSFELLHAPATVCGPKKSTNLVKNKCVNFNFNGLTGTGVLTESNKKFLPFQQFGRDIADTTDAVRDPQTLEILDITPCSFGGVSVITPGTNTSNQVAVLYQDVNCTEVPVAIHADQLTPTWRVYSTGSNVFQTRAGCLIGAEYVNNSYECDIPIGAGICASYQTQTNSPRRARSVASQSIIAYTMSLGAENSVAYSNNSIAIPTNFTISVTTEILPVSMTKTSVDCTMYICGDSTECSNLLLQYGSFCTQLNRALTGIAVEQDKNTQEVFAQVKQIYKTPPIKDFGGFNFSQILPDPSKPSKRSFIEDLLFNKVTLADAGFIKQYGDCLGDIAARDLICAQKFNGLTVLPPLLTDEMIAQYTSALLAGTITSGWTFGAGAALQIPFAMQMAYRFNGIGVTQNVLYENQKLIANQFNSAIGKIQDSLSSTASALGKLQDVVNQNAQALNTLVKQLSSNFGAISSVLNDILSRLDKVEAEVQIDRLITGRLQSLQTYVTQQLIRAAEIRASANLAATKMSECVLGQSKRVDFCGKGYHLMSFPQSAPHGVVFLHVTYVPAQEKNFTTAPAICHDGKAHFPREGVFVSNGTHWFVTQRNFYEPQIITTDNTFVSGNCDVVIGIVNNTVYDPLQPELDSFKEELDKYFKNHTSPDVDLGDISGINASVVNIQKEIDRLNEVAKNLNESLIDLQELGKYEQYIKGGSGYIPEAPRDGQAYVRKDGEWVLLSTFL

SEQ ID NO: 5658 - protein, 1241 aa, Artificial Sequence
  SARS-CoV-2/England/20102000506/2020__EPI_ISL_415147 spike protein (1-1211) Foldon construct
MFVFLVLLPLVSSQCVNLTTRTQLPPAYTNSFTRGVYYPDKVFRSSVLHSTQDLFLPFFSNVTWFHAIHVSGTNGTKRFDNPVLPFNDGVYFASTEKSNIIRGWIFGTTLDSKTQSLLIVNNATNVVIKVCEFQFCNDPFLGVYYHKNNKSWMESEFRVYSSANNCTFEYVSQPFLMDLEGKQGNFKNLREFVFKNIDGYFKIYSKHTPINLVRDLPQGFSALEPLVDLPIGINITRFQTLLALHRSYLTPGDSSSGWTAGAAAYYVGYLQPRTFLLKYNENGTITDAVDCALDPLSETKCTLKSFTVEKGIYQTSNFRVQPTESIVRFPNITNLCPFGEVFNATRFASVYAWNRKRISNCVADYSVLYNSASFSTFKCYGVSPTKLNDLCFTNVYADSFVIRGDEVRQIAPGQTGKIADYNYKLPDDFTGCVIAWNSNNLDSKVGGNYNYLYRLFRKSNLKPFERDISTEIYQAGSTPCNGVEGFNCYFPLQSYGFQPTNGVGYQPYRVVVLSFELLHAPATVCGPKKSTNLVKNKCVNFNFNGLTGTGVLTESNKKFLPFQQFGRDIADTTDAVRDPQTLEILDITPCSFGGVSVITPGTNTSNQVAVLYQGVNCTEVPVAIHADQLTPTWRVYSTGSNVFQTRAGCLIGAEHVNNSYECDIPIGAGICASYQTQTNSPRRARSVASQSIIAYTMSLGAENSVAYSNNSIAIPTNFTISVTTEILPVSMTKTSVDCTMYICGDSTECSNLLLQYGSFCTQLNRALTGIAVEQDKNTQEVFAQVKQIYKTPPIKDFGGFNFSQILPDPSKPSKRSFIEDLLFNKVTLADAGFIKQYGYCLGDIAARDLICAQKFNGLTVLPPLLTDEMIAQYTSALLAGTITSGWTFGAGAALQIPFAMQMAYRFNGIGVTQNVLYENQKLIANQFNSAIGKIQDSLSSTASALGKLQDVVNQNAQALNTLVKQLSSNFGAISSVLNDILSRLDKVEAEVQIDRLITGRLQSLQTYVTQQLIRAAEIRASANLAATKMSECVLGQSKRVDFCGKGYHLMSFPQSAPHGVVFLHVTYVPAQEKNFTTAPAICHDGKAHFPREGVFVSNGTHWFVTQRNFYEPQIITTDNTFVSGNCDVVIGIVNNTVYDPLQPELDSFKEELDKYFKNHTSPDVDLGDISGINASVVNIQKEIDRLNEVAKNLNESLIDLQELGKYEQYIKGGSGYIPEAPRDGQAYVRKDGEWVLLSTFL

SEQ ID NO: 5659 - protein, 1241 aa, Artificial Sequence
  SARS-CoV-2/Belgium/VAG-03013/2020__EPI_ISL_415155 spike protein (1-1211) Foldon construct
MFVFLVLLPLVSSQCVNLTTRTQLPPAYTNSFTRGVYYPDKVFRSSVLHSTQDLFLPFFSNVTWFHAIHVSGTNGTKRFDNPVLPFNDGVYFASTEKSNIIRGWIFGTTLDSKTQSLLIVNNATNVVIKVCEFQFCNDPFLGVYYHKNNKSWMESEFRVYSSANNCTFEYVSQPFLMDLEGKQGNFKNLREFVFKNIDGYFKIYSKHTPINLVRDLPQGFSALEPLVDLPIGINITRFQTLLALHRSYLTPGDSSSGWTAGAAAYYVGYLQPRTFLLKYNENGTITDAVDCALDPLSETKCTLKSFTVEKGIYQTSNFRVQPTESIVRFPNITNLCPFGEVFNATRFASVYAWNRKRISNCVADYSVLYNSASFSTFKCYGVSPTKLNDLCFTNVYADSFVIRGDEVRQIAPGQTGKIADYNYKLPDDFTGCVIAWNSNNLDSKVGGNYNYLYRLFRKSNLKPFERDISTEIYQAGSTPCNGVEGFNCYFPLQSYGFQPTNGVGYQPYRVVVLSFELLHAPATVCGPKKSTNLVKNKCVNFNFNGLTGTGVLTESNKKFLPFQQFGRDIADTTDAVRDPQTLEILDITPCSFGGVSVITPGTNTSNQVAVLYQGVNCTEVPVAIHADQLTPTWRVYSTGSNVFQTRAGCLIGAEHVNNSYECDIPIGAGICASYQTQTNSPRRARSVASQSIIAYTMSLGAENSVAYSNNSIAIPTNFTISVTTEILPVSMTKTSVDCTMYICGDSTECSNLLLQYGSFCTQLNRALTGIAVEQDKNTQEVFAQVKQIYKTPPIKDFGGFNFSQILPDPSKPSKRSFIEDLLFNKVTLADAGFIKQYGDCLGDIAARDLICAQKFNGLTVLPPLLTDEMIAQYTSALLAGTITSGWTFGAGAALQIPFAMQMAYRFNGIGVTQNVLYENQKLIANQFNSAIGKIQDSLSSTATALGKLQDVVNQNAQALNTLVKQLSSNFGAISSVLNDILSRLDKVEAEVQIDRLITGRLQSLQTYVTQQLIRAAEIRASANLAATKMSECVLGQSKRVDFCGKGYHLMSFPQSAPHGVVFLHVTYVPAQEKNFTTAPAICHDGKAHFPREGVFVSNGTHWFVTQRNFYEPQIITTDNTFVSGNCDVVIGIVNNTVYDPLQPELDSFKEELDKYFKNHTSPDVDLGDISGINASVVNIQKEIDRLNEVAKNLNESLIDLQELGKYEQYIKGGSGYIPEAPRDGQAYVRKDGEWVLLSTFL

SEQ ID NO: 5660 - protein, 1241 aa, Artificial Sequence
  SARS-CoV-2/Belgium/BC-03016/2020__EPI_ISL_415157 spike protein (1-1211) Foldon construct
MFVFLVLLPLVSSQCVNLTTRTQLPPAYTNSFTRGVYYPDKVFRSSVLHSTQDLFLPFFSNVTWFHAIHVSGTNGTKRFDNPVLPFNDGVYFASTEKSNIIRGWIFGTTLDSKTQSLLIVNNATNVVIKVCEFQFCNDPFLGVYYHKNNKSWMESEFRVYSSANNCTFEYVSQPFLMDLEGKQGNFKNLREFVFKNIDGYFKIYSKHTPINLVRDLPQGFSALEPLVDLPIGINITRFQTLLALHRSYLTPGDSSSGWTAGAAAYYVGYLQPRTFLLKYNENGTITDAVDCALDPLSETKCTLKSFTVEKGIYQTSNFRVQPTESIVRFPNITNLCPFGEVFNATRFASVYAWNRKRISNCVADYSVLYNSASFSTFKCYGVSPTKLNDLCFTNVYADSFVIRGDEVRQIAPGQTGKIADYNYKLPDDFTGCVIAWNSNNLDSKVGGNYNYLYRLFRKSNLKPFERDISTEIYQAGSTPCNGVEGFNCYFPLQSYGFQPTNGVGYQPYRVVVLSFELLHAPATVCGPKKSTNLVKNKCVNFNFNGLTGTGVLTESNKKFLPFQQFGRDIADTTDAVRDPQTLEILDITPCSFGGVSVITPGTNTSNQVAVLYQGVNCTEVPVAIHADQLTPTWRVYSTGSNVFQTRAGCLIGAEHVNNSYECDIPIGAGICASYQTQTNSPRRARSVASQSIIAYTMSLGAENSVAYSNNSIAIPTNFTISVTTEILPVSMTKTSVDCTMYICGDSTECSNLLLQYGSFCTQLNRALTGIAVEQDKNTQEVFAQVKQIYKTPPIKDFGGFNFSQILPDPSKPSKRSFIEDLLFNKVTLADAGFIKQYGDCLGDIAARDLICAQKFNGLTVLPPLLTDEMIAQYTSALLAGTITSGWTFGAGAALQIPFAMQMAYRFNGIGVTQNVLYENQKLIANQFNSAIGKIQDSLSSTAPALGKLQDVVNQNAQALNTLVKQLSSNFGAISSVLNDILSRLDKVEAEVQIDRLITGRLQSLQTYVTQQLIRAAEIRASANLAATKMSECVLGQSKRVDFCGKGYHLMSFPQSAPHGVVFLHVTYVPAQEKNFTTAPAICHDGKAHFPREGVFVSNGTHWFVTQRNFYEPQIITTDNTFVSGNCDVVIGIVNNTVYDPLQPELDSFKEELDKYFKNHTSPDVDLGDISGINASVVNIQKEIDRLNEVAKNLNESLIDLQELGKYEQYIKGGSGYIPEAPRDGQAYVRKDGEWVLLSTFL

SEQ ID NO: 5661 - protein, 1241 aa, Artificial Sequence
  SARS-CoV-2/Germany/BavPat3/2020__EPI_ISL_414521 spike protein (1-1211) Foldon construct
MFVFLVLLPLVSSQCVNLTTRTQLPPAYTNSFTRGVYYPDKVFRSSVLHSTQDLFLPFFSNVTWFHAIHVSGTNGTKRFDNPVLPFNDGVYFASTEKSNIIRGWIFGTTLDSKTQSLLIVNNATNVVIKVCEFQFCNDPFLGVYYHKNNKSWMESEFRVYSSANNCTFEYVSQPFLMDLEGKQGNFKNLREFVFKNIDGYFKIYSKHTPINLVRDLPQGFSALEPLVDLPIGINITRFQTLLALHRSYLTPGDSSSGWTAGAAAYYVGYLQPRTFLLKYNENGTITDAVDCALDPLSETKCTLKSFTVEKGIYQTSNFRVQPTESIVRFPNITNLCPFGEVFNATRFASVYAWNRKRISNCVADYSVLYNSASFSTFKCYGVSPTKLNDLCFTNVYADSFVIRGDEVRQIAPGQTGKIADYNYKLPDDFTGCVIAWNSNNLDSKVGGNYNYLYRLFRKSNLKPFERDISTEIYQAGSTPCNGVEGFNCYFPLQSYGFQPTNGVGYQPYRVVVLSFELLHAPATVCGPKKSTNLVKNKCVNFNFNGLTGTGVLTESNKKFLPFQQFGRDIADTTDAVRDPQTLEILDITPCSFGGVSVITPGTNTSNQVAVLYQDVNCTEVPVAIHADQLTPTWRVYSTGSNVFQTRAGCLIGAEHVNNSYECDIPIGAGICASYQTQTNSPRRARSVASQSIIAYTMSLGAENSVAYSNNSIAIPTNFTISVTTEILPVSMTKTSVDCTMYICGDSTECSNLLLQYGSFCTQLNRALTGIAVEQDKNTQQVFAQVKQIYKTPPIKDFGGFNFSQILPDPSKPSKRSFIEDLLFNKVTLADAGFIKQYGDCLGDIAARDLICAQKFNGLTVLPPLLTDEMIAQYTSALLAGTITSGWTFGAGAALQIPFAMQMAYRFNGIGVTQNVLYENQKLIANQFNSAIGKIQDSLSSTASALGKLQDVVNQNAQALNTLVKQLSSNFGAISSVLNDILSRLDKVEAEVQIDRLITGRLQSLQTYVTQQLIRAAEIRASANLAATKMSECVLGQSKRVDFCGKGYHLMSFPQSAPHGVVFLHVTYVPAQEKNFTTAPAICHDGKAHFPREGVFVSNGTHWFVTQRNFYEPQIITTDNTFVSGNCDVVIGIVNNTVYDPLQPELDSFKEELDKYFKNHTSPDVDLGDISGINASVVNIQKEIDRLNEVAKNLNESLIDLQELGKYEQYIKGGSGYIPEAPRDGQAYVRKDGEWVLLSTFL

SEQ ID NO: 5662 - protein, 1241 aa, Artificial Sequence
  SARS-CoV-2/France/HF1805/2020__EPI_ISL_414628 spike protein (1-1211) Foldon construct
MFVFLVLLPLVSSQCVNLTTRTQLPPAYTNSFTRGVYYPDKVFRSSVLHSTQDLFLPFFSNVTWFHAIHVSGTNGTKRFDNPVLPFNDGVYFASTEKSNIIRGWIFGTTLDSKTQSLLIVNNATNVVIKVCEFQFCNDPFLGVYYHKNNKSWMESEFRVYSSANNCTFEYVSQPFLMDLEGKQGNFKNLREFVFKNIDGYFKIYSKHTPINLVRDLPQGFSALEPLVDLPIGINITRFQTLLALHRSYLTPGDSSSGWTAGAAAYYVGYLQPRTFLLKYNENGTITDAVDCALDPLSETKCTLKSFTVEKGIYQTSNFRVQPTESIVRFPNITNLCPFGEVFNATRFASVYAWNRKRISNCVADYSVLYNSASFSTFKCYGVSPTKLNDLCFTNVYADSFVIRGDEVRQIAPGQTGKIADYNYKLPDDFTGCVIAWNSNNLDSKVGGNYNYLYRLFRKSNLKPFERDISTEIYQAGSTPCNGVEGFNCYFPLQSYGFQPTNGVGYQPYRVVVLSFELLHAPATVCGPKKSTNLVKNKCVNFNFNGLTGTGVLTESNKKFLPFQQFGRDIADTTDAVRDPQTLEILDITPCSFGGVSVITPGTNTSNQVAVLYQGVNCTEVPVAIHADQLTPTWRVYSTGSNVFQTRAGCLIGAEHVNNSYECDIPIGAGICASYQTQTNSPRRARSVASQSIIAYTMSLGAENSVAYSNNSIAIPTNFTISVTTEILPVSMTKTSVDCTMYICGDSTECSNLLLQYGSFCTQLNRALTGIAVEQDKNTQEVFAQVKQIYKTPPIKDFGGFNFSQILPDPSKPSKRSFIEDLLFNKVTLADAGFIKQYGDCLGDIAARDLICAQKFNGLTVLPPLLTDEMIAQYTSALLAGTITSGWTFGAGAALQIPFAMQMAYRFNGIGVTQNVLYENQKLIANQFNSAIGKIQDSLSSTASALGKLQDVVNQNAQALNTLVKQLSSNFGAISSVLNDILSRLDKVEAEVQIDRLITGRLQSLQTYVTQQLIRAAEIRASANLAATKMSECVLGQSKRVDFCGKGYHLMSFPQSAPHGVVFLHVTYVPAQEKNFTTAPAICHDGKAHFPREGVFVSNGTHWFVTQRNFYEPQIITTDNTFVSGNCDVVIGVVNNTVYDPLQPELDSFKEELDKYFKNHTSPDVDLGDISGINASVVNIQKEIDRLNEVAKNLNESLIDLQELGKYEQYIKGGSGYIPEAPRDGQAYVRKDGEWVLLSTFL

SEQ ID NO: 5663 - protein, 1241 aa, Artificial Sequence
  SARS-CoV-2/Netherlands/ZuidHolland_9/2020__EPI_ISL_414445 spike protein (1-1211) Foldon construct
MFVFLVLLPLVSSQCVNLTTRTQLPPAYTNSFTRGVYYPDKVFRSSVLHSTQDLFLPFFSNVTWFHAIHVSGTNGTKRFDNPVLPFNDGVYFASTEKSNIIRGWIFGTTLDSKTQSLLIVNNATNVVIKVCEFQFCNDPFLGVYYHKNNKSWMESEFRVYSSANNCTFEYVSQPFLMDLEGKQGNFKNLREFVFKNIDGYFKIYSKHTPINLVRDLPQGFSALEPLVDLPIGINITRFQTLLALHRSYLTPGDSSSGWTAGAAAYYVGYLQPRTFLLKYNENGTITDAVDCALDPLSETKCTLKSFTVEKGIYQTSNFRVQPTESIVRFPNITNLCPFGEVFNATRFASVYAWNRKRISNCVADYSVLYNSASFSTFKCYGVSPTKLNDLCFTNVYADSFVIRGDEVRQIAPGQTGKIADYNYKLPDDFTGCVIAWNSNNLDSKVGGNYNYLYRLFRKSNLKPFERDISTEIYQAGSTPCNGVEGFNCYFPLQSYGFQPTNGVGYQPYRVVVLSFELLHAPATVCGPKKSTNLVKNKCVNFNFNGLTGTGVLTESNKKFLPFQQFGRDIADTTDAVRDPQTLEILDITPCSFGGVSVITPGTNTSNQVAVLYQGVNCTEVPVAIHADQLTPTWRVYSTGSNVFQTRAGCLIGAEHVNNSYECDIPIGAGICASYQTQTNSPRRARSVASQSIIAYTMSLGAENSVAYSNNSIAIPTNFTISVTTEILPVSMTKTSVDCTMYICGDSTECSNLLLQYGSFCTQLNRALTGIAVEQDKNTQEVFAQVKQIYKTPPIKDFGGFNFSQILPDPSKPSKRSFIEDLLFNKVTLADAGFIKQYGDCLGDIAARDLICVQKFNGLTVLPPLLTDEMIAQYTSALLAGTITSGWTFGAGAALQIPFAMQMAYRFNGIGVTQNVLYENQKLIANQFNSAIGKIQDSLSSTASALGKLQDVVNQNAQALNTLVKQLSSNFGAISSVLNDILSRLDKVEAEVQIDRLITGRLQSLQTYVTQQLIRAAEIRASANLAATKMSECVLGQSKRVDFCGKGYHLMSFPQSAPHGVVFLHVTYVPAQEKNFTTAPAICHDGKAHFPREGVFVSNGTHWFVTQRNFYEPQIITTDNTFVSGNCDVVIGIVNNTVYDPLQPELDSFKEELDKYFKNHTSPDVDLGDISGINASVVNIQKEIDRLNEVAKNLNESLIDLQELGKYEQYIKGGSGYIPEAPRDGQAYVRKDGEWVLLSTFL

SEQ ID NO: 5664 - protein, 1241 aa, Artificial Sequence
  SARS-CoV-2/Finland/FIN03032020A/2020__EPI_ISL_413602 spike protein (1-1211) Foldon construct
MFVFLVLLPLVSSQCVNLTTRTQLPPAYTNSFTRGVYYPDKVFRSSVLHSTQDLFLPFFSNVTWFHAIHVSGTNGTKRFDNPVLPFNDGVYFASTEKSNIIRGWIFGTTLDSKTQSLLIVNNATNVVIKVCEFQFCNDPFLGVYYHKNNKSWMESEFRVYSSANNCTFEYVSQPFLMDLEGKQGNFKNLREFVFKNIDGYFKIYSKHTPINLVRDLPQGFSALEPLVDLPIGINITRFQTLLALHRSYLTPGDSSSGWTAGAAAYYVGYLQPRTFLLKYNENGTITDAVDCALDPLSETKCTLKSFTVEKGIYQTSNFRVQPTESIVRFPNITNLCPFGEVFNATRFASVYAWNRKRISNCVADYSVLYNSASFSTFKCYGVSPTKLNDLCFTNVYADSFVIRGDEVRQIAPGQTGKIADYNYKLPDDFTGCVISWNSNNLDSKVGGNYNYLYRLFRKSNLKPFERDISTEIYQAGSTPCNGVEGFNCYFPLQSYGFQPTNGVGYQPYRVVVLSFELLHAPATVCGPKKSTNLVKNKCVNFNFNGLTGTGVLTESNKKFLPFQQFGRDIADTTDAVRDPQTLEILDITPCSFGGVSVITPGTNTSNQVAVLYQGVNCTEVPVAIHADQLTPTWRVYSTGSNVFQTRAGCLIGAEHVNNSYECDIPIGAGICASYQTQTNSPRRARSVASQSIIAYTMSLGAENSVAYSNNSIAIPTNFTISVTTEILPVSMTKTSVDCTMYICGDSTECSNLLLQYGSFCTQLNRALTGIAVEQDKNTQEVFAQVKQIYKTPPIKDFGGFNFSQILPDPSKPSKRSFIEDLLFNKVTLADAGFIKQYGDCLGDIAARDLICAQKFNGLTVLPPLLTDEMIAQYTSALLAGTITSGWTFGAGAALQIPFAMQMAYRFNGIGVTQNVLYENQKLIANQFNSAIGKIQDSLSSTASALGKLQDVVNQNAQALNTLVKQLSSNFGAISSVLNDILSRLDKVEAEVQIDRLITGRLQSLQTYVTQQLIRAAEIRASANLAATKMSECVLGQSKRVDFCGKGYHLMSFPQSAPHGVVFLHVTYVPAQEKNFTTAPAICHDGKAHFPREGVFVSNGTHWFVTQRNFYEPQIITTDNTFVSGNCDVVIGIVNNTVYDPLQPELDSFKEELDKYFKNHTSPDVDLGDISGINASVVNIQKEIDRLNEVAKNLNESLIDLQELGKYEQYIKGGSGYIPEAPRDGQAYVRKDGEWVLLSTFL

SEQ ID NO: 5665 - protein, 1241 aa, Artificial Sequence
  SARS-CoV-2/France/GE1977/2020__EPI_ISL_414632 spike protein (1-1211) Foldon construct
MFVFLVLLPLVSSQCVNLTTRTQLPPAYTNSFTRGVYYPDKVFRSSVLHSTQDLFLPFFSNVTWFHAIHVSGTNGTKRFDNPVLPFNDGVYFASTEKSNIIRGWIFGTTLDSKTQSLLIVNNATNVVIKVCEFQFCNDPFLGVYYHKNNKSWMESEFRVYSSANNCTFEYVSQPFLMDLEGKQGNFKNLREFVFKNIDGYFKIYSKHTPINLVRDLPQGFSALEPLVDLPIGINITRFQTLLALHRSYLTPGDSSSGWTAGAAAYYVGYLQPRTFLLKYNENGTITDAVDCALDPLSETKCTLKSFTVEKGIYQTSNFRVQPTESIVRFPNITNLCPFGEVFNATRFASVYAWNRKRISNCVADYSVLYNSASFSTFKCYGVSPTKLNDLCFTNVYADSFVIRGDEVRQIAPGQTGKIADYNYKLPDDFTGCVIAWNSNNLDSKVGGNYNYLYRLFRKSNLKPFERDISTEIYQAGSTPCNGVEGFNCYFPLQSYGFQPTNGVGYQPYRVVVLSFELLHAPATVCGPKKSTNLVKNKCVNFNFNGLTGTGVLTESNKKFLPFQQFGRDIADTTDAVRDPQTLEILDITPCSFGGVSVITPGTNTSNQVAVLYQGVNCTEVPVAIHADQLTPTWRVYSTGSNVFQTRAGCLIGAEHVNNSYECDIPIGAGICASYQTQTNSPRRARSVASQSIIAYTMSLGAENSVAYSNNSIAIPTNFTISVTTEILPVSMTKTSVDCTMYICGDSTECSNLLLQYGSFCTQLNRALTGIAVEQDKNTQEVFAQVKQIYKTPPIKDFGGFNFSQILPDPSKPSKRSFIEDLLFNKVTLADAGFIKQYGDCLGDIAARDLICAQKFNGLTVLPPLLTDEMIAQYTSALLAGTITSGWTFGAGAALQIPFAMQMAYRFNGIGVTQNVLYENQKLIANQFNSAIGKIQDSLFSTASALGKLQDVVNQNAQALNTLVKQLSSNFGAISSVLNDILSRLDKVEAEVQIDRLITGRLQSLQTYVTQQLIRAAEIRASANLAATKMSECVLGQSKRVDFCGKGYHLMSFPQSAPHGVVFLHVTYVPAQEKNFTTAPAICHDGKAHFPREGVFVSNGTHWFVTQRNFYEPQIITTDNTFVSGNCDVVIGIVNNTVYDPLQPELDSFKEELDKYFKNHTSPDVDLGDISGINASVVNIQKEIDRLNEVAKNLNESLIDLQELGKYEQYIKGGSGYIPEAPRDGQAYVRKDGEWVLLSTFL

SEQ ID NO: 5666 - protein, 1241 aa, Artificial Sequence
  SARS-CoV-2/Finland/FIN-313/2020__EPI_ISL_414641 spike protein (1-1211) Foldon construct
MFVFLVLLPLVSSQCVNLTTRTQLPPAYTNSFTRGVYYPDKVFRSSVLHSTQDLFLPFFSNVTWFHAIHVSGTNGTKRFDNPVLPFNDGVYFASTEKSNIIRGWIFGTTLDSKTQSLLIVNNATNVVIKVCEFQFCNDPFLGVYYHKNNKSWMESEFRVYSSANNCTFEYVSQPFLMDLEGKQGNFKNLREFVFKNIDGYFKIYSKHTPINLVRDLPQGFSALEPLVDLPIGINITRFKTLLALHRSYLTPGDSSSGWTAGAAAYYVGYLQPRTFLLKYNENGTITDAVDCALDPLSETKCTLKSFTVEKGIYQTSNFRVQPTESIVRFPNITNLCPFGEVFNATRFASVYAWNRKRISNCVADYSVLYNSASFSTFKCYGVSPTKLNDLCFTNVYADSFVIRGDEVRQIAPGQTGKIADYNYKLPDDFTGCVIAWNSNNLDSKVGGNYNYLYRLFRKSNLKPFERDISTEIYQAGSTPCNGVEGFNCYFPLQSYGFQPTNGVGYQPYRVVVLSFELLHAPATVCGPKKSTNLVKNKCVNFNFNGLTGTGVLTESNKKFLPFQQFGRDIADTTDAVRDPQTLEILDITPCSFGGVSVITPGTNTSNQVAVLYQGVNCTEVPVAIHADQLTPTWRVYSTGSNVFQTRAGCLIGAEHVNNSYECDIPIGAGICASYQTQTNSPRRARSVASQSIIAYTMSLGAENSVAYSNNSIAIPTNFTISVTTEILPVSMTKTSVDCTMYICGDSTECSNLLLQYGSFCTQLNRALTGIAVEQDKNTQEVFAQVKQIYKTPPIKDFGGFNFSQILPDPSKPSKRSFIEDLLFNKVTLADAGFIKQYGDCLGDIAARDLICAQKFNGLTVLPPLLTDEMIAQYTSALLAGTITSGWTFGAGAALQIPFAMQMAYRFNGIGVTQNVLYENQKLIANQFNSAIGKIQDSLSSTASALGKLQDVVNQNAQALNTLVKQLSSNFGAISSVLNDILSRLDKVEAEVQIDRLITGRLQSLQTYVTQQLIRAAEIRASANLAATKMSECVLGQSKRVDFCGKGYHLMSFPQSAPHGVVFLHVTYVPAQEKNFTTAPAICHDGKAHFPREGVFVSNGTHWFVTQRNFYEPQIITTDNTFVSGNCDVVIGIVNNTVYDPLQPELDSFKEELDKYFKNHTSPDVDLGDISGINASVVNIQKEIDRLNEVAKNLNESLIDLQELGKYEQYIKGGSGYIPEAPRDGQAYVRKDGEWVLLSTFL

SEQ ID NO: 5667 - protein, 1241 aa, Artificial Sequence
  SARS-CoV-2/Netherlands/ZuidHolland_2/2020__EPI_ISL_414556 spike protein (1-1211) Foldon construct
MFVFLVLLPLVSSQCVNLTTRTQLPPAYTNSFTRGVYYPDKVFRSSVLHSTQDLFLPFFSNVTWFHAIHVSGTNGTKRFDNPVLPFNDGVYFASTEKSNIIRGWIFGTTLDSKTQSLLIVNNATNVVIKVCEFQFCNDPFLGVYYHKNNKSWMESEFRVYSSANNCTFEYVSQPFLMDLEGKQGNFKNLREFVFKNIDGYFKIYSKHTPINLVRDLPQGFSALEPLVDLPIGINITRFQTLLALHRSYLTPGDSSSGWTAGAAAYYVGYLQPRTFLLKYNENGTITDAVDCALDPLSETKCTLKSFTVEKGIYQTSNFRVQPTESIVRFPNITNLCPFGEVFNATRFASVYAWNRKRISNCVADYSVLYNSASFSTFKCYGVSPTKLNDLCFTNVYADSFVIRGDEVRQIAPGQTGKIADYNYKLPDDFTGCVIAWNSNNLDSKVGGNYNYLYRLFRKSNLKPFERDISTEIYQAGSTPCNGVEGFNCYFPLQSYGFQPTNGVGYQPYRVVVLSFELLHAPATVCGPKKSTNLVKNKCVNFNFNGLTGTGVLTESNKKFLPFQQFGRDIADTTDAVRDPQTLEILDITPCSFGGVSVITPGTNTSNQVAVLYQGVNCTEVPVAIHADQLTPTWRVYSTGSNVFQTRAGCLIGAEHVNNSYECDIPIGAGICASYQTQTNSPRRARSVASQSIIAYTMSLGAENSVAYSNNSIAIPTNFTISVTTEILPVSMTKTSVDCTMYICGDSTECSNLLLQYGSFCTQLNRALTGIALEQDKNTQEVFAQVKQIYKTPPIKDFGGFNFSQILPDPSKPSKRSFIEDLLFNKVTLADAGFIKQYGDCLGDIAARDLICAQKFNGLTVLPPLLTDEMIAQYTSALLAGTITSGWTFGAGAALQIPFAMQMAYRFNGIGVTQNVLYENQKLIANQFNSAIGKIQDSLSSTASALGKLQDVVNQNAQALNTLVKQLSSNFGAISSVLNDILSRLDKVEAEVQIDRLITGRLQSLQTYVTQQLIRAAEIRASANLAATKMSECVLGQSKRVDFCGKGYHLMSFPQSAPHGVVFLHVTYVPAQEKNFTTAPAICHDGKAHFPREGVFVSNGTHWFVTQRNFYEPQIITTDNTFVSGNCDVVIGIVNNTVYDPLQPELDSFKEELDKYFKNHTSPDVDLGDISGINASVVNIQKEIDRLNEVAKNLNESLIDLQELGKYEQYIKGGSGYIPEAPRDGQAYVRKDGEWVLLSTFL

SEQ ID NO: 5668 - protein, 1241 aa, Artificial Sequence
  SARS-CoV-2/USA/WA-UW31/2020__EPI_ISL_414618 spike protein (1-1211) Foldon construct
MFVFLVLLPLVSSQCVNLTTRTQLPPAYTNSFTRGVYYPDKVFRSSVLHSTQDLFLPFFSNVTWFHAIHVSGTNGTKRFDNPVLPFNDGVYFASTEKSNIIRGWIFGTTLDSKTQSLLIVNNATNVVIKVCEFQFCNDPFLGVYYHKNNKSWMESEFRVYSSANNCTFEYVSQPFLMDLEGKQGNFKNLREFVFKNIDGYFKIYSKHTPINLVRDLPQGFSALEPLVDLPIGINITRFQTLLALHRSYLTPGDSSSGWTAGAAAYYVGYLQPRTFLLKYNENGTITDAVDCALDPLSETKCTLKSFTVEKGIYQTSNFRVQPTESIVRFPNITNLCPFGEVFNATRFASVYAWNRKRISNCVADYSVLYNSASFSTFKCYGVSPTKLNDLCFTNVYADSFVIRGDEVRQIAPGQTGKIADYNYKLPDDFTGCVIAWNSNNLDSKVGGNYNYLYRLFRKSNLKPFERDISTEIYQAGSTPCNGAEGFNCYFPLQSYGFQPTNGVGYQPYRVVVLSFELLHAPATVCGPKKSTNLVKNKCVNFNFNGLTGTGVLTESNKKFLPFQQFGRDIADTTDAVRDPQTLEILDITPCSFGGVSVITPGTNTSNQVAVLYQDVNCTEVPVAIHADQLTPTWRVYSTGSNVFQTRAGCLIGAEHVNNSYECDIPIGAGICASYQTQTNSPRRARSVASQSIIAYTMSLGAENSVAYSNNSIAIPTNFTISVTTEILPVSMTKTSVDCTMYICGDSTECSNLLLQYGSFCTQLNRALTGIAVEQDKNTQEVFAQVKQIYKTPPIKDFGGFNFSQILPDPSKPSKRSFIEDLLFNKVTLADAGFIKQYGDCLGDIAARDLICAQKFNGLTVLPPLLTDEMIAQYTSALLAGTITSGWTFGAGAALQIPFAMQMAYRFNGIGVTQNVLYENQKLIANQFNSAIGKIQDSLSSTASALGKLQDVVNQNAQALNTLVKQLSSNFGAISSVLNDILSRLDKVEAEVQIDRLITGRLQSLQTYVTQQLIRAAEIRASANLAATKMSECVLGQSKRVDFCGKGYHLMSFPQSAPHGVVFLHVTYVPAQEKNFTTAPAICHDGKAHFPREGVFVSNGTHWFVTQRNFYEPQIITTDNTFVSGNCDVVIGIVNNTVYDPLQPELDSFKEELDKYFKNHTSPDVDLGDISGINASVVNIQKEIDRLNEVAKNLNESLIDLQELGKYEQYIKGGSGYIPEAPRDGQAYVRKDGEWVLLSTFL

SEQ ID NO: 5669 - protein, 1241 aa, Artificial Sequence
  SARS-CoV-2/South Korea/SNU01/2020__EPI_ISL_411929 spike protein (1-1211) Foldon construct
MFVFLVLLPLVSSQCVNLTTRTQLPPAYTNSFTRGVYYPDKVFRSSVLHSTQDLFLPFFSNVTWFHAIHVSGTNGTKRFDNPVLPFNDGVYFASTEKSNIIRGWIFGTTLDSKTQSLLIVNNATNVVIKVCEFQFCNDPFLGVYYHKNNKSWMESEFRVYSSANNCTFEYVSQPFLMDLEGKQGNFKNLREFVFKNIDGYFKIYSKHTPINLVRDLPQGFWALEPLVDLPIGINITRFQTLLALHRSYLTPGDSSSGWTAGAAAYYVGYLQPRTFLLKYNENGTITDAVDCALDPLSETKCTLKSFTVEKGIYQTSNFRVQPTESIVRFPNITNLCPFGEVFNATRFASVYAWNRKRISNCVADYSVLYNSASFSTFKCYGVSPTKLNDLCFTNVYADSFVIRGDEVRQIAPGQTGKIADYNYKLPDDFTGCVIAWNSNNLDSKVGGNYNYLYRLFRKSNLKPFERDISTEIYQAGSTPCNGVEGFNCYFPLQSYGFQPTNGVGYQPYRVVVLSFELLHAPATVCGPKKSTNLVKNKCVNFNFNGLTGTGVLTESNKKFLPFQQFGRDIADTTDAVRDPQTLEILDITPCSFGGVSVITPGTNTSNQVAVLYQDVNCTEVPVAIHADQLTPTWRVYSTGSNVFQTRAGCLIGAEHVNNSYECDIPIGAGICASYQTQTNSPRRARSVASQSIIAYTMSLGAENSVAYSNNSIAIPTNFTISVTTEILPVSMTKTSVDCTMYICGDSTECSNLLLQYGSFCTQLNRALTGIAVEQDKNTQEVFAQVKQIYKTPPIKDFGGFNFSQILPDPSKPSKRSFIEDLLFNKVTLADAGFIKQYGDCLGDIAARDLICAQKFNGLTVLPPLLTDEMIAQYTSALLAGTITSGWTFGAGAALQIPFAMQMAYRFNGIGVTQNVLYENQKLIANQFNSAIGKIQDSLSSTASALGKLQDVVNQNAQALNTLVKQLSSNFGAISSVLNDILSRLDKVEAEVQIDRLITGRLQSLQTYVTQQLIRAAEIRASANLAATKMSECVLGQSKRVDFCGKGYHLMSFPQSAPHGVVFLHVTYVPAQEKNFTTAPAICHDGKAHFPREGVFVSNGTHWFVTQRNFYEPQIITTDNTFVSGNCDVVIGIVNNTVYDPLQPELDSFKEELDKYFKNHTSPDVDLGDISGINASVVNIQKEIDRLNEVAKNLNESLIDLQELGKYEQYIKGGSGYIPEAPRDGQAYVRKDGEWVLLSTFL

SEQ ID NO: 5670 - protein, 1241 aa, Artificial Sequence
  SARS-CoV-2/China/WF0004/2020__EPI_ISL_413694 spike protein (1-1211) Foldon construct
MFVFLVLLPLVSSQCVNLTTRTQLPPAYTNSFTRGVYYPDKVFRSSVLHSTQDLFLPFFSNVTWFHAIHVSGTNGTKRFDNPVLPFNDGVYFASTEKSNIIRGWIFGTTLDSKTQSLLIVNNATNVVIKVCEFQFCNDPFLGVYYHKNNKSWTESEFRVYSSANNCTFEYVSQPFLMDLEGKQGNFKNLREFVFKNIDGYFKIYSKHTPINLVRDLPQGFSALEPLVDLPIGINITRFQTLLALHRSYLTPGDSSSGWTAGAAAYYVGYLQPRTFLLKYNENGTITDAVDCALDPLSETKCTLKSFTVEKGIYQTSNFRVQPTESIVRFPNITNLCPFGEVFNATRFASVYAWNRKRISNCVADYSVLYNSASFSTFKCYGVSPTKLNDLCFTNVYADSFVIRGDEVRQIAPGQTGKIADYNYKLPDDFTGCVIAWNSNNLDSKVGGNYNYLYRLFRKSNLKPFERDISTEIYQAGSTPCNGVEGFNCYFPLQSYGFQPTNGVGYQPYRVVVLSFELLHAPATVCGPKKSTNLVKNKCVNFNFNGLTGTGVLTESNKKFLPFQQFGRDIADTTDAVRDPQTLEILDITPCSFGGVSVITPGTNTSNQVAVLYQDVNCTEVPVAIHADQLTPTWRVYSTGSNVFQTRAGCLIGAEHVNNSYECDIPIGAGICASYQTQTNSPRRARSVASQSIIAYTMSLGAENSVAYSNNSIAIPTNFTISVTTEILPVSMTKTSVDCTMYICGDSTECSNLLLQYGSFCTQLNRALTGIAVEQDKNTQEVFAQVKQIYKTPPIKDFGGFNFSQILPDPSKPSKRSFIEDLLFNKVTLADAGFIKQYGDCLGDIAARDLICAQKFNGLTVLPPLLTDEMIAQYTSALLAGTITSGWTFGAGAALQIPFAMQMAYRFNGIGVTQNVLYENQKLIANQFNSAIGKIQDSLSSTASALGKLQDVVNQNAQALNTLVKQLSSNFGAISSVLNDILSRLDKVEAEVQIDRLITGRLQSLQTYVTQQLIRAAEIRASANLAATKMSECVLGQSKRFDFCGKGYHLMSFPQSAPHGVVFLHVTYVPAQEKNFTTAPAICHDGKAHFPREGVFVSNGTHWFVTQRNFYEPQIITTDNTFVSGNCDVVIGIVNNTVYDPLQPELDSFKEELDKYFKNHTSPDVDLGDISGINASVVNIQKEIDRLNEVAKNLNESLIDLQELGKYEQYIKGGSGYIPEAPRDGQAYVRKDGEWVLLSTFL

SEQ ID NO: 5671 - protein, 1241 aa, Artificial Sequence
  SARS-CoV-2/China/WF0028/2020__EPI_ISL_413791 spike protein (1-1211) Foldon construct
MFVFLVLLPLVSSQCVNLTTRTQLPPAYTNSFTRGVYYPDKVFRSSVLHSTQDLFLPFFSNVTWFHAIHVSGTNGTKRFDNPVLPFNDGVYFASTEKSNIIRGWIFGTTLDSKTQSLLIVNNATNVVIKVCEFQFCNDPFLGVYYHKNNKSWMESEFRVYSSANNCTFEYVSQPFLMDLEGKQGNFKNLREFVFKNIDGYFKIYSKHTPINLVRDLPQGFSALEPLVDLPIGINITRFQTLLALHRSYLTPGDSSSGWTAGAAAYYVGYLQPRTFLLKYNENGTITDAVDCALDPLSETKCTLKSFTVEKGIYQTSNFRVQPTESIVRFPNITNLCPFGEVFNATRFASVYAWNRKRISNCVADYSVLYNSASFSTFKCYGVSPTKLNDLCFTNVYADSFVIRGDEVRQIAPGQTGKIADYNYKLPDDFTGCVIAWNSNNLDSKVGGNYNYLYRLFRKSNLKPFERDISTEIYQAGSTPCNGVEGFNCYFPLQSYGFQPTNGVGYQPYRVVVLSFELLHAPATVCGPKKSTNLVKNKCVNFNFNGLTGTGVLTESNKKFLPFQQFGRDIADTTDAVRDPQTLEILDITPCSFGGVSVITPGTNTSNQVAVLYQDVNCTEVPVAIHADQLTPTWRVYSTGSNVFQTRAGCLIGAEHVNNSYECDIPIGAGICASYQTQTNSPRRARSVASQSIIAYTMSLGAENSVAYSNNSIAIPTNFTISVTTEILPVSMTKTSVDCTMYICGDSTECSNLLLQYGSFCTQLNRALTGIAVEQDKNTQEVFAQVKQIYKTPPIKDFGGFNFSQILPDPSKPSKRSFIEDLLFNKVTLADAGFIKQYGDCLGDIAARDLICAQKFNGLTVLPPLLTDEMIAQYTSALLAGTITSGWTFGAGAALQIPFAMQMAYRFNGIGVTQNVLYENQKLIANQFNSAIGKIQDSLSSTASALGKLQDVVNQNAQALNTLVKQLSSNFGAISSVLNDILSRLDKVEAEVQIDRLITGRLQSLQTYVTQQLIRAAEIRASANLAATKMSECVLGQSKRVDFCGKGYHLMSFPQSAPHGVVFLHVTYVPAQEKNFTTAPAICHDGKAHFPREGVFVSNGTHWFVTQRNFYEPQIITTDNTFVSGNCDVVIGIVNNTVYDPLQPELESFKEELDKYFKNHTSPDVDLGDISGINASVVNIQKEIDRLNEVAKNLNESLIDLQELGKYEQYIKGGSGYIPEAPRDGQAYVRKDGEWVLLSTFL

SEQ ID NO: 5672 - protein, 1241 aa, Artificial Sequence
  SARS-CoV-2/2019-nCoV/USA-CruiseA-18/2020__MT159716.1 spike protein (1-1211) Foldon construct
MFVFLVLLPLVSSQCVNLTTRTQLPPAYTNSFTRGVYYPDKVFRSSVLHSTQDLFLPFFSNVTWFHAIHVSGTNGTKRFDNPVLPFNDGVYFASTEKSNIIRGWIFGTTLDSKTQSLLIVNNATNVVIKVCEFQFCNDPFLGVYYHKNNKSWMESELRVYSSANNCTFEYVSQPFLMDLEGKQGNFKNLREFVFKNIDGYFKIYSKHTPINLVRDLPQGFSALEPLVDLPIGINITRFQTLLALHRSYLTPGDSSSGWTAGAAAYYVGYLQPRTFLLKYNENGTITDAVDCALDPLSETKCTLKSFTVEKGIYQTSNFRVQPTESIVRFPNITNLCPFGEVFNATRFASVYAWNRKRISNCVADYSVLYNSASFSTFKCYGVSPTKLNDLCFTNVYADSFVIRGDEVRQIAPGQTGKIADYNYKLPDDFTGCVIAWNSNNLDSKVGGNYNYLYRLFRKSNLKPFERDISTEIYQAGSTPCNGVEGFNCYFPLQSYGFQPTNGVGYQPYRVVVLSFELLHAPATVCGPKKSTNLVKNKCVNFNFNGLTGTGVLTESNKKFLPFQQFGRDIADTTDAVRDPQTLEILDITPCSFGGVSVITPGTNTSNQVAVLYQDVNCTEVPVAIHADQLTPTWRVYSTGSNVFQTRAGCLIGAEHVNNSYECDIPIGAGICASYQTQTNSPRRARSVASQSIIAYTMSLGAENSVAYSNNSIAIPTNFTISVTTEILPVSMTKTSVDCTMYICGDSTECSNLLLQYGSFCTQLNRALTGIAVEQDKNTQEVFAQVKQIYKTPPIKDFGGFNFSQILPDPSKPSKRSFIEDLLFNKVTLADAGFIKQYGDCLGDIAARDLICAQKFNGLTVLPPLLTDEMIAQYTSALLAGTITSGWTFGAGAALQIPFAMQMAYRFNGIGVTQNVLYENQKLIANQFNSAIGKIQDSLSSTASALGKLQDVVNQNAQALNTLVKQLSSNFGAISSVLNDILSRLDKVEAEVQIDRLITGRLQSLQTYVTQQLIRAAEIRASANLAATKMSECVLGQSKRVDFCGKGYHLMSFPQSAPHGVVFLHVTYVPAQEKNFTTAPAICHDGKAHFPREGVFVSNGTHWFVTQRNFYEPQIITTDNTFVSGNCDVVIGIVNNTVYDPLQPELDSFKEELDKYFKNHTSPDVDLGDISGINASVVNIQKEIDRLNEVAKNLNESLIDLQELGKYEQYIKGGSGYIPEAPRDGQAYVRKDGEWVLLSTFL

SEQ ID NO: 5673 - protein, 1241 aa, Artificial Sequence
  SARS-CoV-2/SARS-CoV-2/Yunnan-01/human/2020/CHN__MT049951.1 spike protein (1-1211) Foldon construct
MFVFLVLLPLVSSQCVNLTTRTQLPPANTNSFTRGVYYPDKVFRSSVLHSTQDLFLPFFSNVTWFHAIHVSGTNGTKRFDNPVLPFNDGVYFASTEKSNIIRGWIFGTTLDSKTQSLLIVNNATNVVIKVCEFQFCNDPFLGVYYHKNNKSWMESEFRVYSSANNCTFEYVSQPFLMDLEGKQGNFKNLREFVFKNIDGYFKIYSKHTPINLVRDLPQGFSALEPLVDLPIGINITRFQTLLALHRSYLTPGDSSSGWTAGAAAYYVGYLQPRTFLLKYNENGTITDAVDCALDPLSETKCTLKSFTVEKGIYQTSNFRVQPTESIVRFPNITNLCPFGEVFNATRFASVYAWNRKRISNCVADYSVLYNSASFSTFKCYGVSPTKLNDLCFTNVYADSFVIRGDEVRQIAPGQTGKIADYNYKLPDDFTGCVIAWNSNNLDSKVGGNYNYLYRLFRKSNLKPFERDISTEIYQAGSTPCNGVEGFNCYFPLQSYGFQPTNGVGYQPYRVVVLSFELLHAPATVCGPKKSTNLVKNKCVNFNFNGLTGTGVLTESNKKFLPFQQFGRDIADTTDAVRDPQTLEILDITPCSFGGVSVITPGTNTSNQVAVLYQDVNCTEVPVAIHADQLTPTWRVYSTGSNVFQTRAGCLIGAEHVNNSYECDIPIGAGICASYQTQTNSPRRARSVASQSIIAYTMSLGAENSVAYSNNSIAIPTNFTISVTTEILPVSMTKTSVDCTMYICGDSTECSNLLLQYGSFCTQLNRALTGIAVEQDKNTQEVFAQVKQIYKTPPIKDFGGFNFSQILPDPSKPSKRSFIEDLLFNKVTLADAGFIKQYGDCLGDIAARDLICAQKFNGLTVLPPLLTDEMIAQYTSALLAGTITSGWTFGAGAALQIPFAMQMAYRFNGIGVTQNVLYENQKLIANQFNSAIGKIQDSLSSTASALGKLQDVVNQNAQALNTLVKQLSSNFGAISSVLNDILSRLDKVEAEVQIDRLITGRLQSLQTYVTQQLIRAAEIRASANLAATKMSECVLGQSKRVDFCGKGYHLMSFPQSAPHGVVFLHVTYVPAQEKNFTTAPAICHDGKAHFPREGVFVSNGTHWFVTQRNFYEPQIITTDNTFVSGNCDVVIGIVNNTVYDPLQPELDSFKEELDKYFKNHTSPDVDLGDISGINASVVNIQKEIDRLNEVAKNLNESLIDLQELGKYEQYIKGGSGYIPEAPRDGQAYVRKDGEWVLLSTFL

SEQ ID NO: 5674 - protein, 1241 aa, Artificial Sequence
  SARS-CoV-2/USA/WA-UW292/2020__EPI_ISL_418077 spike protein (1-1211) Foldon construct
MFVFLVLLPLVSSQCVNLTTRTQLPPAYTNSFTRGVYYPDKVFRSSVLHSTQDLFLPFFSNVTWFHAIHVSGTNGTKRFDNPVLPFNDGVYFASTEKSNIIRGWIFGTTLDSKTQSLLIVNNATNVVIKVCEFQFCNDPFLGVYYHKNNKSWMESEFRVYSSANNCTFEYVSQPFLMDLEGKQGNFKNLREFVFKNIDGYFKIYSKHTPINLVRDLPQGFSALEPLVDLPIGINITRFQTLLALHRSYLTPGDSSSGWTAGAAAYYVGYLQPRTFLLKYNENGTITDAVDCALDPLSETKCTLKSFTVEKGIYQTSNFRVQPTESIVRFPNITNLCPFGEVFNATRFASVYAWNRKRISNCVADYSVLYNSASFSTFKCYGVSPTKLNDLCFTNVYADSFVIRGDEVRQIAPGQTGKIADYNYKLPDDFTGCVIAWNSNNLDSKVGGNYNYLYRLFRKSNLKPFERDISTEIYQASSTPCNGVEGFNCYFPLQSYGFQPTNGVGYQPYRVVVLSFELLHAPATVCGPKKSTNLVKNKCVNFNFNGLTGTGVLTESNKKFLPFQQFGRDIADTTDAVRDPQTLEILDITPCSFGGVSVITPGTNTSNQVAVLYQDVNCTEVPVAIHADQLTPTWRVYSTGSNVFQTRAGCLIGAEHVNNSYECDIPIGAGICASYQTQTNSPRRARSVASQSIIAYTMSLGAENSVAYSNNSIAIPTNFTISVTTEILPVSMTKTSVDCTMYICGDSTECSNLLLQYGSFCTQLNRALTGIAVEQDKNTQEVFAQVKQIYKTPPIKDFGGFNFSQILPDPSKPSKRSFIEDLLFNKVTLADAGFIKQYGDCLGDIAARDLICAQKFNGLTVLPPLLTDEMIAQYTSALLAGTITSGWTFGAGAALQIPFAMQMAYRFNGIGVTQNVLYENQKLIANQFNSAIGKIQDSLSSTASALGKLQDVVNQNAQALNTLVKQLSSNFGAISSVLNDILSRLDKVEAEVQIDRLITGRLQSLQTYVTQQLIRAAEIRASANLAATKMSECVLGQSKRVDFCGKGYHLMSFPQSAPHGVVFLHVTYVPAQEKNFTTAPAICHDGKAHFPREGVFVSNGTHWFVTQRNFYEPQIITTDNTFVSGNCDVVIGIVNNTVYDPLQPELDSFKEELDKYFKNHTSPDVDLGDISGINASVVNIQKEIDRLNEVAKNLNESLIDLQELGKYEQYIKGGSGYIPEAPRDGQAYVRKDGEWVLLSTFL

SEQ ID NO: 5675 - protein, 1241 aa, Artificial Sequence
  SARS-CoV-2/Iceland/192/2020__EPI_ISL_417819 spike protein (1-1211) Foldon construct
MFVFFVLLPLVSSQCVNLTTRTQLPPAYTNSFTRGVYYPDKVFRSSVLHSTQDLFLPFFSNVTWFHAIHVSGTNGTKRFDNPVLPFNDGVYFASTEKSNIIRGWIFGTTLDSKTQSLLIVNNATNVVIKVCEFQFCNDPFLGVYYHKNNKSWMESEFRVYSSANNCTFEYVSQPFLMDLEGKQGNFKNLREFVFKNIDGYFKIYSKHTPINLVRDLPQGFSALEPLVDLPIGINITRFQTLLALHRSYLTPGDSSSGWTAGAAAYYVGYLQPRTFLLKYNENGTITDAVDCALDPLSETKCTLKSFTVEKGIYQTSNFRVQPTESIVRFPNITNLCPFGEVFNATRFASVYAWNRKRISNCVADYSVLYNSASFSTFKCYGVSPTKLNDLCFTNVYADSFVIRGDEVRQIAPGQTGKIADYNYKLPDDFTGCVIAWNSNNLDSKVGGNYNYLYRLFRKSNLKPFERDISTEIYQAGSTPCNGVEGFNCYFPLQSYGFQPTNGVGYQPYRVVVLSFELLHAPATVCGPKKSTNLVKNKCVNFNFNGLTGTGVLTESNKKFLPFQQFGRDIADTTDAVRDPQTLEILDITPCSFGGVSVITPGTNTSNQVAVLYQGVNCTEVPVAIHADQLTPTWRVYSTGSNVFQTRAGCLIGAEHVNNSYECDIPIGAGICASYQTQTNSPRRARSVASQSIIAYTMSLGAENSVAYSNNSIAIPTNFTISVTTEILPVSMTKTSVDCTMYICGDSTECSNLLLQYGSFCTQLNRALTGIAVEQDKNTQEVFAQVKQIYKTPPIKDFGGFNFSQILPDPSKPSKRSFIEDLLFNKVTLADAGFIKQYGDCLGDIAARDLICAQKFNGLTVLPPLLTDEMIAQYTSALLAGTITSGWTFGAGAALQIPFAMQMAYRFNGIGVTQNVLYENQKLIANQFNSAIGKIQDSLSSTASALGKLQDVVNQNAQALNTLVKQLSSNFGAISSVLNDILSRLDKVEAEVQIDRLITGRLQSLQTYVTQQLIRAAEIRASANLAATKMSECVLGQSKRVDFCGKGYHLMSFPQSAPHGVVFLHVTYVPAQEKNFTTAPAICHDGKAHFPREGVFVSNGTHWFVTQRNFYEPQIITTDNTFVSGNCDVVIGIVNNTVYDPLQPELDSFKEELDKYFKNHTSPDVDLGDISGINASVVNIQKEIDRLNEVAKNLNESLIDLQELGKYEQYIKGGSGYIPEAPRDGQAYVRKDGEWVLLSTFL

SEQ ID NO: 5676 - protein, 1241 aa, Artificial Sequence
  SARS-CoV-2/Belgium/ULG-6939/2020__EPI_ISL_417020 spike protein (1-1211) Foldon construct
MFVFLVLLPLVSSQCVNLTTRTQLPPAYTNSFTRGVYYPDKVFRSSVLHSTQDLFLPFFSNVTWFHAIHVSGTNGTKRFDNPVLPFNDGVYFASTEKSNIIRGWIFGTTLDSKTQSLLIVNNATNVVIKVCEFQFCNDPFLGVYYHKNNKSWMESEFRVYSSANNCTFEYVSQPFLMDLEGKQGNFKNLREFVFKNIDGYFKIYSKHTPINLVRDLPQGFSALEPLVDLPIGINITRFQTLLALHRSYLTPGDSSSGWTAGAAAYYVGYLQPRTFLLKYNENGTITDAVDCALDPLSETKCTLKSFTVEKGIYQTSNFRVQPTESIVRFPNITNLCPFGEVFNATRFASVYAWNRKRISNCVADYSVLYNSASFSTFKCYGVSPTKLNDLCFTNVYADSFVIRGDEVRQIAPGQTGKIADYNYKLPDDFTGCVIAWNSNNLDSKVGGNYNYLYRLFRKSNLKPFERDISTEIYQAGSTPCNGVEGFNCYFPLQSYGFQPTNGVGYQPYRVVVLSFELLHAPATVCGPKKSTNLVKNKCVNFNFNGLTGTGVLTESNKKFLPFQQFGRDIADTTDAVRDPQTLEILDITPCSFGGVSVITPGTNTSNQVAVLYQGVNCTEVPVAIHADQLTPTWRVYSTGSNVFQTRAGCLIGAEHVNNSYECDIPIGAGICASYQTQTNSPRRARSVASQSIIAYTMSLGAENSVVYSNNSIAIPTNFTISVTTEILPVSMTKTSVDCTMYICGDSTECSNLLLQYGSFCTQLNRALTGIAVEQDKNTQEVFAQVKQIYKTPPIKDFGGFNFSQILPDPSKPSKRSFIEDLLFNKVTLADAGFIKQYGDCLGDIAARDLICAQKFNGLTVLPPLLTDEMIAQYTSALLAGTITSGWTFGAGAALQIPFAMQMAYRFNGIGVTQNVLYENQKLIANQFNSAIGKIQDSLSSTASALGKLQDVVNQNAQALNTLVKQLSSNFGAISSVLNDILSRLDKVEAEVQIDRLITGRLQSLQTYVTQQLIRAAEIRASANLAATKMSECVLGQSKRVDFCGKGYHLMSFPQSAPHGVVFLHVTYVPAQEKNFTTAPAICHDGKAHFPREGVFVSNGTHWFVTQRNFYEPQIITTDNTFVSGNCDVVIGIVNNTVYDPLQPELDSFKEELDKYFKNHTSPDVDLGDISGINASVVNIQKEIDRLNEVAKNLNESLIDLQELGKYEQYIKGGSGYIPEAPRDGQAYVRKDGEWVLLSTFL

SEQ ID NO: 5677 - protein, 1241 aa, Artificial Sequence
  SARS-CoV-2/France/HF2496/2020__EPI_ISL_418231 spike protein (1-1211) Foldon construct
MFVFLVLLPLVSSQCVNLTTRTQLPPAYTNSFTRGVYYPDKVFRSSVLHSTQDLFLPFFSNVTWFHAIHVSGTNGTKRFDNPVLPFNDGVYFASTEKSNIIRGWIFGTTLDSKTQSLLIVNNATNVVIKVCEFQFCNDPFLGVYYHKNNKSWMESEFRVYSSANNCTFEYVSQPFLMDLEGKQGNFKNLREFVFKNIDGYFKIYSKHTPINLVRDLPQGFSALEPLVDLPIGINITRFQTLLALHRSYLTPGDSSSGWTAGAAAYYVGYLQPRTFLLKYNENGTITDAVDCALDPLSETKCTLKSFTVEKGIYQTSNFRVQPTESIVRFPNITNLCPFGEVFNATRFASVYAWNRKRISNCVADYSVLYNSASFSTFKCYGVSPTKLNDLCFTNVYADSFVIRGDEVRQIAPGQTGKIADYNYKLPDDFTGCVIAWNSNNLDSKVGGNYNYLYRLFRKSNLKPFERDISTEIYQAGSTPCNGVEGFNCYFPLQSYGFQPTNGVGYQPYRVVVLSFELLHAPATVCGPKKSTNLVKNKCVNFNFNGLTGTGVLTESNKKFLPFQQFGRDIADTTDAVRDPQTLEILDITPCSFGGVSVITPGTNTSNQVAVLYQGVNCTEVPVAIHADQLTPTWRVYSTGSNVFQTRAGCLIGAEHVNNSYECDIPIGAGICASYQTQTNSPRRARSVASQSIIAYTMSLGAENSVAYSNNSIAIPTNFTISVTTEILPVSMTKTSVDCTMYICGDSTECSNLLLQYGSFCTQLNRALTGIAVEQDKNTQEVFAQVKQIYKTPPIKDFGGFNFSQILPDPSKPSKRSFIEDLLFNKVTLADAGFIKQYGDCLGDIVARDLICAQKFNGLTVLPPLLTDEMIAQYTSALLAGTITSGWTFGAGAALQIPFAMQMAYRFNGIGVTQNVLYENQKLIANQFNSAIGKIQDSLSSTASALGKLQDVVNQNAQALNTLVKQLSSNFGAISSVLNDILSRLDKVEAEVQIDRLITGRLQSLQTYVTQQLIRAAEIRASANLAATKMSECVLGQSKRVDFCGKGYHLMSFPQSAPHGVVFLHVTYVPAQEKNFTTAPAICHDGKAHFPREGVFVSNGTHWFVTQRNFYEPQIITTDNTFVSGNCDVVIGIVNNTVYDPLQPELDSFKEELDKYFKNHTSPDVDLGDISGINASVVNIQKEIDRLNEVAKNLNESLIDLQELGKYEQYIKGGSGYIPEAPRDGQAYVRKDGEWVLLSTFL

SEQ ID NO: 5678 - protein, 1241 aa, Artificial Sequence
  SARS-CoV-2/USA/WA-UW291/2020__EPI_ISL_418076 spike protein (1-1211) Foldon construct
MFVFLVLLPLVSSQCVNLTTRTQLPPAYTNSFTRGVYYPDKVFRSSVLHSTQDLFLPFFSNVTWFHAIHVSGTNGTKRFDNPVLPFNDGVYFASTEKSNIIRGWIFGTTLDSKTQSLLIVNNATNVVIKVCEFQFCNDPFLGVYYHKNNKSWMESEFRVYSSANNCTFEYVSQPFLMDLEGKQGNFKNLREFVFKNIDGYFKIYSKHTPINLVRDLPQGFSALEPLVDLPIGINITRFQTLLALHRSYLTPGDSSSGWTAGAAAYYVGYLQPRTFLLKYNENGTITDAVDCALDPLSETKCTLKSFTVEKGIYQTSNFRVQPTESIVRFPNITNLCPFGEVFNATRFASVYAWNRKRISNCVADYSVLYNSASFSTFKCYGVSPTKLNDLCFTNVYADSFVIRGDEVRQIAPGQTGKIADYNYKLPDDFTGCVIAWNSNNLDSKVGGNYNYLYRLFRKSNLKPFERDISTEIYQAGSTPCNGVEGFNCYFPLQSYGFQPTNGVGYQPYRVVVLSFELLHAPATVCGPKKSTNLVKNKCVNFNFNGLTGTGVLTESNKKFLPFQQFGRDIADTTDAVRDPQTLEILDITPCSFGGVSVITPGTNTSNQVAVLYQGVNCTEVPVAIHADQLTPTWRVYSTGSNVFQTRAGCLIGAEHVNNSYECDIPIGAGICASYQTQTNSPRRARSVASQSIIAYTMSLGAENSVAYSNNSIAIPTNFTISVTTEILPVSMTKTSVDCTMYICGDSTECSNLLLQYGSFCTQLNRALTGIAVEQDKNTQEVFAQVKQIYKTPPIKDFGGFNFSQILPDPSKPSKRSFIEDLLFNKVTLADAGFIKQYGDCLGDIAARDLICAQKFNGLTVLPPLLTDEMIAQYTSALLAGTITSGWTFGAGAALQIPFAMQMAYRFNGIGVTQNVLYENQKLIANQFNSAIGKIQYSLSSTASALGKLQDVVNQNAQALNTLVKQLSSNFGAISSVLNDILSRLDKVEAEVQIDRLITGRLQSLQTYVTQQLIRAAEIRASANLAATKMSECVLGQSKRVDFCGKGYHLMSFPQSAPHGVVFLHVTYVPAQEKNFTTAPAICHDGKAHFPREGVFVSNGTHWFVTQRNFYEPQIITTDNTFVSGNCDVVIGIVNNTVYDPLQPELDSFKEELDKYFKNHTSPDVDLGDISGINASVVNIQKEIDRLNEVAKNLNESLIDLQELGKYEQYIKGGSGYIPEAPRDGQAYVRKDGEWVLLSTFL

SEQ ID NO: 5679 - protein, 1241 aa, Artificial Sequence; identical to SEQ ID NO: 84
  SARS-CoV-2/Portugal/PT0034/2020__EPI_ISL_418019 spike protein (1-1211) Foldon construct

SEQ ID NO: 5680 - protein, 1241 aa, Artificial Sequence
  SARS-CoV-2/Iceland/202/2020__EPI_ISL_417750 spike protein (1-1211) Foldon construct
MFVFLVLLPLVSSQCVNLTTRTQLPPAYTNSFTRGVYYPDKVFRSSVLHSTQDLFLPFFSNVTWFHAIHVSGTNGTKRFDNPVLPFNDGVYFASTEKSNIIRGWIFGTTLDSKTQSLLIVNNATNVVIKVCEFQFCNDPFLGVYYHKNNKSWMESEFRVYSSANNCTFEYVSQPFLMDLEGKQGNFKNLREFVFKNIDGYFKIYSKHTPINLVRDLPQGFSALEPLVDLPIGINITRFQTLLALHRSYLTPGDSSSGWTAGAAAYYVGYLQPRTFLLKYNENGTITDAVDCALDPLSETKCTLKSFTVEKGIYQTSNFRVQPTESIVRFPNITNLCPFGEVFNATRFASVYAWNRKRISNCVADYSVLYNSASFSTFKCYGVSPTKLNDLCFTNVYADSFVIRGDEVRQIAPGQTGKIADYNYKLPDDFTGCVIAWNSNNLDSKVGGNYNYLYRLFRKSNLKPFERDISTEIYQAGSTPCNGVEGFNCYFPLQSYGFQPTNGVGYQPYRVVVLSFELLHAPATVCGPKKSTNLVKNKCVNFNFNGLTGTGVLTESNKKFLPFQQFGRDIADTTDAVRDPQTLEILDITPCSFGGVSVITPGTNTSNQVAVLYQDVNCTEVPVAIHADQLTPTWRVYSTGSNVFQTRAGCLIGAEHVNNSYECDIPIGAGICASYQTQTNSPRRARSVASQSIIAYTMSLGAENSVAYSNNSIAIPTNFTISVTTEILPVSMTKTSVDCTMYICGDSTECSNLLLQYGSFCTQLNRALTGIAVEQDKNTQEVFAQVKQIYKTPPIKDFGGFNFSQILPDPSKPSKRSFIEDLLFNKVTLADAGFIKQYGDCLGDIAARDLICAQKFNGLTVLPPLLTDEMIAQYTSALLAGTITSGWTFGAGAALQIPFAMQMAYRFNGIGVTQNVLYENQKLIANQFNSAIGKIQDSLSSTASALGKLQDVVNQNAQALNTLVKQLSSNFGAISSVLNDILSRLDKVEAEVQIDRLITGRLQSLQTYVTQQLIRAAEIRASANLAATKMSECVLGQSKRVDFCGKGYHLMSFPQSAPHGVVFLHVTYVPAQEKNFTTAPAICHDGKAHFPREGVFVSNGTHWFVTQRNFYEPQIITTDNTFVSGNCDVVIGIVNNTVYDPLQPELDSFKEELDKYFKNHTSPDVDLGDIPGINASVVNIQKEIDRLNEVAKNLNESLIDLQELGKYEQYIKGGSGYIPEAPRDGQAYVRKDGEWVLLSTFL

SEQ ID NO: 5681 - protein, 1241 aa, Artificial Sequence
  SARS-CoV-2/USA/WA-UW261/2020__EPI_ISL_418046 spike protein (1-1211) Foldon construct
MFVFLVLLPLVSSQCVNLTTRTQLPPAYTNSFTRGVYYPDKVFRSSVLHSTQDLFLPFFSNVTWFHAIHVSGTNGTKRFDNPVLPFNDGVYFASTEKSNIIRGWIFGTTLDSKTQSLLIVNNATNVVIKVCEFQFCNDPFLGVYYHKNNKSWMESEFRVYSSANNCTFEYVSQPFLMDLEGKQGNFKNLREFVFKNIDGYFKIYSKHTPINLVRDLPQGFSALEPLVDLPIGINITRFQTLLALHRSYLTPGDSSSGWTAGAAAYYVGYLQPRTFLLKYNENGTITDAVDCALDPLSETKCTLKSFTVEKGIYQTSNFRVQPTESIVRFPNITNLCPFGEVFNATRFTSVYAWNRKRISNCVADYSVLYNSASFSTFKCYGVSPTKLNDLCFTNVYADSFVIRGDEVRQIAPGQTGKIADYNYKLPDDFTGCVIAWNSNNLDSKVGGNYNYLYRLFRKSNLKPFERDISTEIYQAGSTPCNGVEGFNCYFPLQSYGFQPTNGVGYQPYRVVVLSFELLHAPATVCGPKKSTNLVKNKCVNFNFNGLTGTGVLTESNKKFLPFQQFGRDIADTTDAVRDPQTLEILDITPCSFGGVSVITPGTNTSNQVAVLYQDVNCTEVPVAIHADQLTPTWRVYSTGSNVFQTRAGCLIGAEHVNNSYECDIPIGAGICASYQTQTNSPRRARSVASQSIIAYTMSLGAENSVAYSNNSIAIPTNFTISVTTEILPVSMTKTSVDCTMYICGDSTECSNLLLQYGSFCTQLNRALTGIAVEQDKNTQEVFAQVKQIYKTPPIKDFGGFNFSQILPDPSKPSKRSFIEDLLFNKVTLADAGFIKQYGDCLGDIAARDLICAQKFNGLTVLPPLLTDEMIAQYTSALLAGTITSGWTFGAGAALQIPFAMQMAYRFNGIGVTQNVLYENQKLIANQFNSAIGKIQDSLSSTASALGKLQDVVNQNAQALNTLVKQLSSNFGAISSVLNDILSRLDKVEAEVQIDRLITGRLQSLQTYVTQQLIRAAEIRASANLAATKMSECVLGQSKRVDFCGKGYHLMSFPQSAPHGVVFLHVTYVPAQEKNFTTAPAICHDGKAHFPREGVFVSNGTHWFVTQRNFYEPQIITTDNTFVSGNCDVVIGIVNNTVYDPLQPELDSFKEELDKYFKNHTSPDVDLGDISGINASVVNIQKEIDRLNEVAKNLNESLIDLQELGKYEQYIKGGSGYIPEAPRDGQAYVRKDGEWVLLSTFL

SEQ ID NO: 5682 - protein, 1241 aa, Artificial Sequence
  SARS-CoV-2/Portugal/PT0035/2020__EPI_ISL_418020 spike protein (1-1211) Foldon construct
MFVFLVLLPLVSSQCVNLTTRTQLPPAYTNSFTRGVYYPDKVFRSSVLHSTQDLFLPFFSNVTWFHAIHVSGTNGTKRFDNPVLPFNDGVYFASTEKSNIIRGWIFGTTLDSKTQSLLIVNNATNVVIKVCEFQFCNDPFLGVYYHKNNKSWMESEFRVYSSANNCTFEYVSQPFLMDLEGKQGNFKNLREFVFKNIDGYFKIYSKHTPINLVRDLPQGFSALEPLVDLPIGINITRFQTLLALHRSYLTPGDSSSGWTAGAAAYYVGYLQPRTFLLKYNENGTITDAVDCALDPLSETKCTLKSFTVEKGIYQTSNFRVQPTESIVRFPNITNLCPFGEVFNATRFASVYAWNRKRISNCVADYSVLYNSASFSTFKCYGVSPTKLNDLCFTNVYADSFVIRGDEVRQIAPGQTGKIADYNYKLPDDFTGCVIAWNSNNLDSKVGGNYNYLYRLFRKSNLKPFERDISTEIYQAGSTPCNGVEGFNCYFPLQSYGFQPTNGVGYQPYRVVVLSFELLHAPATVCGPKKSTNLVKNKCVNFNFNGLTGTGVLTESNKKFLPFQQFGRDIADTTDAVRDPQTLEILDITPCSFGGVSVITPGTNTSNQVAVLYQDVNCTEVPVAIHADQLTPTWRVYSTGSNVFQTRAGCLIGAEHVNNSYECDIPIGAGICASYQTQTNSPRRARSVASQSIIAYTMSLGAENSVAYSNNSIAIPTNFTISVTTEILPVSMTKTSVDCTMYICGDSTECSNLLLQYGSFCTQLNRALTGIAVEQDKNTQEVFAQVKQIYKTPPIKDFGGFNFSQILPDPSKPSKRSFIEDLLFNKVTLADAGFIKQYGDCLGDISARDLICAQKFNGLTVLPPLLTDEMIAQYTSALLAGTITSGWTFGAGAALQIPFAMQMAYRFNGIGVTQNVLYENQKLIANQFNSAIGKIQDSLSSTASALGKLQDVVNQNAQALNTLVKQLSSNFGAISSVLNDILSRLDKVEAEVQIDRLITGRLQSLQTYVTQQLIRAAEIRASANLAATKMSECVLGQSKRVDFCGKGYHLMSFPQSAPHGVVFLHVTYVPAQEKNFTTAPAICHDGKAHFPREGVFVSNGTHWFVTQRNFYEPQIITTDNTFVSGNCDVVIGIVNNTVYDPLQPELDSFKEELDKYFKNHTSPDVDLGDISGINASVVNIQKEIDRLNEVAKNLNESLIDLQELGKYEQYIKGGSGYIPEAPRDGQAYVRKDGEWVLLSTFL

SEQ ID NO: 5683 - protein, 1241 aa, Artificial Sequence
  SARS-CoV-2/USA/NY-NYUMC7/2020__EPI_ISL_418192 spike protein (1-1211) Foldon construct
MFVFLVLLPLVSSQCVNLTTRTQLPPAYTNSFTRGVYYPDKVFRSSVLHSTQDLFLPFFSNVTWFHAIHVSGTNGTKRFDNPVLPFNDGVYFASTEKSNIIRGWIFGTTLDSKTQSLLIVNNATNVVIKVCEFQFCNDPFLGVYHHKNNKSWMESEFRVYSSANNCTFEYVSQPFLMDLEGKQGNFKNLREFVFKNIDGYFKIYSKHTPINLVRDLPQGFSALEPLVDLPIGINITRFQTLLALHRSYLTPGDSSSGWTAGAAAYYVGYLQPRTFLLKYNENGTITDAVDCALDPLSETKCTLKSFTVEKGIYQTSNFRVQPTESIVRFPNITNLCPFGEVFNATRFASVYAWNRKRISNCVADYSVLYNSASFSTFKCYGVSPTKLNDLCFTNVYADSFVIRGDEVRQIAPGQTGKIADYNYKLPDDFTGCVIAWNSNNLDSKVGGNYNYLYRLFRKSNLKPFERDISTEIYQAGSTPCNGVEGFNCYFPLQSYGFQPTNGVGYQPYRVVVLSFELLHAPATVCGPKKSTNLVKNKCVNFNFNGLTGTGVLTESNKKFLPFQQFGRDIADTTDAVRDPQTLEILDITPCSFGGVSVITPGTNTSNQVAVLYQGVNCTEVPVAIHADQLTPTWRVYSTGSNVFQTRAGCLIGAEHVNNSYECDIPIGAGICASYQTQTNSPRRARSVASQSIIAYTMSLGAENSVAYSNNSIAIPTNFTISVTTEILPVSMTKTSVDCTMYICGDSTECSNLLLQYGSFCTQLNRALTGIAVEQDKNTQEVFAQVKQIYKTPPIKDFGGFNFSQILPDPSKPSKRSFIEDLLFNKVTLADAGFIKQYGDCLGDIAARDLICAQKFNGLTVLPPLLTDEMIAQYTSALLAGTITSGWTFGAGAALQIPFAMQMAYRFNGIGVTQNVLYENQKLIANQFNSAIGKIQDSLSSTASALGKLQDVVNQNAQALNTLVKQLSSNFGAISSVLNDILSRLDKVEAEVQIDRLITGRLQSLQTYVTQQLIRAAEIRASANLAATKMSECVLGQSKRVDFCGKGYHLMSFPQSAPHGVVFLHVTYVPAQEKNFTTAPAICHDGKAHFPREGVFVSNGTHWFVTQRNFYEPQIITTDNTFVSGNCDVVIGIVNNTVYDPLQPELDSFKEELDKYFKNHTSPDVDLGDISGINASVVNIQKEIDRLNEVAKNLNESLIDLQELGKYEQYIKGGSGYIPEAPRDGQAYVRKDGEWVLLSTFL

SEQ ID NO: 5684 - protein, 1241 aa, Artificial Sequence
  SARS-CoV-2/Iceland/189/2020__EPI_ISL_417709 spike protein (1-1211) Foldon construct
MFVFLVLLPLVSSQCVNLTTRTQLPPAYTNSFTRGVYYPDKVFRSSVLHSTQDLFLPFFSNVTWFHAIHVSGTNGTKRFDNPVLPFNDGVYFASTEKSNIIRGWIFGTTLDSKTQSLLIVNNATNVVIKVCEFQFCNDPFLGVYYHKNNKSWMESEFRVYSSANNCTFEYVSQPFLMDLEGKQGNFKNLREFVFKNIDGYFKIYSKHTPINLVRDLPQGFSALEPLVDLPIGINITRFQTLLALHRSYLTPGDSSSGWTAGAAAYYVGYLQPRTFLLKYNENGTITDAVDCALDPLSETKCTLKSFTVEKGIYQTSNFRVQPTESIVRFPNITNLCPFGEVFNATRFASVYAWNRKRISNCVADYSVLYNSASFSTFKCYGVSPTKLNDLCFTNVYADSFVIRGDEVRQIAPGQTGKIADYNYKLPDDFTGCVIAWNSNNLDSKVGGNYNYLYRLFRKSNLKPFERDISTEIYQAGSTPCNGVEGFNCYFPLQSYGFQPTNGVGYQPYRVVVLSFELLHAPATVCGPKKSTNLVKNKCVNFNFNGLTGTGVLTESNKKFLPFQQFGRDIADTTDAVRDPQTLEILDITPCSFGGVSVITPGTNTSNQVAVLYQGVNCTEVPVAIHADQLTPTWRVYSTGSNVFQTRAGCLIGAEHVNNSYECDIPIGAGICASYQTQTNSPRRARSVASQSIIAYTMSLGAENSVAYSNNSIAIPTNFTISVTTEILPVSMTKTSVDCTMYICGDSTECSNLLLQYGSFCTQLNRALTGIAVEQDKNTQEVFAQVKQIYKTPPIKDFGGFNFSQILPDPSKPSKRSFIEDLLFNKVTLADAGFTKQYGDCLGDIAARDLICAQKFNGLTVLPPLLTDEMIAQYTSALLAGTITSGWTFGAGAALQIPFAMQMAYRFNGIGVTQNVLYENQKLIANQFNSAIGKIQDSLSSTASALGKLQDVVNQNAQALNTLVKQLSSNFGAISSVLNDILSRLDKVEAEVQIDRLITGRLQSLQTYVTQQLIRAAEIRASANLAATKMSECVLGQSKRVDFCGKGYHLMSFPQSAPHGVVFLHVTYVPAQEKNFTTAPAICHDGKAHFPREGVFVSNGTHWFVTQRNFYEPQIITTDNTFVSGNCDVVIGIVNNTVYDPLQPELDSFKEELDKYFKNHTSPDVDLGDISGINASVVNIQKEIDRLNEVAKNLNESLIDLQELGKYEQYIKGGSGYIPEAPRDGQAYVRKDGEWVLLSTFL

SEQ ID NO: 5685 - protein, 1241 aa, Artificial Sequence
  SARS-CoV-2/Australia/NSW56/2020__EPI_ISL_417408 spike protein (1-1211) Foldon construct
MFVFLVLLPLVSSQCVNLTTRTQLPPAYTNSFTRGVYYPDKVFRSSVLHSTQDLFLPFFSNVTWFHAIHVSGTNGTKRFDNPVLPFNDGVYFASTEKSNIIRGWIFGTTLDSKTQSLLIVNNATNVVIKVCEFQFCNDPFLGVYYHKNNKSWMESEFRVYSSANNCTFEYVSQPFLMDLEGKQGNFKNLREFVFKNIDGYFKIYSKHTPINLVRDLPQGFSALEPLVDLPIGINITRFQTLLALHRSYLTPGDSSSGWTAGAAAYYVGYLQPRTFLLKYNENGTITDAVDCALDPLSETKCTLKSFTVEKGIYQTSNFRVQPTESIVRFPNITNLCPFGEVFNATRFASVYAWNRKRISNCVADYSVLYNSASFSTFKCYGVSPTKLNDLCFTNVYADSFVIRGDEVRQIAPGQTGKIADYNYKLPDDFTGCVIAWNSNNLDSKVGGNYNYLYRLFRKSNLKPFERDISTEIYQAGSTPCNGVEGFNCYFPLQSYGFQPTNGVGYQPYRVVVLSFELLHAPATVCGPKKSTNLVKNKCVNFNFNGLTGTGVLTESNKKFLPFQQFGRDIADTTDAVRDPQTLEILDITPCSFGGVSVITPGTNTSNQVAVLYQDVNCTEVPVAIHADQLTPTWRVYSTGSNVFQTRAGCLIGAEHVNNSYECDIPIGAGICASYQTQTNSPRRARSVASQSIIAYTMSLGAENSVAYSNNSIAIPTNFTISVTTEILPVSMTKTSVDCTMYICGDSTECSNLLLQYGSFCTQLNRALTGIAVEQDKNTQEVFAQVKQIYKTPPIKDFGGFNFSQILPDSSKPSKRSFIEDLLFNKVTLADAGFIKQYGDCLGDIAARDLICAQKFNGLTVLPPLLTDEMIAQYTSALLAGTITSGWTFGAGAALQIPFAMQMAYRFNGIGVTQNVLYENQKLIANQFNSAIGKIQDSLSSTASALGKLQDVVNQNAQALNTLVKQLSSNFGAISSVLNDILSRLDKVEAEVQIDRLITGRLQSLQTYVTQQLIRAAEIRASANLAATKMSECVLGQSKRVDFCGKGYHLMSFPQSAPHGVVFLHVTYVPAQEKNFTTAPAICHDGKAHFPREGVFVSNGTHWFVTQRNFYEPQIITTDNTFVSGNCDVVIGIVNNTVYDPLQPELDSFKEELDKYFKNHTSPDVDLGDISGINASVVNIQKEIDRLNEVAKNLNESLIDLQELGKYEQYIKGGSGYIPEAPRDGQAYVRKDGEWVLLSTFL

SEQ ID NO: 5686 - protein, 1241 aa, Artificial Sequence
  SARS-CoV-2/Iceland/280/2020__EPI_ISL_417608 spike protein (1-1211) Foldon construct
MFVFLVLLPLVSSQCVNLTTRTQLPPAYTNSFTRGVYYPDKVFRSSVLHSTQDLFLPFFSNVTWFHAIHVSGTNGTKRFDNPVLPFNDGVYFASTEKSNIIRGWIFGTTLDSKTQSLLIVNNATNVVIKVCEFQFCNDPFLGVYYHKNNKSWMESEFRVYSSANNCTFEYVSQPFLMDLEGKQGNFKNLREFVFKNIDGYFKIYSKHTPINLVRDLPQGFSALEPLVDLPIGINITRFQTLLALHRSYLTPGDSSSGWTAGAAAYYVGYLQPRTFLLKYNENGTITDAVDCALDPLSETKCTLKSFTVEKGIYQTSNFRVQPTESIVRFPNITNLCPFGEVFNATRFASVYAWNRKRISNCVADYSVLYNSASFSTFKCYGVSPTKLNDLCFTNVYADSFVIRGDEVRQIAPGQTGKIADYNYKLPDDFTGCVIAWNSNNLDSKVGGNYNYLYRLFRKSNLKPFERDISTEIYQAGSTPCNGVEGFNCYFPLQSYGFQPTNGVGYQPYRVVVLSFELLHAPATVCGPKKSTNLVKNKCVNFNFNGLTGTGVLTESNKKFLPFQQFGRDIADTTDAVRDPQTLEILDITPCSFGGVSVITPGTNTSNQVAVLYQGVNCTEVPVAIHADQLTPTWRVYSTGSNVFQTRAGCLIGAEHVNNSYECDIPIGAGICASYHTQTNSPRRARSVASQSIIAYTMSLGAENSVAYSNNSIAIPTNFTISVTTEILPVSMTKTSVDCTMYICGDSTECSNLLLQYGSFCTQLNRALTGIAVEQDKNTQEVFAQVKQIYKTPPIKDFGGFNFSQILPDPSKPSKRSFIEDLLFNKVTLADAGFIKQYGDCLGDIAARDLICAQKFNGLTVLPPLLTDEMIAQYTSALLAGTITSGWTFGAGAALQIPFAMQMAYRFNGIGVTQNVLYENQKLIANQFNSAIGKIQDSLSSTASALGKLQDVVNQNAQALNTLVKQLSSNFGAISSVLNDILSRLDKVEAEVQIDRLITGRLQSLQTYVTQQLIRAAEIRASANLAATKMSECVLGQSKRVDFCGKGYHLMSFPQSAPHGVVFLHVTYVPAQEKNFTTAPAICHDGKAHFPREGVFVSNGTHWFVTQRNFYEPQIITTDNTFVSGNCDVVIGIVNNTVYDPLQPELDSFKEELDKYFKNHTSPDVDLGDISGINASVVNIQKEIDRLNEVAKNLNESLIDLQELGKYEQYIKGGSGYIPEAPRDGQAYVRKDGEWVLLSTFL

SEQ ID NO: 5687 - protein, 1241 aa, Artificial Sequence; identical to SEQ ID NO: 84
  SARS-CoV-2/Iceland/247/2020__EPI_ISL_417575 spike protein (1-1211) Foldon construct

SEQ ID NO: 5688 - protein, 1241 aa, Artificial Sequence
  SARS-CoV-2/Iceland/238/2020__EPI_ISL_417566 spike protein (1-1211) Foldon construct
MFVFLVLLPLVSSQCVNLTTRTQLPPAYTNSFTRGVYYPDKVFRSSVLHSTQDLFLPFFSNVTWFHAIHVSGTNGTKRFDNPVLPFNDGVYFASTEKSNIIRGWIFGTTLDSKTQSLLIVNNATNVVIKVCEFQFCNDPFLGVYYHKNNKSWMESEFRVYSSANNCTFEYVSQPFLMDLEGKQGNFKNLREFVFKNIDGYFKIYSKHTPINLVRDLPQGFSALEPLVDLPIGINITRFQTLLALHRSYLTPGDSSSGWTAGAAAYYVGYLQPRTFLLKYNENGTITDAVDCALDPLSETKCTLKSFTVEKGIYQTSNFRVQPTESIVRFPNITNLCPFGEVFNATRFASVYAWNRKRISNCVADYSVLYNSASFSTFKCYGVSPTKLNDLCFTNVYADSFVIRGDEVRQIAPGQTGKIADYNYKLPDDFTGCVIAWNSNNLDSKVGGNYNYLYRLFRKSNLKPFERDISTEIYQAGSTPCNGVEGFNCYFPLQSYGFQPTNGVGYQPYRVVVLSFELLHAPATVCGPKKSTNLVKNKCVNFNFNGLTGTGVLTESNKKFLPFQQFGRDIADTTDAVRDPQTLEILDITPCSFGGVSVITPGTNTSNQVAVLYQGVNCTEVPVAIHADQLTPTWRVYSTGSNVFQTRAGCLIGAEHVNNSYECDIPIGAGICASYQTQTNSPRRARSVASQSIIAYTMSLGAENSVAYSNNSIAIPTNFTISVTTEILPVSMTKTSVDCTMYICGDSTECSNLLLQYGSFCTQLNRALTGIAVEQDKNTQEVFAQVKQIYKTPPIKDFGGFNFSQILPDPSKPSKRSFIEDLLFNKVTLADVGFIKQYGDCLGDIAARDLICAQKFNGLTVLPPLLTDEMIAQYTSALLAGTITSGWTFGAGAALQIPFAMQMAYRFNGIGVTQNVLYENQKLIANQFNSAIGKIQDSLSSTASALGKLQDVVNQNAQALNTLVKQLSSNFGAISSVLNDILSRLDKVEAEVQIDRLITGRLQSLQTYVTQQLIRAAEIRASANLAATKMSECVLGQSKRVDFCGKGYHLMSFPQSAPHGVVFLHVTYVPAQEKNFTTAPAICHDGKAHFPREGVFVSNGTHWFVTQRNFYEPQIITTDNTFVSGNCDVVIGIVNNTVYDPLQPELDSFKEELDKYFKNHTSPDVDLGDISGINASVVNIQKEIDRLNEVAKNLNESLIDLQELGKYEQYIKGGSGYIPEAPRDGQAYVRKDGEWVLLSTFL

SEQ ID NO: 5689 - protein, 1241 aa, Artificial Sequence
  SARS-CoV-2/Greece/16/2020__EPI_ISL_418265 spike protein (1-1211) Foldon construct
MFVFLVLLPLVSSQCVNLTTRTQLPPAYTNSFTRGVYYPDKVFRSSVLHSTQDLFLPFFSNVTWFHAIHVSGTNGTKRFDNPVLPFNDGVYFASTEKSNIIRGWIFGTTLDSKTQSLLIVNNATNVVIKVCEFQFCNDPFLGVYYHKNNKSWMESEFRVYSSANNCTFEYVSQPFLMDLEGKQGNFKNLREFVFKNVDGYFKIYSKHTPINLVRDLPQGFSALEPLVDLPIGINITRFQTLLALHRSYLTPGDSSSGWTAGAAAYYVGYLQPRTFLLKYNENGTITDAVDCALDPLSETKCTLKSFTVEKGIYQTSNFRVQPTESIVRFPNITNLCPFGEVFNATRFASVYAWNRKRISNCVADYSVLYNSASFSTFKCYGVSPTKLNDLCFTNVYADSFVIRGDEVRQIAPGQTGKIADYNYKLPDDFTGCVIAWNSNNLDSKVGGNYNYLYRLFRKSNLKPFERDISTEIYQAGSTPCNGVEGFNCYFPLQSYGFQPTNGVGYQPYRVVVLSFELLHAPATVCGPKKSTNLVKNKCVNFNFNGLTGTGVLTESNKKFLPFQQFGRDIADTTDAVRDPQTLEILDITPCSFGGVSVITPGTNTSNQVAVLYQDVNCTEVPVAIHADQLTPTWRVYSTGSNVFQTRAGCLIGAEHVNNSYECDIPIGAGICASYQTQTNSPRRARSVASQSIIAYTMSLGAENSVAYSNNSIAIPTNFTISVTTEILPVSMTKTSVDCTMYICGDSTECSNLLLQYGSFCTQLNRALTGIAVEQDKNTQEVFAQVKQIYKTPPIKDFGGFNFSQILPDPSKPSKRSFIEDLLFNKVTLADAGFIKQYGDCLGDIAARDLICAQKFNGLTVLPPLLTDEMIAQYTSALLAGTITSGWTFGAGAALQIPFAMQMAYRFNGIGVTQNVLYENQKLIANQFNSAIGKIQDSLSSTASALGKLQDVVNQNAQALNTLVKQLSSNFGAISSVLNDILSRLDKVEAEVQIDRLITGRLQSLQTYVTQQLIRAAEIRASANLAATKMSECVLGQSKRVDFCGKGYHLMSFPQSAPHGVVFLHVTYVPAQEKNFTTAPAICHDGKAHFPREGVFVSNGTHWFVTQRNFYEPQIITTDNTFVSGNCDVVIGIVNNTVYDPLQPELDSFKEELDKYFKNHTSPDVDLGDISGINASVVNIQKEIDRLNEVAKNLNESLIDLQELGKYEQYIKGGSGYIPEAPRDGQAYVRKDGEWVLLSTFL

SEQ ID NO: 5690 - protein, 1241 aa, Artificial Sequence
  SARS-CoV-2/Iceland/319/2020__EPI_ISL_417648 spike protein (1-1211) Foldon construct
MFVFLVLLPLVSSQCVNLTTRTQLPPAYTNSFTRGVYYPDKVFRSSVLHSTQDLFLPFFSNVTWFHAIHVSGTNGTKRFDNPVLPFNDGVYFASTEKSNIIRGWIFGTTLDSKTQSLLIVNNATNVVIKVCEFQFCNDPFLGVYYHKNNKSWMESEFRVYSSANNCTFEYVSQPFLIDLEGKQGNFKNLREFVFKNIDGYFKIYSKHTPINLVRDLPQGFSALEPLVDLPIGINITRFQTLLALHRSYLTPGDSSSGWTAGAAAYYVGYLQPRTFLLKYNENGTITDAVDCALDPLSETKCTLKSFTVEKGIYQTSNFRVQPTESIVRFPNITNLCPFGEVFNATRFASVYAWNRKRISNCVADYSVLYNSASFSTFKCYGVSPTKLNDLCFTNVYADSFVIRGDEVRQIAPGQTGKIADYNYKLPDDFTGCVIAWNSNNLDSKVGGNYNYLYRLFRKSNLKPFERDISTEIYQAGSTPCNGVEGFNCYFPLQSYGFQPTNGVGYQPYRVVVLSFELLHAPATVCGPKKSTNLVKNKCVNFNFNGLTGTGVLTESNKKFLPFQQFGRDIADTTDAVRDPQTLEILDITPCSFGGVSVITPGTNTSNQVAVLYQGVNCTEVPVAIHADQLTPTWRVYSTGSNVFQTRAGCLIGAEHVNNSYECDIPIGAGICASYQTQTNSPRRARSVASQSIIAYTMSLGAENSVAYSNNSIAIPTNFTISVTTEILPVSMTKTSVDCTMYICGDSTECSNLLLQYGSFCTQLNRALTGIAVEQDKNTQEVFAQVKQIYKTPPIKDFGGFNFSQILPDPSKPSKRSFIEDLLFNKVTLADAGFIKQYGDCLGDIAARDLICAQKFNGLTVLPPLLTDEMIAQYTSALLAGTITSGWTFGAGAALQIPFAMQMAYRFNGIGVTQNVLYENQKLIANQFNSAIGKIQDSLSSTASALGKLQDVVNQNAQALNTLVKQLSSNFGAISSVLNDILSRLDKVEAEVQIDRLITGRLQSLQTYVTQQLIRAAEIRASANLAATKMSECVLGQSKRVDFCGKGYHLMSFPQSAPHGVVFLHVTYVPAQEKNFTTAPAICHDGKAHFPREGVFVSNGTHWFVTQRNFYEPQIITTDNTFVSGNCDVVIGIVNNTVYDPLQPELDSFKEELDKYFKNHTSPDVDLGDISGINASVVNIQKEIDRLNEVAKNLNESLIDLQELGKYEQYIKGGSGYIPEAPRDGQAYVRKDGEWVLLSTFL

SEQ ID NO: 5691 - protein, 1241 aa, Artificial Sequence
  SARS-CoV-2/Congo/94/2020__EPI_ISL_417947 spike protein (1-1211) Foldon construct
MFVFLVLLPLVSSQCVNLTTRTQLPPAYTNSFTRGVYYPDKVFRSSVLHSTQDLFLPFFSNVTWFHAIHVSGTNGTKRFDNPVLPFNDGVYFASTEKSNIIRGWIFGTTLDSKTQSLLIVNNATNVVIKVCEFQFCNDPFLGVYYHKNNKSWMESEFRVYSSANNCTFEYVSQPFLMDLEGKQGNFKNLREFVFKNIDGYFKIYSKHTPINLVRDLPQGFSALEPLVDLPIGINITRFQTLLALHRSYLTPGDSSSGWTAGAAAYYVGYLQPRTFLLKYNENGTITDAVDCALDPLSETKCTLKSFTVEKGIYQTSNFRVQPTESIVRFPNITNLCPFGEVFNATRFASVYAWNRKRISNCVADYSVLYNSASFSTFKCYGVSPTKLNDLCFTNVYADSFVIRGDEVRQIAPGQTGKIADYNYKLPDDFTGCVIAWNSNNLDSKVGGNYNYLYRLFRKSNLKPFERDISTEIYQAGSTPCNGVEGFNCYFPLQSYGFQPTNGVGYQPYRVVVLSFELLHAPATVCGPKKSTNLVKNKCVNFNFNGLTGTGVLTESNKKFLPFQQFGRDIADTTDAVRDPQTLEILDITPCSFGGVSVITPGTNTSNQVAVLYQGVNCTEVPVAIHADQLTPTWRVYSTGSNVFQTRAGCLIGAEHVNNSYECDIPIGAGICASYQTQTNSPRRARSVASQSIIAYTMSLGAENSVAYSNNSIAIPTNFTISVTTEILPVSMTKTSVDCTMYICGDSTECSNLLLQYGSFCTQLNRALTGIAVEQDKNTQEVFAQVKQIYKTPPIKDFGGFNFSQILPDPSKPSKRSFIEDILFNKVTLADAGFIKQYGDCLGDIAARDLICAQKFNGLTVLPPLLTDEMIAQYTSALLAGTITSGWTFGAGAALQIPFAMQMAYRFNGIGVTQNVLYENQKLIANQFNSAIGKIQDSLSSTASALGKLQDVVNQNAQALNTLVKQLSSNFGAISSVLNDILSRLDKVEAEVQIDRLITGRLQSLQTYVTQQLIRAAEIRASANLAATKMSECVLGQSKRVDFCGKGYHLMSFPQSAPHGVVFLHVTYVPAQEKNFTTAPAICHDGKAHFPREGVFVSNGTHWFVTQRNFYEPQIITTDNTFVSGNCDVVIGIVNNTVYDPLQPELDSFKEELDKYFKNHTSPDVDLGDISGINASVVNIQKEIDRLNEVAKNLNESLIDLQELGKYEQYIKGGSGYIPEAPRDGQAYVRKDGEWVLLSTFL

SEQ ID NO: 5692 - protein, 1241 aa, Artificial Sequence
  SARS-CoV-2/Congo/158/2020__EPI_ISL_417950 spike protein (1-1211) Foldon construct
MFVFLVLLPLVSSQCVNLTTRTQLPPAYTNSFTRGVYYPDKVFRSSVLHSTQDLFLPFFSNVTWFHAIHVSGTNGTKRFDNPVLPFNDGVYFASTEKSNIIRGWIFGTTLDSKTQSLLIVNNATNVVIKVCEFQFCNDPFLGVYYHKNNKSWMESEFRVYSSANNCTFEYVSQPFLMDLEGKQGNFKNLREFVFKNIDGYFKIYSKHTPINLVRDLPQGFSALEPLVDLPIGINITRFQTLLALHRSYLTPGDSSSGWTAGAAAYYVGYLQPRTFLLKYNENGTITDAVDCALDPLSETKCTLKSFTVEKGIYQTSNFRVQPTESIVRFPNITNLCPFGEVFNATRFASVYAWNRKRISNCVADYSVLYNSASFSTFKCYGVSPTKLNDLCFTNVYADSFVIRGDEVRQIAPGQTGKIADYNYKLPDDFTGCVIAWNSNNLDSKVGGNYNYLYRLFRKSNLKPFERDISTEIYQAGSTPCNGVEGFNCYFPLQSYGFQPTNGVGYQPYRVVVLSFELLHAPATVCGPKKSTNLVKNKCVNFNFNGLTGTGVLTESNKKFLPFQQFGRDIADTTDAVRDPQTLEILDITPCSFGGVSVITPGTNTSNQVAVLYQDVNCTEVPVAIHADQLTPTWRVYSTGSNVFQTRAGCLIGAEHVNNSYECDIPIGAGICASYQTQTNSPRRARSVASQSIIAYTMSLGAENSVAYSNNSIAIPTNFTISVTTEILPVSMTKTSVDCTMYICGDSTECSNLLLQYGSFCTQLNRALTGIAVEQDKNTQEVFAQVKQIYKTPPIKDFGGFNFSQILPDPSKPSKRSFIEDLLFNKVTLADAGFIKQYGDCLGDIAARDLICAQKFNGLTVLPPLLTDEMIAQYTSALLAGTITSGWTFGAGAALQIPFAMQMAYRFNGIGVTQNVLYENQKLIANQFNSAIGKIQDSLSSTASALGKLQDVVNQNAQALNTLVKQLSSNFGAISSVLNDILSRLDKVEAEVQIDRLITGRLQSLQTYVTQQLIRAAEIRASANLAATKMSECVLGQSKRVDFCGKGYHLMSFPQSAPHGVVFLHVTYVPAQEKNFTTAPAICHDGKAHFPREGVFVSNGTHWFVTQRNFYEPQIITTDNTFLSGNCDVVIGIVNNTVYDPLQPELDSFKEELDKYFKNHTSPDVDLGDISGINASVVNIQKEIDRLNEVAKNLNESLIDLQELGKYEQYIKGGSGYIPEAPRDGQAYVRKDGEWVLLSTFL

SEQ ID NO: 5693 - protein, 1241 aa, Artificial Sequence
  SARS-CoV-2/USA/UT-00034/2020__EPI_ISL_417977 spike protein (1-1211) Foldon construct
MFVFLVLLPLVSSQCVNLTTRTQLPPAYTNSFTRGVYYPDKVFRSSVLHSTQDLFLPFFSNVTWFHAIHVSGTNGTKRFDNPVLPFNDGVYFASTEKSNIIRGWIFGTTLDSKTQSLLIVNNATNVVIKVCEFQFCNDPFLGVYYYKNNKSWMESEFRVYSSANNCTFEYVSQPFLMDLEGKQGNFKNLREFVFKNIDGYFKIYSKHTPINLVRDLPQGFSALEPLVDLPIGINITRFQTLLALHRSYLTPGDSSSGWTAGAAAYYVGYLQPRTFLLKYNENGTITDAVDCALDPLSETKCTLKSFTVEKGIYQTSNFRVQPTESIVRFPNITNLCPFGEVFNATRFASVYAWNRKRISNCVADYSVLYNSASFSTFKCYGVSPTKLNDLCFTNVYADSFVIRGDEVRQIAPGQTGKIADYNYKLPDDFTGCVIAWNSNNLDSKVGGNYNYLYRLFRKSNLKPFERDISTEIYQAGSTPCNGVEGFNCYFPLQSYGFQPTNGVGYQPYRVVVLSFELLHAPATVCGPKKSTNLVKNKCVNFNFNGLTGTGVLTESNKKFLPFQQFGRDIADTTDAVRDPQTLEILDITPCSFGGVSVITPGTNTSNQVAVLYQGVNCTEVPVAIHADQLTPTWRVYSTGSNVFQTRAGCLIGAEHVNNSYECDIPIGAGICASYQTQTNSPRRARSVASQSIIAYTMSLGAENSVAYSNNSIAIPTNFTISVTTEILPVSMTKTSVDCTMYICGDSTECSNLLLQYGSFCTQLNRALTGIAVEQDKNTQEVFAQVKQIYKTPPIKDFGGFNFSQILPDPSKPSKRSFIEDLLFNKVTLADAGFIKQYGDCLGDIAARDLICAQKFNGLTVLPPLLTDEMIAQYTSALLAGTITSGWTFGAGAALQIPFAMQMAYRFNGIGVTQNVLYENQKLIANQFNSAIGKIQDSLSSTASALGKLQDVVNQNAQALNTLVKQLSSNFGAISSVLNDILSRLDKVEAEVQIDRLITGRLQSLQTYVTQQLIRAAEIRASANLAATKMSECVLGQSKRVDFCGKGYHLMSFPQSAPHGVVFLHVTYVPAQEKNFTTAPAICHDGKAHFPREGVFVSNGTHWFVTQRNFYEPQIITTDNTFVSGNCDVVIGIVNNTVYDPLQPELDSFKEELDKYFKNHTSPDVDLGDISGINASVVNIQKEIDRLNEVAKNLNESLIDLQELGKYEQYIKGGSGYIPEAPRDGQAYVRKDGEWVLLSTFL

SEQ ID NO: 5694 - protein, 1241 aa, Artificial Sequence
  SARS-CoV-2/USA/UT-00033/2020__EPI_ISL_417976 spike protein (1-1211) Foldon construct
MFVFLVLLPLVSSQCVNLTTRTQLPPAYTNSFTRGVYYPDKVFRSSVLHSTQDLFLPFFSNVTWFHAIHVSGTNGTKRFDNPVLPFNDGVYFASTEKSNIIRGWIFGTTLDSKTQSLLIVNNATNVVIKVCEFQFCNDPFLGVYYHKNNKSWMESEFRVYSSANNCTFEYVSQPFLMDLEGKQGNFKNLREFVFKNIDGYFKIYSKHTPINLVRDLPQGFSALEPLVDLPIGINITRFQTLLALHRSYLTPGDSSSGLTAGAAAYYVGYLQPRTFLLKYNENGTITDAVDCALDPLSETKCTLKSFTVEKGIYQTSNFRVQPTESIVRFPNITNLCPFGEVFNATRFASVYAWNRKRISNCVADYSVLYNSASFSTFKCYGVSPTKLNDLCFTNVYADSFVIRGDEVRQIAPGQTGKIADYNYKLPDDFTGCVIAWNSNNLDSKVGGNYNYLYRLFRKSNLKPFERDISTEIYQAGSTPCNGVEGFNCYFPLQSYGFQPTNGVGYQPYRVVVLSFELLHAPATVCGPKKSTNLVKNKCVNFNFNGLTGTGVLTESNKKFLPFQQFGRDIADTTDAVRDPQTLEILDITPCSFGGVSVITPGTNTSNQVAVLYQGVNCTEVPVAIHADQLTPTWRVYSTGSNVFQTRAGCLIGAEHVNNSYECDIPIGAGICASYQTQTNSPRRARSVASQSIIAYTMSLGAENSVAYSNNSIAIPTNFTISVTTEILPVSMTKTSVDCTMYICGDSTECSNLLLQYGSFCTQLNRALTGIAVEQDKNTQEVFAQVKQIYKTPPIKDFGGFNFSQILPDPSKPSKRSFIEDLLFNKVTLADAGFIKQYGDCLGDIAARDLICAQKFNGLTVLPPLLTDEMIAQYTSALLAGTITSGWTFGAGAALQIPFAMQMAYRFNGIGVTQNVLYENQKLIANQFNSAIGKIQDSLSSTASALGKLQDVVNQNAQALNTLVKQLSSNFGAISSVLNDILSRLDKVEAEVQIDRLITGRLQSLQTYVTQQLIRAAEIRASANLAATKMSECVLGQSKRVDFCGKGYHLMSFPQSAPHGVVFLHVTYVPAQEKNFTTAPAICHDGKAHFPREGVFVSNGTHWFVTQRNFYEPQIITTDNTFVSGNCDVVIGIVNNTVYDPLQPELDSFKEELDKYFKNHTSPDVDLGDISGINASVVNIQKEIDRLNEVAKNLNESLIDLQELGKYEQYIKGGSGYIPEAPRDGQAYVRKDGEWVLLSTFL

SEQ ID NO: 5695 - protein, 1241 aa, Artificial Sequence
  SARS-CoV-2/USA/WI-13/2020__EPI_ISL_417516 spike protein (1-1211) Foldon construct
MFVFLVLLPLVSSQCVNLTTRTQLPPAYTNSFTRGVYYPDKVFRSSVLHSTQDLFLPFFSNVTWFHAIHVSGTNGTKRFDNPVLPFNDGVYFASTEKSNIIRGWIFGTTLDSKTQSLLIVNNATNVVIKVCEFQFCNDPFLGVYYHKNNKSWMESEFRVYSSANNCTFEYVSQPFLMDLEGKQGNFKNLREFVFKNIDGYFKIYSKHTPINLVRDLPQGFSALEPLVDLPIGINITRFQTLLALHRSYLTPGDSSSGWTAGAAAYYVGYLQPRTFLLKYNENGTITDAVDCALDPLSETKCTLKSFTVEKGIYQTSNFRVLPTESIVRFPNITNLCPFGEVFNATRFASVYAWNRKRISNCVADYSVLYNSASFSTFKCYGVSPTKLNDLCFTNVYADSFVIRGDEVRQIAPGQTGKIADYNYKLPDDFTGCVIAWNSNNLDSKVGGNYNYLYRLFRKSNLKPFERDISTEIYQAGSTPCNGVEGFNCYFPLQSYGFQPTNGVGYQPYRVVVLSFELLHAPATVCGPKKSTNLVKNKCVNFNFNGLTGTGVLTESNKKFLPFQQFGRDIADTTDAVRDPQTLEILDITPCSFGGVSVITPGTNTSNQVAVLYQGVNCTEVPVAIHADQLTPTWRVYSTGSNVFQTRAGCLIGAEHVNNSYECDIPIGAGICASYQTQTNSPRRARSVASQSIIAYTMSLGAENSVAYSNNSIAIPTNFTISVTTEILPVSMTKTSVDCTMYICGDSTECSNLLLQYGSFCTQLNRALTGIAVEQDKNTQEVFAQVKQIYKTPPIKDFGGFNFSQILPDPSKPSKRSFIEDLLFNKVTLADAGFIKQYGDCLGDIAARDLICAQKFNGLTVLPPLLTDEMIAQYTSALLAGTITSGWTFGAGAALQIPFAMQMAYRFNGIGVTQNVLYENQKLIANQFNSAIGKIQDSLSSTASALGKLQDVVNQNAQALNTLVKQLSSNFGAISSVLNDILSRLDKVEAEVQIDRLITGRLQSLQTYVTQQLIRAAEIRASANLAATKMSECVLGQSKRVDFCGKGYHLMSFPQSAPHGVVFLHVTYVPAQEKNFTTAPAICHDGKAHFPREGVFVSNGTHWFVTQRNFYEPQIITTDNTFVSGNCDVVIGIVNNTVYDPLQPELDSFKEELDKYFKNHTSPDVDLGDISGINASVVNIQKEIDRLNEVAKNLNESLIDLQELGKYEQYIKGGSGYIPEAPRDGQAYVRKDGEWVLLSTFL

SEQ ID NO: 5696 - protein, 1240 aa, Artificial Sequence
  SARS-CoV-2/India/1-27/2020__EPI_ISL_413522 spike protein (1-1210) Foldon construct
MFVFLVLLPLVSSQCVNLTTRTQLPPAYTNSFTRGVYYPDKVFRSSVLHSTQDLFLPFFSNVTWFHAIHVSGTNGTKRFDNPVLPFNDGVYFASTEKSNIIRGWIFGTTLDSKTQSLLIVNNATNVVIKVCEFQFCNDPFLGVYHKNNKSWMESEFRVYSSANNCTFEYVSQPFLMDLEGKQGNFKNLREFVFKNIDGYFKIYSKHTPINLVRDLPQGFSALEPLVDLPIGINITRFQTLLALHRSYLTPGDSSSGWTAGAAAYYVGYLQPRTFLLKYNENGTITDAVDCALDPLSETKCTLKSFTVEKGIYQTSNFRVQPTESIVRFPNITNLCPFGEVFNATRFASVYAWNRKRISNCVADYSVLYNSASFSTFKCYGVSPTKLNDLCFTNVYADSFVIRGDEVIQIAPGQTGKIADYNYKLPDDFTGCVIAWNSNNLDSKVGGNYNYLYRLFRKSNLKPFERDISTEIYQAGSTPCNGVEGFNCYFPLQSYGFQPTNGVGYQPYRVVVLSFELLHAPATVCGPKKSTNLVKNKCVNFNFNGLTGTGVLTESNKKFLPFQQFGRDIADTTDAVRDPQTLEILDITPCSFGGVSVITPGTNTSNQVAVLYQDVNCTEVPVAIHADQLTPTWRVYSTGSNVFQTRAGCLIGAEHVNNSYECDIPIGAGICASYQTQTNSPRRARSVASQSIIAYTMSLGAENSVAYSNNSIAIPTNFTISVTTEILPVSMTKTSVDCTMYICGDSTECSNLLLQYGSFCTQLNRALTGIAVEQDKNTQEVFAQVKQIYKTPPIKDFGGFNFSQILPDPSKPSKRSFIEDLLFNKVTLADAGFIKQYGDCLGDIAARDLICAQKFNGLTVLPPLLTDEMIAQYTSALLAGTITSGWTFGAGAALQIPFAMQMAYRFNGIGVTQNVLYENQKLIANQFNSAIGKIQDSLSSTASALGKLQDVVNQNAQALNTLVKQLSSNFGAISSVLNDILSRLDKVEAEVQIDRLITGRLQSLQTYVTQQLIRAAEIRASANLAATKMSECVLGQSKRVDFCGKGYHLMSFPQSAPHGVVFLHVTYVPAQEKNFTTAPAICHDGKAHFPREGVFVSNGTHWFVTQRNFYEPQIITTDNTFVSGNCDVVIGIVNNTVYDPLQPELDSFKEELDKYFKNHTSPDVDLGDISGINASVVNIQKEIDRLNEVAKNLNESLIDLQELGKYEQYIKGGSGYIPEAPRDGQAYVRKDGEWVLLSTFL

SEQ ID NO: 5697 - protein, 1235 aa, Artificial Sequence
  SARS-CoV-2/pangolin/Guangxi/P4L/2017__EPI_ISL_410538 spike protein (1-1205) Foldon construct
MFVFLFVLPLVSSQCVNLTTRTGIPPGYTNSSTRGVYYPDKVFRSSILHLTQDLFLPFFSNVTWFNTINYQGGFKKFDNPVLPFNDGVYFASTEKSNIIRGWIFGTTLDARTQSLLIVNNATNVVIKVCEFQFCTDPFLGVYYHNNNKTWVENEFRVYSSANNCTFEYISQPFLMDLEGKQGNFKNLREFVFKNVDGYFKIYSKHTPIDLVRDLPRGFAALEPLVDLPIGINITRFQTLLALHRSYLTPGNLESGWTTGAAAYYVGYLQQRTFLLSYNQNGTITDAVDCSLDPLSETKCTLKSLTVEKGIYQTSNFRVQPTISIVRFPNITNLCPFGEVFNASKFASVYAWNRKRISNCVADYSVLYNSTSFSTFKCYGVSPTKLNDLCFTNVYADSFVVKGDEVRQIAPGQTGVIADYNYKLPDDFTGCVIAWNSVKQDALTGGNYGYLYRLFRKSKLKPFERDISTEIYQAGSTPCNGQVGLNCYYPLERYGFHPTTGVNYQPFRVVVLSFELLNGPATVCGPKLSTTLVKDKCVNFNFNGLTGTGVLTTSKKQFLPFQQFGRDISDTTDAVRDPQTLEILDITPCSFGGVSVITPGTNTSNQVAVLYQDVNCTEVPMAIHAEQLTPAWRVYSAGANVFQTRAGCLVGAEHVNNSYECDIPVGAGICASYHSMSSLRSVNQRSIIAYTMSLGAENSVAYSNNSIAIPTNFTISVTTEILPVSMTKTSVDCTMYICGDSIECSNLLLQYGSFCTQLNRALTGIAVEQDKNTQEVFAQVKQIYKTPPIKDFGGFNFSQILPDPSKPSKRSFIEDLLFNKVTLADAGFIKQYGDCLGDIAARDLICAQKFNGLTVLPPLLTDEMIAQYTSALLAGTITSGWTFGAGAALQIPFAMQMAYRFNGIGVTQNVLYENQKLIANQFNSAIGKIQDSLSSTASALGKLQDVVNQNAQALNTLVKQLSSNFGAISSVLNDILSRLDKVEAEVQIDRLITGRLQSLQTYVTQQLIRAAEIRASANLAATKMSECVLGQSKRVDFCGKGYHLMSFPQSAPHGVVFLHVTYVPAQEKNFTTAPAICHEGKAHFPREGVFVSNGTHWFITQRNFYEPQIITTDNTFVSGSCDVVIGIVNNTVYDPLQPELDSFKEELDKYFKNHTSPDVDLGDISGINASVVNIQKEIDRLNEVAKNLNESPIDLQELGKYEQYIKGGSGYIPEAPRDGQAYVRKDGEWVLLSTFL

SEQ ID NO: 5698 - protein, 1235 aa, Artificial Sequence
  SARS-CoV-2/pangolin/Guangxi/P5L/2017__EPI_ISL_410540 spike protein (1-1205) Foldon construct
MFVFLFVLPLVSSQCVNLTTRTGIPPGYTNSSTRGVYYPDKVFRSSILHLTQDLFLPFFSNVTWFNTINYQGGFKKFDNPVLPFNDGVYFASTEKSNIIRGWIFGTTLDARTQSLLIVNNATNVVIKVCEFQFCTDPFLGVYYHNNNKTWVENEFRVYSSANNCTFEYISQPFLMDLEGKQGNFKNLREFVFKNVDGYFKIYSKHTPIDLVRDLPRGFAALEPLVDLPIGINITRFQTLLALHRSYLTPGKLESGWTTGAAAYYVGYLQQRTFLLSYNQNGTITDAVDCSLDPLSETKCTLKSLTVEKGIYQTSNFRVQPTISIVRFPNITNLCPFGEVFNASKFASVYAWNRKRISNCVADYSVLYNSTSFSTFKCYGVSPTKLNDLCFTNVYADSFVVKGDEVRQIAPGQTGVIADYNYKLPDDFTGCVIAWNSVKQDALTGGNYGYLYRLFRKSKLKPFERDISTEIYQAGSTPCNGQVGLNCYYPLERYGFHPTTGVNYQPFRVVVLSFELLNGPATVCGPKLSTTLVKDKCVNFNFNGLTGTGVLTTSKKQFLPFQQFGRDISDTTDAVRDPQTLEILDITPCSFGGVSVITPGTNTSNQVAVLYQDVNCTEVPMAIHAEQLTPAWRVYSAGANVFQTRAGCLVGAEHVNNSYECDIPVGAGICASYHSMSSFRSVNQRSIIAYTMSLGAENSVAYSNNSIAIPTNFTISVTTEILPVSMTKTSVDCTMYICGDSIECSNLLLQYGSFCTQLNRALTGIAVEQDKNTQEVFAQVKQIYKTPPIKDFGGFNFSQILPDPSKPSKRSFIEDLLFNKVTLADAGFIKQYGDCLGDIAARDLICAQKFNGLTVLPPLLTDEMIAQYTSALLAGTITSGWTFGAGAALQIPFAMQMAYRFNGIGVTQNVLYENQKLIANQFNSAIGKIQDSLSSTASALGKLQDVVNQNAQALNTLVKQLSSNFGAISSVLNDILSRLDKVEAEVQIDRLITGRLQSLQTYVTQQLIRAAEIRASANLAATKMSECVLGQSKRVDFCGKGYHLMSFPQSAPHGVVFLHVTYVPAQEKNFTTAPAICHEGKAHFPREGVFVSNGTHWFITQRNFYEPQIITTDNTFVSGSCDVVIGIVNNTVYDPLQPELDSFKEELDKYFKNHTSPDVDLGDISGINASVVNIQKEIDRLNEVAKNLNESLIDLQELGKYEQYIKGGSGYIPEAPRDGQAYVRKDGEWVLLSTFL

SEQ ID NO: 5699 - protein, 1235 aa, Artificial Sequence
  SARS-CoV-2/pangolin/Guangxi/P5E/2017__EPI_ISL_410541 spike protein (1-1205) Foldon construct
MFVFLFVLPLVSSQCVNLTTRTGIPPGYTNSSTRGVYYPDKVFRSSILHLTQDLFLPFFSNVTWFNTITYQGGSKKFDNPVLPFNDGVYFASTEKSNIIRGWIFGTTLDARTQSLLIVNNATNVVIKVCEFQFCTDPFLGVYYHNNNKTWVENEFRVYSSANNCTFEYISQPFLMDLEGKQGNFKNLREFVFKNVDGYFKIYSKHTPIDLVRDLPRGFAALEPLVDLPIGINITRFQTLLALHRSYLTPGKLESGWTTGAAAYYVGYLQQRTFLLSYNQNGTITDAVDCSLDPLSETKCTLKSLTVEKGIYQTSNFRVQPTISIVRFPNITNLCPFGEVFNASKFASVYAWNRKRISNCVADYSVLYNSTSFSTFKCYGVSPTKLNDLCFTNVYADSFVVKGDEVRQIAPGQTGVIADYNYKLPDDFTGCVIAWNSVKQDALTGDNYGYLYRLFRKSKLKPFERDISTEIYQAGSTPCNGQVGLNCYYPLERYGFHPTTGVNYQPFRVVVLSFELLNGPATVCGPKLSTTLVKDKCVNFNFNGLTGTGVLTTSKKQFLPFQQFGRDISDTTDAVRDPQTLEILDITPCSFGGVSVITPGTNTSNQVAVLYQDVNCTEVPMAIHAEQLTPAWRVYSAGANVFQTRAGCLVGAEHVNNSYECDIPVGAGICASYHSMSSFRSVNQRSIIAYTMSLGAENSVAYSNNSIAIPTNFTISVTTEILPVSMTKTSVDCTMYICGDSIECSNLLLQYGSFCTQLNRALTGIAVEQDKNTQEVFAQVKQIYKTPPIKDFGGFNFSQILPDPSKPSKRSFIEDLLFNKVTLADAGFIKQYGDCLGDIAARDLICAQKFNGLTVLPPLLTDEMIAQYTSALLAGTITSGWTFGAGAALQIPFAMQMAYRFNGIGVTQNVLYENQKLIANQFNSAIGKIQDSLSSTASALGKLQDVVNQNAQALNTLVKQLSSNFGAISSVLNDILSRLDKVEAEVQIDRLITGRLQSLQTYVTQQLIRAAEIRASANLAATKMSECVLGQSKRVDFCGKGYHLMSFPQSAPHGVVFLHVTYVPAQEKNFTTAPAICHEGKAHFPREGVFVSNGTHWFITQRNFYEPQIITTDNTFVSGSCDVVIGIVNNTVYDPLQPELDSFKEELDKYFKNHTSPDVDLGDISGINASVVNIQKEIDRLNEVAKNLNESLIDLQELGKYEQYIKGGSGYIPEAPRDGQAYVRKDGEWVLLSTFL

SEQ ID NO: 5700 - protein, 1233 aa, Artificial Sequence
  SARS-CoV-2/pangolin/Guangxi/P1E/2017__EPI_ISL_410539 spike protein (1-1203) Foldon construct
MFVFLFVLPLVSSQCVNLTTRTGIQPGYTNSSTRGVYYPDKVFRSSILHLTQDLFLPFFSNVTWFNTINYQGGFKKFDNPVLPFNDGVYFASTEKSNIIRGWIFGTTLDARTQSLLIVNNATNVVIKVCEFQFCTDPFLGVYYHNNNKTWVENEFRVYSSANNCTFEYISQPFLMDLEGKQGNFKNLREFVFKNVDGYFKIYSKHTPIDLVRDLPRGFAALEPLVDLPIGINITRFQTLLALHRSYLTPGKLESGWTTGAAAYYVGYLQQRTFLLSYNQNGTITDAVDCSLDPLSETKCTLKSLTVEKGIYQTSNFRVQPTISIVRFPNITNLCPFGEVFNASKFASVYAWNRKRISNCVADYSVLYNSTSFSTFKCYGVSPTKLNDLCFTNVYADSFVVKGDEVRQIAPGQTGVIADYNYKLPDDFTGCVIAWNSVKQDALTGGNYLYRLFRKSKLKPFERDISTEIYQAGSTPCNGQVGLNCYYPLERYGFHPTTGVNYQPFRVVVLSFELLNGPATVCGPKLSTTLVKDKCVNFNFNGLTGTGVLTTSKKQFLPFQQFGRDISDTTDAVRDPQTLEILDITPCSFGGVSVITPGTNTSNQVAVLYQDVNCTEVPMAIHAEQLTPAWRVYSAGANVFQTRAGCLVGAEHVNNSYECDIPVGAGICASYHSMSSLRSVNQRSIIAYTMSLGAENSVAYSNNSIAIPTNFTISVTTEILPVSMTKTSVDCTMYICGDSIECSNLLLQYGSFCTQLNRALTGIAVEQDKNTQEVFAQVKQIYKTPPIKDFGGFNFSQILPDPSKPSKRSFIEDLLFNKVTLADAGFIKQYGDCLGDIAARDLICAQKFNGLTVLPPLLTDEMIAQYTSALLAGTITSGWTFGAGAALQIPFAMQMAYRFNGIGVTQNVLYENQKLIANQFNSAIGKIQDSLSSTASALGKLQDVVNQNAQALNTLVKQLSSNFGAISSVLNDILSRLDKVEAEVQIDRLITGRLQSLQTYVTQQLIRAAEIRASANLAATKMSECVLGQSKRVDFCGKGYHLMSFPQSAPHGVVFLHVTYVPAQEKNFTTAPAICHEGKAHFPREGVFVSNGTHWFITQRNFYEPQIITTDNTFVSGSCDVVIGIVNNTVYDPLQPELDSFKEELDKYFKNHTSPDVDLGDISGINASVVNIQKEIDRLNEVAKNLNESLIDLQELGKYEQYIKGGSGYIPEAPRDGQAYVRKDGEWVLLSTFL

SEQ ID NO: 5701 - protein, 1241 aa, Artificial Sequence; identical to SEQ ID NO: 103
  SARS-CoV-2/Wuhan/WIV05/2019__EPI_ISL_402128 spike protein (1-1211)(K986P_V987P) Foldon construct

SEQ ID NO: 5702 - protein, 1237 aa, Artificial Sequence; identical to SEQ ID NO: 104
  SARS-CoV-2/bat/Yunnan/RaTG13/2013__EPI_ISL_402131 spike protein (1-1207)(K982P_V983P) Foldon construct

SEQ ID NO: 5703 - protein, 1241 aa, Artificial Sequence; identical to SEQ ID NO: 105
  SARS-CoV-2/Wuhan/HBCDC-HB-01/2019__EPI_ISL_402132 spike protein (1-1211)(K986P_V987P) Foldon construct

SEQ ID NO: 5704 - protein, 1241 aa, Artificial Sequence; identical to SEQ ID NO: 106
  SARS-CoV-2/Guangdong/20SF028/2020__EPI_ISL_403936 spike protein (1-1211)(K986P_V987P) Foldon construct

SEQ ID NO: 5705 - protein, 1241 aa, Artificial Sequence; identical to SEQ ID NO: 107
  SARS-CoV-2/Shenzhen/SZTH-001/2020__EPI_ISL_406592 spike protein (1-1211)(K986P_V987P) Foldon construct

SEQ ID NO: 5706 - protein, 1241 aa, Artificial Sequence; identical to SEQ ID NO: 108
  SARS-CoV-2/Shenzhen/SZTH-004/2020__EPI_ISL_406595 spike protein (1-1211)(K986P_V987P) Foldon construct

SEQ ID NO: 5707 - protein, 1241 aa, Artificial Sequence; identical to SEQ ID NO: 109
  SARS-CoV-2/France/IDF0372/2020__EPI_ISL_406596 spike protein (1-1211)(K986P_V987P) Foldon construct

SEQ ID NO: 5708 - protein, 1241 aa, Artificial Sequence; identical to SEQ ID NO: 110
  SARS-CoV-2/Australia/VIC01/2020__EPI_ISL_406844 spike protein (1-1211)(K986P_V987P) Foldon construct

SEQ ID NO: 5709 - protein, 1241 aa, Artificial Sequence; identical to SEQ ID NO: 111
  SARS-CoV-2/Germany/BavPat1/2020__EPI_ISL_406862 spike protein (1-1211)(K986P_V987P) Foldon construct

SEQ ID NO: 5710 - protein, 1241 aa, Artificial Sequence
  SARS-CoV-2/Wuhan/HBCDC-HB-02/2020__EPI_ISL_412978 spike protein (1-1211)(K986P_V987P) Foldon construct
MFVFLVLLPLVSSQCVNLTTRTQLPPAYTNSFTRGVYYPDKVFRSSVLHSTQDLFLPFFSNVTWFHAIHVSGTNGTKRFDNPVLPFNDGVYFASTEKSNIIRGWIFGTTLDSKTQSLLIVNNATNVVIKVCEFQFCNDPFLGVYYHKNNKSWMESEFRVYSSANNCTFEYVSQPFLMDLEGKQGNFKNLREFVFKNIDGYFKIYSKHTPINLVRDLPQGFSALEPLVDLPIGINITRFQTLLALHRSYLTPGDSSSGWTAGAAAYYVGYLQPRTFLLKYNENGTITDAVDCALDPLSETKCTLKSFTVEKGIYQTSNFRVQPTESIVRFPNITNLCPFGEVFNATRFASVYAWNRKRISNCVADYSVLYNSASFSTFKCYGVSPTKLNDLCFTNVYADSFVIRGDEVRQIAPGQTGKIADYNYKLPDDFTGCVIAWNSNNLDSKVGGNYNYLYRLFRKSNLKPFERDISTEIYQAGSTPCNGVEGFNCYFPLQSYGFQPTNGVGYQPYRVVVLSFELLHAPATVCGPKKSTNLVKNKCVNFNFNGLTGTGVLTESNKKFLPFQQFGRDIADTTDAVRDPQTLEILDITPCSFGGVSVITPGTNTSNQVAVLYQDVNCTEVPVAIHADQLTPTWRVYSTGSNVFQTRAGCLIGAEHVNNSYECDIPIGAGICASYQTQTNSPRRARSVASQSIIAYTMSLGAENSVAYSNNSIAIPTNFTISVTTEILPVSMTKTSVDCTMYICGDSTECSNFLLQYGSFCTQLNRALTGIAVEQDKNTQEVFAQVKQIYKTPPIKDFGGFNFSQILPDPSKPSKRSFIEDLLFNKVTLADAGFIKQYGDCLGDIAARDLICAQKFNGLTVLPPLLTDEMIAQYTSALLAGTITSGWTFGAGAALQIPFAMQMAYRFNGIGVTQNVLYENQKLIANQFNSAIGKIQDSLSSTASALGKLQDVVNQNAQALNTLVKQLSSNFGAISSVLNDILSRLDPPEAEVQIDRLITGRLQSLQTYVTQQLIRAAEIRASANLAATKMSECVLGQSKRVDFCGKGYHLMSFPQSAPHGVVFLHVTYVPAQEKNFTTAPAICHDGKAHFPREGVFVSNGTHWFVTQRNFYEPQIITTDNTFVSGNCDVVIGIVNNTVYDPLQPELDSFKEELDKYFKNHTSPDVDLGDISGINASVVNIQKEIDRLNEVAKNLNESLIDLQELGKYEQYIKGGSGYIPEAPRDGQAYVRKDGEWVLLSTFL

SEQ ID NO: 5711 - protein, 1241 aa, Artificial Sequence
  SARS-CoV-2/Australia/QLD02/2020__EPI_ISL_407896 spike protein (1-1211)(K986P_V987P) Foldon construct
MFVFLVLLPLVSSQCVNLTTRTQLPPAYTNSFTRGVYYPDKVFRSSVLHSTQDLFLPFFSNVTWFHAIHVSGTNGTKRFDNPVLPFNDGVYFASTEKSNIIRGWIFGTTLDSKTQSLLIVNNATNVVIKVCEFQFCNDPFLGVYYHKNNKSWMESEFRVYSSANNCTFEYVSQPFLMDLEGKQGNFKNLREFVFKNIDGYFKIYSKHTPINLVRDLPQGFSALEPLVDLPIGINITRFQTLLALHRSYLTPGDSSSGWTAGAAAYYVGYLQPRTFLLKYNENGTITDAVDCALDPLSETKCTLKSFTVEKGIYQTSNFRVQPTESIVRFPNITNLCPFGEVFNATRFASVYAWNRKRISNCVADYSVLYNSASFSTFKCYGVSPTKLNDLCFTNVYADSFVIRGDEVRQIAPGQTGKIADYNYKLPDDFTGCVIAWNSNNLDSKVGGNYNYLYRLFRKSNLKPFERDISTEIYQAGSTPCNGVEGFNCYFPLQSYGFQPTNGVGYQPYRVVVLSFELLHAPATVCGPKKSTNLVKNKCVNFNFNGLTGTGVLTESNKKFLPFQQFGRDIADTTDAVRDPQTLEILDITPCSFGGVSVITPGTNTSNQVAVLYQDVNCTEVPVAIHADQLTPTWRVYSTGSNVFQTRAGCLIGAEHVNNSYECDIPIGAGICASYQTQTNSPRRARSVASQSIIAYTMSLGAENSVAYSNNSIAIPTNFTISVTTEILPVSMTKTSVDCTMYICGDSTECSNLLLQYGSFCTQLNRALTGIAVEQDKNTQEVFAQVKQIYKTPPIKDFGGFNFSQILPDPSKPSKRSFIEDLLFNKVTLADAGFIKQYGDCLGDIAARDLICAQKFNGLTVLPPLLTDEMIAQYTSALLAGTITSGWTFGAGAALQIPFAMQMAYRFNGIGVTQNVLYENQKLIANQFNSAIGKIQDSLSSTASALGKLQDVVNQNAQALNTLVKQLSSNFGAISSVLNDILSRLDPPEAEVQIDRLITGRLQSLQTYVTQQLIRAAEIRASANLAATKMSECVLGQSKRVDFCGKGYHLMSFPQSAPHGVVFLHVTYVPAQEKNFTTAPAICHDGKAHFPREGVFVSNGTHWFVTQRNFYEPQIITTDNTFVSGNCDVVIGIVNNTVYDPLQLELDSFKEELDKYFKNHTSPDVDLGDISGINASVVNIQKEIDRLNEVAKNLNESLIDLQELGKYEQYIKGGSGYIPEAPRDGQAYVRKDGEWVLLSTFL

SEQ ID NO: 5712 - protein, 1241 aa, Artificial Sequence
  SARS-CoV-2/India/1-31/2020__EPI_ISL_413523 spike protein (1-1211)(K986P_V987P) Foldon construct
MFVFLVLLPLVSSQCVNLTTRTQLPPAYTNSFTRGVYYPDKVFRSSVLHSTQDLFLPFFSNVTWFHAIHVSGTNGTKRFDNPVLPFNDGVYFASTEKSNIIRGWIFGTTLDSKTQSLLIVNNATNVVIKVCEFQFCNDPFLGVYYHKNNKSWMESEFRVYSSANNCTFEYVSQPFLMDLEGKQGNFKNLREFVFKNIDGYFKIYSKHTPINLVRDLPQGFSALEPLVDLPIGINITRFQTLLALHRSYLTPGDSSSGWTAGAAAYYVGYLQPRTFLLKYNENGTITDAVDCALDPLSETKCTLKSFTVEKGIYQTSNFRVQPTESIVRFPNITNLCPFGEVFNATRFASVYAWNRKRISNCVADYSVLYNSASFSTFKCYGVSPTKLNDLCFTNVYADSFVIRGDEVRQIAPGQTGKIADYNYKLPDDFTGCVIAWNSNNLDSKVGGNYNYLYRLFRKSNLKPFERDISTEIYQAGSTPCNGVEGFNCYFPLQSYGFQPTNGVGYQPYRVVVLSFELLHAPATVCGPKKSTNLVKNKCVNFNFNGLTGTGVLTESNKKFLPFQQFGRDIADTTDAVRDPQTLEILDITPCSFGGVSVITPGTNTSNQVAVLYQDVNCTEVPVAIHADQLTPTWRVYSTGSNVFQTRAGCLIGAEHVNNSYECDIPIGAGICASYQTQTNSPRRARSVASQSIIAYTMSLGAENSVAYSNNSIAIPTNFTISVTTEILPVSMTKTSVDCTMYICGDSTECSNLLLQYGSFCTQLNRALTGIAVEQDKNTQEVFAQVKQIYKTPPIKDFGGFNFSQILPDPSKPSKRSFIEDLLFNKVTLADAGFIKQYGDCLGDIAARDLICAQKFNGLTVLPPLLTDEMIAQYTSALLAGTITSGWTFGAGAALQIPFAMQMAYRFNGIGVTQNVLYENQKLIANQFNSVIGKIQDSLSSTASALGKLQDVVNQNAQALNTLVKQLSSNFGAISSVLNDILSRLDPPEAEVQIDRLITGRLQSLQTYVTQQLIRAAEIRASANLAATKMSECVLGQSKRVDFCGKGYHLMSFPQSAPHGVVFLHVTYVPAQEKNFTTAPAICHDGKAHFPREGVFVSNGTHWFVTQRNFYEPQIITTDNTFVSGNCDVVIGIVNNTVYDPLQPELDSFKEELDKYFKNHTSPDVDLGDISGINASVVNIQKEIDRLNEVAKNLNESLIDLQELGKYEQYIKGGSGYIPEAPRDGQAYVRKDGEWVLLSTFL

SEQ ID NO: 5713 - protein, 1241 aa, Artificial Sequence
  SARS-CoV-2/Guangdong/GD2020087-P0008/2020__EPI_ISL_413863 spike protein (1-1211)(K986P_V987P) Foldon construct
MFVFLVLLPLVSSQCVNLTTRTQLPPAYTNSFTRGVYYPDKVFRSSVLHSTQDLFLPFFSNVTWFHAIHVSGTNGTKRFDNPVLPFNDGVYFASTEKSNIIRGWIFGTTLDSKTQSLLIVNNATNVVIKVCEFQFCNDPFLGVYYHKNNKSWMESEFRVYSSANNCTFEYVSQPFLMDLEGKQGNFKNLREFVFKNIDGYFKIYSKHTPINLVRDLPQGFSALEPLVDLPIGINITRFQTLLALHRSYLTPGDSSSGWTAGAAAYYVGYLQPRTFLLKYNENGTITDAVDCALDPLSETKCTLKSFTVEKGIYQTSNFRVQPTESIVRFPNITNLCPFGEVFNATRFASVYAWNRKRISNCVADYSVLYNSASFSTFKCYGVSPTKLNDLCFTNVYADSFVIRGDEVREIAPGQTGKIADYNYKLPDDFTGCVIAWNSNNLDSKVGGNYNYLYRLFRKSNLKPFERDISTEIYQAGSTPCNGVEGFNCYFPLQSYGFQPTNGVGYQPYRVVVLSFELLHAPATVCGPKKSTNLVKNKCVNFNFNGLTGTGVLTESNKKFLPFQQFGRDIADTTDAVRDPQTLEILDITPCSFGGVSVITPGTNTSNQVAVLYQDVNCTEVPVAIHADQLTPTWRVYSTGSNVFQTRAGCLIGAEHVNNSYECDIPIGAGICASYQTQTNSPRRARSVASQSIIAYTMSLGAENSVAYSNNSIAIPTNFTISVTTEILPVSMTKTSVDCTMYICGDSTECSNLLLQYGSFCTQLNRALTGIAVEQDKNTQEVFAQVKQIYKTPPIKDFGGFNFSQILPDPSKPSKRSFIEDLLFNKVTLADAGFIKQYGDCLGDIAARDLICAQKFNGLTVLPPLLTDEMIAQYTSALLAGTITSGWTFGAGAALQIPFAMQMAYRFNGIGVTQNVLYENQKLIANQFNSAIGKIQDSLSSTASALGKLQDVVNQNAQALNTLVKQLSSNFGAISSVLNDILSRLDPPEAEVQIDRLITGRLQSLQTYVTQQLIRAAEIRASANLAATKMSECVLGQSKRVDFCGKGYHLMSFPQSAPHGVVFLHVTYVPAQEKNFTTAPAICHDGKAHFPREGVFVSNGTHWFVTQRNFYEPQIITTDNTFVSGNCDVVIGIVNNTVYDPLQPELDSFKEELDKYFKNHTSPDVDLGDISGINASVVNIQKEIDRLNEVAKNLNESLIDLQELGKYEQYIKGGSGYIPEAPRDGQAYVRKDGEWVLLSTFL

SEQ ID NO: 5714 - protein, 1241 aa, Artificial Sequence
  SARS-CoV-2/Sweden/01/2020__EPI_ISL_411951 spike protein (1-1211)(K986P_V987P) Foldon construct
MFVFLVLLPLVSSQCVNLTTRTQLPPAYTNSFTRGVYYPDKVFRSSVLHSTQDLFLPFFSNVTWFHAIHVSGTNGTKRFDNPVLPFNDGVYFASTEKSNIIRGWIFGTTLDSKTQSLLIVNNATNVVIKVCEFQFCNDPFLGVYYHKNNKSWMESEFRVYSSANNCTFEYVSQPFLMDLEGKQGNFKNLREFVFKNIDGYFKIYSKHTPINLVRDLPQGFSALEPLVDLPIGINITRFQTLLALHRSYLTPGDSSSGWTAGAAAYYVGYLQPRTFLLKYNENGTITDAVDCALDPLSETKCTLKSFTVEKGIYQTSNFRVQPTESIVRFPNITNLCPFGEVFNATRFASVYAWNRKRISNCVADYSVLYNSASFSTFKCYGVSPTKLNDLCFTNVYADSFVIRGDEVRQIAPGQTGKIADYNYKLPDDFTGCVIAWNSNNLDSKVGGNYNYLYRLFRKSNLKPFERDISTEIYQAGSTPCNGVEGFNCYFPLQSYGFQPTNGVGYQPYRVVVLSFELLHAPATVCGPKKSTNLVKNKCVNFNFNGLTGTGVLTESNKKFLPFQQFGRDIADTTDAVRDPQTLEILDITPCSFGGVSVITPGTNTSNQVAVLYQDVNCTEVPVAIHADQLTPTWRVYSTGSNVFQTRAGCLIGAEHVNNSYECDIPIGAGICASYQTQTNSPRRARSVASQSIIAYTMSLGAENSVAYSNNSIAIPTNFTISVTTEILPVSMTKTSVDCTMYICGDSTECSNLLLQYGSFCTQLNRALTGIAVEQDKNTQEVFAQVKQIYKTPPIKDCGGFNFSQILPDPSKPSKRSFIEDLLFNKVTLADAGFIKQYGDCLGDIAARDLICAQKFNGLTVLPPLLTDEMIAQYTSALLAGTITSGWTFGAGAALQIPFAMQMAYRFNGIGVTQNVLYENQKLIANQFNSAIGKIQDSLSSTASALGKLQDVVNQNAQALNTLVKQLSSNFGAISSVLNDILSRLDPPEAEVQIDRLITGRLQSLQTYVTQQLIRAAEIRASANLAATKMSECVLGQSKRVDFCGKGYHLMSFPQSAPHGVVFLHVTYVPAQEKNFTTAPAICHDGKAHFPREGVFVSNGTHWFVTQRNFYEPQIITTDNTFVSGNCDVVIGIVNNTVYDPLQPELDSFKEELDKYFKNHTSPDVDLGDISGINASVVNIQKEIDRLNEVAKNLNESLIDLQELGKYEQYIKGGSGYIPEAPRDGQAYVRKDGEWVLLSTFL

SEQ ID NO: 5715 - protein, 1241 aa, Artificial Sequence
  SARS-CoV-2/Tianmen/HBCDC-HB-07/2020__EPI_ISL_412983 spike protein (1-1211)(K986P_V987P) Foldon construct
MFVFLVLLPLVSSQCVNLTTRTQLPPAYTNSFTRGVYYPDKVFRSSVLHSTQDLFLPFFSNVTWFHAIHVSGTNGTKRFDNPVLPFNDGVYFASTEKSNIIRGWIFGTTLDSKTQSLLIVNNATNVVIKVCEFQFCNDPFLGVYYHKNNKSWMESEFRVYSSANNCTFEYVSQPFLMDLEGKQGNFKNLREFVFKNIDGYFKIYSKHTPINLVRDLPQGFSALEPLVDLPIGINITRFQTLLALHRSYLTPGDSSSGWTAGAAAYYVGYLQPRTFLLKYNENGTITDAVDCALDPLSETKCTLKSFTVEKGIYQTSNFRVQPTESIVRFPNITNLCPFGEVFNATRFASVYAWNRKRISNCVADYSVLYNSASFSTFKCYGVSPTKLNDLCFTNVYADSFVIRGDEVRQIAPGQTGKIADYNYKLPDDFTGCVIAWNSNNLDSKVGGNYNYLYRLFRKSNLKPFERDISTEIYQAGSTPCNGVEGFNCYFPLQSYGFQPTNGVGYQPYRVVVLSFELLHAPATVCGPKKSTNLVKNKCVNFNFNGLTGTGVLTESNKKFLPFQQFGRDIADTTDAVRDPQTLEILDITPCSFGGVSVITPGTNTSNQVAVLYQDLNCTEVPVAIHADQLTPTWRVYSTGSNVFQTRAGCLIGAEHVNNSYECDIPIGAGICASYQTQTNSPRRARSVASQSIIAYTMSLGAENSVAYSNNSIAIPTNFTISVTTEILPVSMTKTSVDCTMYICGDSTECSNLLLQYGSFCTQLNRALTGIAVEQDKNTQEVFAQVKQIYKTPPIKDFGGFNFSQILPDPSKPSKRSFIEDLLFNKVTLADAGFIKQYGDCLGDIAARDLICAQKFNGLTVLPPLLTDEMIAQYTSALLAGTITSGWTFGAGAALQIPFAMQMAYRFNGIGVTQNVLYENQKLIANQFNSAIGKIQDSLSSTASALGKLQDVVNQNAQALNTLVKQLSSNFGAISSVLNDILSRLDPPEAEVQIDRLITGRLQSLQTYVTQQLIRAAEIRASANLAATKMSECVLGQSKRVDFCGKGYHLMSFPQSAPHGVVFLHVTYVPAQEKNFTTAPAICHDGKAHFPREGVFVSNGTHWFVTQRNFYEPQIITTDNTFVSGNCDVVIGIVNNTVYDPLQPELDSFKEELDKYFKNHTSPDVDLGDISGINASVVNIQKEIDRLNEVAKNLNESLIDLQELGKYEQYIKGGSGYIPEAPRDGQAYVRKDGEWVLLSTFL

SEQ ID NO: 5716 - protein, 1241 aa, Artificial Sequence
  SARS-CoV-2/Hong Kong/case42_VM20002493/2020__EPI_ISL_414527 spike protein (1-1211)(K986P_V987P) Foldon construct
MFVFLVLLPLVSSQCVNLTTRTQLPPAYTNSFTRGVYYPDKVFRSSVLHSTQDLFLPFFSNVTWFHAIHVSGTNGTKRFDNPVLPFNDGVYFASTEKSNIIRGWIFGTTLDSKTQSLLIVNNATNVVIKVCEFQFCNDPFLGVYYHKNNKSWMESEFRVYSSANNCTFEYVSQPFLMDLEGKQGNFKNLREFVFKNIDGYFKIYSKHTPINLVRDLPQGFSALEPLVDLPIGINITRFQTLLALHRSYLTPGDSSSGWTAGAAAYYVGYLQPRTFLLKYNENGTITDAVDCALDPLSETKCTLKSFTVEKGIYQTSNFRVQPTESIVRFPNITNLCPFGEVFNATRFASVYAWNRKRISNCVADYSVLYNSASFSTFKCYGVSPTKLNDLCFTNVYADSFVIRGDEVRQIAPGQTGKIADYNYKLPDDFTGCVIAWNSNNLDSKVGGNYNYLYRLFRKSNLKPFERDISTEIYQAGSTPCNGVEGFNCYFPLQSYGFQPTNGVGYQPYRVVVLSFELLHAPATVCGPKKSTNLVKNKCVNFNFNGLTGTGVLTESNKKFLPFQQFGRDIADTTDAVRDPQTLEILDITPCSFGGVSVITPGTNTSNQVAVLYQDVNCTEVPVAIHADQLTPTWRVYSTGSNVFQTRAGCLIGAEHVNNSYECDIPIGAGICASYQTQTNSPRRARSVASQSIIAYTMSLGAENSVAYSNNSIAIPTNFAISVTTEILPVSMTKTSVDCTMYICGDSTECSNLLLQYGSFCTQLNRALTGIAVEQDKNTQEVFAQVKQIYKTPPIKDFGGFNFSQILPDPSKPSKRSFIEDLLFNKVTLADAGFIKQYGDCLGDIAARDLICAQKFNGLTVLPPLLTDEMIAQYTSALLAGTITSGWTFGAGAALQIPFAMQMAYRFNGIGVTQNVLYENQKLIANQFNSAIGKIQDSLSSTASALGKLQDVVNQNAQALNTLVKQLSSNFGAISSVLNDILSRLDPPEAEVQIDRLITGRLQSLQTYVTQQLIRAAEIRASANLAATKMSECVLGQSKRVDFCGKGYHLMSFPQSAPHGVVFLHVTYVPAQEKNFTTAPAICHDGKAHFPREGVFVSNGTHWFVTQRNFYEPQIITTDNTFVSGNCDVVIGIVNNTVYDPLQPELDSFKEELDKYFKNHTSPDVDLGDISGINASVVNIQKEIDRLNEVAKNLNESLIDLQELGKYEQYIKGGSGYIPEAPRDGQAYVRKDGEWVLLSTFL

SEQ ID NO: 5717 - protein, 1241 aa, Artificial Sequence
  SARS-CoV-2/USA/CruiseA-23/2020__EPI_ISL_414482 spike protein (1-1211)(K986P_V987P) Foldon construct
MFVFLVLLPLVSSQCVNLTTRTQLPPAYTNSFTRGVYYPDKVFRSSVLHSTQDLFLPFFSNVTWFHAIHVSGTNGTKRFDNPVLPFNDGVYFASTEKSNIIRGWIFGTTLDSKTQSLLIVNNATNVVIKVCEFQFCNDPFLGVYYHKNNKSWMESEFRVYSSANNCTFEYVSQPFLMDLEVKQGNFKNLREFVFKNIDGYFKIYSKHTPINLVRDLPQGFSALEPLVDLPIGINITRFQTLLALHRSYLTPGDSSSGWTAGAAAYYVGYLQPRTFLLKYNENGTITDAVDCALDPLSETKCTLKSFTVEKGIYQTSNFRVQPTESIVRFPNITNLCPFGEVFNATRFASVYAWNRKRISNCVADYSVLYNSASFSTFKCYGVSPTKLNDLCFTNVYADSFVIRGDEVRQIAPGQTGKIADYNYKLPDDFTGCVIAWNSNNLDSKVGGNYNYLYRLFRKSNLKPFERDISTEIYQAGSTPCNGVEGFNCYFPLQSYGFQPTNGVGYQPYRVVVLSFELLHAPATVCGPKKSTNLVKNKCVNFNFNGLTGTGVLTESNKKFLPFQQFGRDIADTTDAVRDPQTLEILDITPCSFGGVSVITPGTNTSNQVAVLYQDVNCTEVPVAIHADQLTPTWRVYSTGSNVFQTRAGCLIGAEHVNNSYECDIPIGAGICASYQTQTNSPRRARSVASQSIIAYTMSLGAENSVAYSNNSIAIPTNFTISVTTEILPVSMTKTSVDCTMYICGDSTECSNLLLQYGSFCTQLNRALTGIAVEQDKNTQEVFAQVKQIYKTPPIKDFGGFNFSQILPDPSKPSKRSFIEDLLFNKVTLADAGFIKQYGDCLGDIAARDLICAQKFNGLTVLPPLLTDEMIAQYTSALLAGTITSGWTFGAGAALQIPFAMQMAYRFNGIGVTQNVLYENQKLIANQFNSAIGKIQDSLSSTASALGKLQDVVNQNAQALNTLVKQLSSNFGAISSVLNDILSRLDPPEAEVQIDRLITGRLQSLQTYVTQQLIRAAEIRASANLAATKMSECVLGQSKRVDFCGKGYHLMSFPQSAPHGVVFLHVTYVPAQEKNFTTAPAICHDGKAHFPREGVFVSNGTHWFVTQRNFYEPQIITTDNTFVSGNCDVVIGIVNNTVYDPLQPELDSFKEELDKYFKNHTSPDVDLGDISGINASVVNIQKEIDRLNEVAKNLNESLIDLQELGKYEQYIKGGSGYIPEAPRDGQAYVRKDGEWVLLSTFL

SEQ ID NO: 5718 - protein, 1241 aa, Artificial Sequence
  SARS-CoV-2/Hong Kong/case85_VM20002868/2020__EPI_ISL_414519 spike protein (1-1211)(K986P_V987P) Foldon construct
MFVFLVLVPLVSSQCVNLTTRTQLPPAYTNSFTRGVYYPDKVFRSSVLHSTQDLFLPFFSNVTWFHAIHVSGTNGTKRFDNPVLPFNDGVYFASTEKSNIIRGWIFGTTLDSKTQSLLIVNNATNVVIKVCEFQFCNDPFLGVYYHKNNKSWMESEFRVYSSANNCTFEYVSQPFLMDLEGKQGNFKNLREFVFKNIDGYFKIYSKHTPINLVRDLPQGFSALEPLVDLPIGINITRFQTLLALHRSYLTPGDSSSGWTAGAAAYYVGYLQPRTFLLKYNENGTITDAVDCALDPLSETKCTLKSFTVEKGIYQTSNFRVQPTESIVRFPNITNLCPFGEVFNATRFASVYAWNRKRISNCVADYSVLYNSASFSTFKCYGVSPTKLNDLCFTNVYADSFVIRGDEVRQIAPGQTGKIADYNYKLPDDFTGCVIAWNSNNLDSKVGGNYNYLYRLFRKSNLKPFERDISTEIYQAGSTPCNGVEGFNCYFPLQSYGFQPTNGVGYQPYRVVVLSFELLHAPATVCGPKKSTNLVKNKCVNFNFNGLTGTGVLTESNKKFLPFQQFGRDIADTTDAVRDPQTLEILDITPCSFGGVSVITPGTNTSNQVAVLYQDVNCTEVPVAIHADQLTPTWRVYSTGSNVFQTRAGCLIGAEHVNNSYECDIPIGAGICASYQTQTNSPRRARSVASQSIIAYTMSLGAENSVAYSNNSIAIPTNFTISVTTEILPVSMTKTSVDCTMYICGDSTECSNLLLQYGSFCTQLNRALTGIAVEQDKNTQEVFAQVKQIYKTPPIKDFGGFNFSQILPDPSKPSKRSFIEDLLFNKVTLADAGFIKQYGDCLGDIAARDLICAQKFNGLTVLPPLLTDEMIAQYTSALLAGTITSGWTFGAGAALQIPFAMQMAYRFNGIGVTQNVLYENQKLIANQFNSAIGKIQDSLSSTASALGKLQDVVNQNAQALNTLVKQLSSNFGAISSVLNDILSRLDPPEAEVQIDRLITGRLQSLQTYVTQQLIRAAEIRASANLAATKMSECVLGQSKRVDFCGKGYHLMSFPQSAPHGVVFLHVTYVPAQEKNFTTAPAICHDGKAHFPREGVFVSNGTHWFVTQRNFYEPQIITTDNTFVSGNCDVVIGIVNNTVYDPLQPELDSFKEELDKYFKNHTSPDVDLGDISGINASVVNIQKEIDRLNEVAKNLNESLIDLQELGKYEQYIKGGSGYIPEAPRDGQAYVRKDGEWVLLSTFL

SEQ ID NO: 5719 - protein, 1241 aa, Artificial Sequence; identical to SEQ ID NO: 111
  SARS-CoV-2/England/200990660/2020__EPI_ISL_414523 spike protein (1-1211)(K986P_V987P) Foldon construct

SEQ ID NO: 5720 - protein, 1241 aa, Artificial Sequence
  SARS-CoV-2/Australia/NSW09/2020__EPI_ISL_413595 spike protein (1-1211)(K986P_V987P) Foldon construct
MFVFLVLLPLVSSQCVNLTTRTQLPPAYTNSFTRGVYYPDKVFRSSVLHSTQDLFLPFFSNVTWFHAIHVSGTNGTKRFDNPVLPFNDGVYFASTEKSNIIRGWIFGTTLDSKTQSLLIVNNATNVVIKVCEFQFCNDPFLGVYYHKNNKSWMESEFRVYSSANNCTFEYVSQPFLMDLEGKQGNFKNLREFVFKNIDGYFKIYSKHTPINLVRDLPQGFSALEPLVDLPIGINITRFQTLLALHRSYLTPGDSSSGWTAGAAAYYVGYLQPRTFLLKYNENGTITDAVDCALDPLSETKCTLKSFTVEKGIYQTSNFRVQPTESIVRFPNITNLCPFGEVFNATRFASVYAWNRKRISNCVADYSVLYNSASFSTFKCYGVSPTKLNDLCFTNVYADSFVIRGDEVRQIAPGQTGKIADYNYKLPDDFTGCVIAWNSNNLDSKVGGNYNYLYRLFRKSNLKPFERDISTEIYQAGSTPCNGVEGFNCYFPLQSYGFQPTNGVGYQPYRVVVLSFELLHAPATVCGPKKSTNLVKNKCVNFNFNGLTGTGVLTESNKKFLPFQQFGRDIADTTDAVRDPQTLEILDITPCSFGGVSVITPGTNTSNQVAVLYQDVNCTEVPVAIHADQLTPTWRVYSTGSNVFQTRAGCLIGAEHVNNSYECDIPIGAGICASYQTQTNSPRRARSVASQSIIAYTMSLGAENSVAYSNNSIAIPTNFTISVTTEILPVSMTKTSVDCTMYICGDSTECSNLLLQYGSFCTQLNRALTGIAVEQDKNTQEVFAQVKQIYKTPPIKDFGGFNFSQILPDPSKPSKRSFIEDLLFNKVTLADAGFIKQYGDCLGDIAARDLICAQKFNGLTVLPPLLTDEMIAQYTSALLAGTITSGWTFGAGAALQIPFAMQMAYRFNGIGVTQNVLYENQKLIANQFNSAIGKIQDSLSFTASALGKLQDVVNQNAQALNTLVKQLSSNFGAISSVLNDILSRLDPPEAEVQIDRLITGRLQSLQTYVTQQLIRAAEIRASANLAATKMSECVLGQSKRVDFCGKGYHLMSFPQSAPHGVVFLHVTYVPAQEKNFTTAPAICHDGKAHFPREGVFVSNGTHWFVTQRNFYEPQIITTDNTFVSGNCDVVIGIVNNTVYDPLQPELDSFKEELDKYFKNHTSPDVDLGDISGINASVVNIQKEIDRLNEVAKNLNESLIDLQELGKYEQYIKGGSGYIPEAPRDGQAYVRKDGEWVLLSTFL

SEQ ID NO: 5721 - protein, 1241 aa, Artificial Sequence; identical to SEQ ID NO: 103
  SARS-CoV-2/Australia/NSW10/2020__EPI_ISL_413596 spike protein (1-1211)(K986P_V987P) Foldon construct

SEQ ID NO: 5722 - protein, 1241 aa, Artificial Sequence
  SARS-CoV-2/Switzerland/1000477797/2020__EPI_ISL_413023 spike protein (1-1211)(K986P_V987P) Foldon construct
MFVFLVLLPLVSSQCVNLTTRTQLPPAYTNSFTRGVYYPDKVFRSSVLHSTQDLFLPFFSNVTWFHAIHVSGTNGTKRFDNPVLPFNDGVYFASTEKSNIIRGWIFGTTLDSKTQSLLIVNNATNVVIKVCEFQFCNDPFLGVYYHKNNKSWMESEFRVYSSANNCTFEYVSQPFLMDLEGKQGNFKNLREFVFKNIDGYFNIYSKHTPINLVRDLPQGFSALEPLVDLPIGINITRFQTLLALHRSYLTPGDSSSGWTAGAAAYYVGYLQPRTFLLKYNENGTITDAVDCALDPLSETKCTLKSFTVEKGIYQTSNFRVQPTESIVRFPNITNLCPFGEVFNATRFASVYAWNRKRISNCVADYSVLYNSASFSTFKCYGVSPTKLNDLCFTNVYADSFVIRGDEVRQIAPGQTGKIADYNYKLPDDFTGCVIAWNSNNLDSKVGGNYNYLYRLFRKSNLKPFERDISTEIYQAGSTPCNGVEGFNCYFPLQSYGFQPTNGVGYQPYRVVVLSFELLHAPATVCGPKKSTNLVKNKCVNFNFNGLTGTGVLTESNKKFLPFQQFGRDIADTTDAVRDPQTLEILDITPCSFGGVSVITPGTNTSNQVAVLYQGVNCTEVPVAIHADQLTPTWRVYSTGSNVFQTRAGCLIGAEHVNNSYECDIPIGAGICASYQTQTNSPRRARSVASQSIIAYTMSLGAENSVAYSNNSIAIPTNFTISVTTEILPVSMTKTSVDCTMYICGDSTECSNLLLQYGSFCTQLNRALTGIAVEQDKNTQEVFAQVKQIYKTPPIKDFGGFNFSQILPDPSKPSKRSFIEDLLFNKVTLADAGFIKQYGDCLGDIAARDLICAQKFNGLTVLPPLLTDEMIAQYTSALLAGTITSGWTFGAGAALQIPFAMQMAYRFNGIGVTQNVLYENQKLIANQFNSAIGKIQDSLSSTASALGKLQDVVNQNAQALNTLVKQLSSNFGAISSVLNDILSRLDPPEAEVQIDRLITGRLQSLQTYVTQQLIRAAEIRASANLAATKMSECVLGQSKRVDFCGKGYHLMSFPQSAPHGVVFLHVTYVPAQEKNFTTAPAICHDGKAHFPREGVFVSNGTHWFVTQRNFYEPQIITTDNTFVSGNCDVVIGIVNNTVYDPLQPELDSFKEELDKYFKNHTSPDVDLGDISGINASVVNIQKEIDRLNEVAKNLNESLIDLQELGKYEQYIKGGSGYIPEAPRDGQAYVRKDGEWVLLSTFL

SEQ ID NO: 5723 - protein, 1241 aa, Artificial Sequence
  SARS-CoV-2/Belgium/BA-02291/2020__EPI_ISL_415159 spike protein (1-1211)(K986P_V987P) Foldon construct
MFVFLVLLPLVSSQCVNLTTRTQLPPAYTNSFTRGVYYPDKVFRSSVLHSTQDLFLPFFSNVTWFHAIHVSGTNGTKRFDNPVLPFNDGVYFASTEKSNIIRGWIFGTTLDSKTQSLLIVNNATNVVIKVCEFQFCNDPFLGVYYHKNNKSWMESEFRVYSSANNCTFEYVSQPFLMDLEGKQGNFKNLREFVFKNIDGYFKIYSKHTPINLVRDLPQGFSALEPLVDLPIGINITRFQTLLALHRSYLTPGDSSSGWTAGAAAYYVGYLQPRTFLLKYNENGTITDAVDCALDPLSETKCTLKSFTVEKGIYQTSNFRVQPTESIVRFPNITNLCPFGEVFNATRFASVYAWNRKRISNCVADYSVLYNSASFSTFKCYGVSPTKLNDLCFTNVYADSFVIRGDEVRQIAPGQTGKIADYNYKLPDDFTGCVIAWNSNNLDSKVGGNYNYLYRLFRRSNLKPFERDISTEIYQAGSTPCNGVEGFNCYFPLQSYGFQPTNGVGYQPYRVVVLSFELLPAPATVCGPKKSTNLVKNKCVNFNFNGLTGTGVLTESNKKFLPFQQFGRDIADTTDAVRDPQTLEILDITPCSFGGVSVITPGTNTSNQVAVLYQGVNCTEVPVAIHADQLTPTWRVYSTGSNVFQTRAGCLIGAEHVNNSYECDIPIGAGICASYQTQTNSPRRARSVASQSIIAYTMSLGAENSVAYSNNSIAIPTNFTISVTTEILPVSMTKTSVDCTMYICGDSTECSNLLLQYGSFCTQLNRALTGIAVEQDKNTQEVFAQVKQIYKTPPIKDFGGFNFSQILPDPSKPSKRSFIEDLLFNKVTLADAGFIKQYGDCLGDIAARDLICAQKFNGLTVLPPLLTDEMIAQYTSALLAGTITSGWTFGAGAALQIPFAMQMAYRFNGIGVTQNVLYENQKLIANQFNSAIGKIQDSLSSAAPALGKLQDVVNQNAQALNTLVKQLSSNFGAISSVLNDILSRLDPPEAEVQIDRLITGRLQSLQTYVTQQLIRAAEIRASANLAATKMSECVLGQSKRVDFCGKGYHLMSFPQSAPHGVVFLHVTYVPAQEKNFTTAPAICHDGKAHFPREGVFVSNGTHWFVTQRNFYEPQIITTDNTFVSGNCDVVIGIVNNTVYDPLQPELDSFKEELDKYFKNHTSPDVDLGDISGINASVVNIQKEIDRLNEVAKNLNESLIDLQELGKYEQYIKGGSGYIPEAPRDGQAYVRKDGEWVLLSTFL

SEQ ID NO: 5724 - protein, 1241 aa, Artificial Sequence
  SARS-CoV-2/USA/WA8-UW5/2020__EPI_ISL_413486 spike protein (1-1211)(K986P_V987P) Foldon construct
MFVFLVLLPLVSSQCVNLTTRTQLPPAYTNSFTRGVYYPDKVFRSSVLHSTQDLFLPFFSNVTWFHAIHVSGTNGTKRFDNPVLPFNDGVYFASTEKSNIIRGWIFGTTLDSKTQSLLIVNNATNVVIKVCEFQFCNDPFLGVYYHKNNKSWMESEFRVYSSANNCTFEYVSQPFLMDLEGKQGNFKNLREFVFKNIDGYFKIYSKHTPINLVRDLPQGFSALEPLVDLPIGINITRFQTLLALHRSYLTPGDSSSGWTAGAAAYYVGYLQPRTFLLKYNENGTITDAVDCALDPLSETKCTLKSFTVEKGIYQTSNFRVQPTESIVRFPNITNLCPFGEVFNATRFASVYAWNRKRISNCVADYSVLYNSASFSTFKCYGVSPTKLNDLCFTNVYADSFVIRGDEVRQIAPGQTGKIADYNYKLPDDFTGCVIAWNSNNLDSKVGGNYNYLYRLFRKSNLKPFERDISTEIYQAGSTPCNGVEGFNCYFPLQSYGFQPTNGVGYQPYRVVVLSFELLHAPATVCGPKKSTNLVKNKCVNFNFNGLTGTGVLTESNKKFLPFQQFGRDIADTTDAVRDPQTLEILDITPCSFGGVSVITPGTNTSNQVAVLYQDVNCTEVPVAIHADQLTPTWRVYSTGSNVFQTRAGCLIGAEYVNNSYECDIPIGAGICASYQTQTNSPRRARSVASQSIIAYTMSLGAENSVAYSNNSIAIPTNFTISVTTEILPVSMTKTSVDCTMYICGDSTECSNLLLQYGSFCTQLNRALTGIAVEQDKNTQEVFAQVKQIYKTPPIKDFGGFNFSQILPDPSKPSKRSFIEDLLFNKVTLADAGFIKQYGDCLGDIAARDLICAQKFNGLTVLPPLLTDEMIAQYTSALLAGTITSGWTFGAGAALQIPFAMQMAYRFNGIGVTQNVLYENQKLIANQFNSAIGKIQDSLSSTASALGKLQDVVNQNAQALNTLVKQLSSNFGAISSVLNDILSRLDPPEAEVQIDRLITGRLQSLQTYVTQQLIRAAEIRASANLAATKMSECVLGQSKRVDFCGKGYHLMSFPQSAPHGVVFLHVTYVPAQEKNFTTAPAICHDGKAHFPREGVFVSNGTHWFVTQRNFYEPQIITTDNTFVSGNCDVVIGIVNNTVYDPLQPELDSFKEELDKYFKNHTSPDVDLGDISGINASVVNIQKEIDRLNEVAKNLNESLIDLQELGKYEQYIKGGSGYIPEAPRDGQAYVRKDGEWVLLSTFL

SEQ ID NO: 5725 - protein, 1241 aa, Artificial Sequence
  SARS-CoV-2/England/20102000506/2020__EPI_ISL_415147 spike protein (1-1211)(K986P_V987P) Foldon construct
MFVFLVLLPLVSSQCVNLTTRTQLPPAYTNSFTRGVYYPDKVFRSSVLHSTQDLFLPFFSNVTWFHAIHVSGTNGTKRFDNPVLPFNDGVYFASTEKSNIIRGWIFGTTLDSKTQSLLIVNNATNVVIKVCEFQFCNDPFLGVYYHKNNKSWMESEFRVYSSANNCTFEYVSQPFLMDLEGKQGNFKNLREFVFKNIDGYFKIYSKHTPINLVRDLPQGFSALEPLVDLPIGINITRFQTLLALHRSYLTPGDSSSGWTAGAAAYYVGYLQPRTFLLKYNENGTITDAVDCALDPLSETKCTLKSFTVEKGIYQTSNFRVQPTESIVRFPNITNLCPFGEVFNATRFASVYAWNRKRISNCVADYSVLYNSASFSTFKCYGVSPTKLNDLCFTNVYADSFVIRGDEVRQIAPGQTGKIADYNYKLPDDFTGCVIAWNSNNLDSKVGGNYNYLYRLFRKSNLKPFERDISTEIYQAGSTPCNGVEGFNCYFPLQSYGFQPTNGVGYQPYRVVVLSFELLHAPATVCGPKKSTNLVKNKCVNFNFNGLTGTGVLTESNKKFLPFQQFGRDIADTTDAVRDPQTLEILDITPCSFGGVSVITPGTNTSNQVAVLYQGVNCTEVPVAIHADQLTPTWRVYSTGSNVFQTRAGCLIGAEHVNNSYECDIPIGAGICASYQTQTNSPRRARSVASQSIIAYTMSLGAENSVAYSNNSIAIPTNFTISVTTEILPVSMTKTSVDCTMYICGDSTECSNLLLQYGSFCTQLNRALTGIAVEQDKNTQEVFAQVKQIYKTPPIKDFGGFNFSQILPDPSKPSKRSFIEDLLFNKVTLADAGFIKQYGYCLGDIAARDLICAQKFNGLTVLPPLLTDEMIAQYTSALLAGTITSGWTFGAGAALQIPFAMQMAYRFNGIGVTQNVLYENQKLIANQFNSAIGKIQDSLSSTASALGKLQDVVNQNAQALNTLVKQLSSNFGAISSVLNDILSRLDPPEAEVQIDRLITGRLQSLQTYVTQQLIRAAEIRASANLAATKMSECVLGQSKRVDFCGKGYHLMSFPQSAPHGVVFLHVTYVPAQEKNFTTAPAICHDGKAHFPREGVFVSNGTHWFVTQRNFYEPQIITTDNTFVSGNCDVVIGIVNNTVYDPLQPELDSFKEELDKYFKNHTSPDVDLGDISGINASVVNIQKEIDRLNEVAKNLNESLIDLQELGKYEQYIKGGSGYIPEAPRDGQAYVRKDGEWVLLSTFL

SEQ ID NO: 5726 - protein, 1241 aa, Artificial Sequence
  SARS-CoV-2/Belgium/VAG-03013/2020__EPI_ISL_415155 spike protein (1-1211)(K986P_V987P) Foldon construct
MFVFLVLLPLVSSQCVNLTTRTQLPPAYTNSFTRGVYYPDKVFRSSVLHSTQDLFLPFFSNVTWFHAIHVSGTNGTKRFDNPVLPFNDGVYFASTEKSNIIRGWIFGTTLDSKTQSLLIVNNATNVVIKVCEFQFCNDPFLGVYYHKNNKSWMESEFRVYSSANNCTFEYVSQPFLMDLEGKQGNFKNLREFVFKNIDGYFKIYSKHTPINLVRDLPQGFSALEPLVDLPIGINITRFQTLLALHRSYLTPGDSSSGWTAGAAAYYVGYLQPRTFLLKYNENGTITDAVDCALDPLSETKCTLKSFTVEKGIYQTSNFRVQPTESIVRFPNITNLCPFGEVFNATRFASVYAWNRKRISNCVADYSVLYNSASFSTFKCYGVSPTKLNDLCFTNVYADSFVIRGDEVRQIAPGQTGKIADYNYKLPDDFTGCVIAWNSNNLDSKVGGNYNYLYRLFRKSNLKPFERDISTEIYQAGSTPCNGVEGFNCYFPLQSYGFQPTNGVGYQPYRVVVLSFELLHAPATVCGPKKSTNLVKNKCVNFNFNGLTGTGVLTESNKKFLPFQQFGRDIADTTDAVRDPQTLEILDITPCSFGGVSVITPGTNTSNQVAVLYQGVNCTEVPVAIHADQLTPTWRVYSTGSNVFQTRAGCLIGAEHVNNSYECDIPIGAGICASYQTQTNSPRRARSVASQSIIAYTMSLGAENSVAYSNNSIAIPTNFTISVTTEILPVSMTKTSVDCTMYICGDSTECSNLLLQYGSFCTQLNRALTGIAVEQDKNTQEVFAQVKQIYKTPPIKDFGGFNFSQILPDPSKPSKRSFIEDLLFNKVTLADAGFIKQYGDCLGDIAARDLICAQKFNGLTVLPPLLTDEMIAQYTSALLAGTITSGWTFGAGAALQIPFAMQMAYRFNGIGVTQNVLYENQKLIANQFNSAIGKIQDSLSSTATALGKLQDVVNQNAQALNTLVKQLSSNFGAISSVLNDILSRLDPPEAEVQIDRLITGRLQSLQTYVTQQLIRAAEIRASANLAATKMSECVLGQSKRVDFCGKGYHLMSFPQSAPHGVVFLHVTYVPAQEKNFTTAPAICHDGKAHFPREGVFVSNGTHWFVTQRNFYEPQIITTDNTFVSGNCDVVIGIVNNTVYDPLQPELDSFKEELDKYFKNHTSPDVDLGDISGINASVVNIQKEIDRLNEVAKNLNESLIDLQELGKYEQYIKGGSGYIPEAPRDGQAYVRKDGEWVLLSTFL

SEQ ID NO: 5727 - protein, 1241 aa, Artificial Sequence
  SARS-CoV-2/Belgium/BC-03016/2020__EPI_ISL_415157 spike protein (1-1211)(K986P_V987P) Foldon construct
MFVFLVLLPLVSSQCVNLTTRTQLPPAYTNSFTRGVYYPDKVFRSSVLHSTQDLFLPFFSNVTWFHAIHVSGTNGTKRFDNPVLPFNDGVYFASTEKSNIIRGWIFGTTLDSKTQSLLIVNNATNVVIKVCEFQFCNDPFLGVYYHKNNKSWMESEFRVYSSANNCTFEYVSQPFLMDLEGKQGNFKNLREFVFKNIDGYFKIYSKHTPINLVRDLPQGFSALEPLVDLPIGINITRFQTLLALHRSYLTPGDSSSGWTAGAAAYYVGYLQPRTFLLKYNENGTITDAVDCALDPLSETKCTLKSFTVEKGIYQTSNFRVQPTESIVRFPNITNLCPFGEVFNATRFASVYAWNRKRISNCVADYSVLYNSASFSTFKCYGVSPTKLNDLCFTNVYADSFVIRGDEVRQIAPGQTGKIADYNYKLPDDFTGCVIAWNSNNLDSKVGGNYNYLYRLFRKSNLKPFERDISTEIYQAGSTPCNGVEGFNCYFPLQSYGFQPTNGVGYQPYRVVVLSFELLHAPATVCGPKKSTNLVKNKCVNFNFNGLTGTGVLTESNKKFLPFQQFGRDIADTTDAVRDPQTLEILDITPCSFGGVSVITPGTNTSNQVAVLYQGVNCTEVPVAIHADQLTPTWRVYSTGSNVFQTRAGCLIGAEHVNNSYECDIPIGAGICASYQTQTNSPRRARSVASQSIIAYTMSLGAENSVAYSNNSIAIPTNFTISVTTEILPVSMTKTSVDCTMYICGDSTECSNLLLQYGSFCTQLNRALTGIAVEQDKNTQEVFAQVKQIYKTPPIKDFGGFNFSQILPDPSKPSKRSFIEDLLFNKVTLADAGFIKQYGDCLGDIAARDLICAQKFNGLTVLPPLLTDEMIAQYTSALLAGTITSGWTFGAGAALQIPFAMQMAYRFNGIGVTQNVLYENQKLIANQFNSAIGKIQDSLSSTAPALGKLQDVVNQNAQALNTLVKQLSSNFGAISSVLNDILSRLDPPEAEVQIDRLITGRLQSLQTYVTQQLIRAAEIRASANLAATKMSECVLGQSKRVDFCGKGYHLMSFPQSAPHGVVFLHVTYVPAQEKNFTTAPAICHDGKAHFPREGVFVSNGTHWFVTQRNFYEPQIITTDNTFVSGNCDVVIGIVNNTVYDPLQPELDSFKEELDKYFKNHTSPDVDLGDISGINASVVNIQKEIDRLNEVAKNLNESLIDLQELGKYEQYIKGGSGYIPEAPRDGQAYVRKDGEWVLLSTFL

SEQ ID NO: 5728 - protein, 1241 aa, Artificial Sequence
  SARS-CoV-2/Germany/BavPat3/2020__EPI_ISL_414521 spike protein (1-1211)(K986P_V987P) Foldon construct
MFVFLVLLPLVSSQCVNLTTRTQLPPAYTNSFTRGVYYPDKVFRSSVLHSTQDLFLPFFSNVTWFHAIHVSGTNGTKRFDNPVLPFNDGVYFASTEKSNIIRGWIFGTTLDSKTQSLLIVNNATNVVIKVCEFQFCNDPFLGVYYHKNNKSWMESEFRVYSSANNCTFEYVSQPFLMDLEGKQGNFKNLREFVFKNIDGYFKIYSKHTPINLVRDLPQGFSALEPLVDLPIGINITRFQTLLALHRSYLTPGDSSSGWTAGAAAYYVGYLQPRTFLLKYNENGTITDAVDCALDPLSETKCTLKSFTVEKGIYQTSNFRVQPTESIVRFPNITNLCPFGEVFNATRFASVYAWNRKRISNCVADYSVLYNSASFSTFKCYGVSPTKLNDLCFTNVYADSFVIRGDEVRQIAPGQTGKIADYNYKLPDDFTGCVIAWNSNNLDSKVGGNYNYLYRLFRKSNLKPFERDISTEIYQAGSTPCNGVEGFNCYFPLQSYGFQPTNGVGYQPYRVVVLSFELLHAPATVCGPKKSTNLVKNKCVNFNFNGLTGTGVLTESNKKFLPFQQFGRDIADTTDAVRDPQTLEILDITPCSFGGVSVITPGTNTSNQVAVLYQDVNCTEVPVAIHADQLTPTWRVYSTGSNVFQTRAGCLIGAEHVNNSYECDIPIGAGICASYQTQTNSPRRARSVASQSIIAYTMSLGAENSVAYSNNSIAIPTNFTISVTTEILPVSMTKTSVDCTMYICGDSTECSNLLLQYGSFCTQLNRALTGIAVEQDKNTQQVFAQVKQIYKTPPIKDFGGFNFSQILPDPSKPSKRSFIEDLLFNKVTLADAGFIKQYGDCLGDIAARDLICAQKFNGLTVLPPLLTDEMIAQYTSALLAGTITSGWTFGAGAALQIPFAMQMAYRFNGIGVTQNVLYENQKLIANQFNSAIGKIQDSLSSTASALGKLQDVVNQNAQALNTLVKQLSSNFGAISSVLNDILSRLDPPEAEVQIDRLITGRLQSLQTYVTQQLIRAAEIRASANLAATKMSECVLGQSKRVDFCGKGYHLMSFPQSAPHGVVFLHVTYVPAQEKNFTTAPAICHDGKAHFPREGVFVSNGTHWFVTQRNFYEPQIITTDNTFVSGNCDVVIGIVNNTVYDPLQPELDSFKEELDKYFKNHTSPDVDLGDISGINASVVNIQKEIDRLNEVAKNLNESLIDLQELGKYEQYIKGGSGYIPEAPRDGQAYVRKDGEWVLLSTFL

SEQ ID NO: 5729 - protein, 1241 aa, Artificial Sequence
  SARS-CoV-2/France/HF1805/2020__EPI_ISL_414628 spike protein (1-1211)(K986P_V987P) Foldon construct
MFVFLVLLPLVSSQCVNLTTRTQLPPAYTNSFTRGVYYPDKVFRSSVLHSTQDLFLPFFSNVTWFHAIHVSGTNGTKRFDNPVLPFNDGVYFASTEKSNIIRGWIFGTTLDSKTQSLLIVNNATNVVIKVCEFQFCNDPFLGVYYHKNNKSWMESEFRVYSSANNCTFEYVSQPFLMDLEGKQGNFKNLREFVFKNIDGYFKIYSKHTPINLVRDLPQGFSALEPLVDLPIGINITRFQTLLALHRSYLTPGDSSSGWTAGAAAYYVGYLQPRTFLLKYNENGTITDAVDCALDPLSETKCTLKSFTVEKGIYQTSNFRVQPTESIVRFPNITNLCPFGEVFNATRFASVYAWNRKRISNCVADYSVLYNSASFSTFKCYGVSPTKLNDLCFTNVYADSFVIRGDEVRQIAPGQTGKIADYNYKLPDDFTGCVIAWNSNNLDSKVGGNYNYLYRLFRKSNLKPFERDISTEIYQAGSTPCNGVEGFNCYFPLQSYGFQPTNGVGYQPYRVVVLSFELLHAPATVCGPKKSTNLVKNKCVNFNFNGLTGTGVLTESNKKFLPFQQFGRDIADTTDAVRDPQTLEILDITPCSFGGVSVITPGTNTSNQVAVLYQGVNCTEVPVAIHADQLTPTWRVYSTGSNVFQTRAGCLIGAEHVNNSYECDIPIGAGICASYQTQTNSPRRARSVASQSIIAYTMSLGAENSVAYSNNSIAIPTNFTISVTTEILPVSMTKTSVDCTMYICGDSTECSNLLLQYGSFCTQLNRALTGIAVEQDKNTQEVFAQVKQIYKTPPIKDFGGFNFSQILPDPSKPSKRSFIEDLLFNKVTLADAGFIKQYGDCLGDIAARDLICAQKFNGLTVLPPLLTDEMIAQYTSALLAGTITSGWTFGAGAALQIPFAMQMAYRFNGIGVTQNVLYENQKLIANQFNSAIGKIQDSLSSTASALGKLQDVVNQNAQALNTLVKQLSSNFGAISSVLNDILSRLDPPEAEVQIDRLITGRLQSLQTYVTQQLIRAAEIRASANLAATKMSECVLGQSKRVDFCGKGYHLMSFPQSAPHGVVFLHVTYVPAQEKNFTTAPAICHDGKAHFPREGVFVSNGTHWFVTQRNFYEPQIITTDNTFVSGNCDVVIGVVNNTVYDPLQPELDSFKEELDKYFKNHTSPDVDLGDISGINASVVNIQKEIDRLNEVAKNLNESLIDLQELGKYEQYIKGGSGYIPEAPRDGQAYVRKDGEWVLLSTFL

SEQ ID NO: 5730 - protein, 1241 aa, Artificial Sequence
  SARS-CoV-2/Netherlands/ZuidHolland_9/2020__EPI_ISL_414445 spike protein (1-1211)(K986P_V987P) Foldon construct
MFVFLVLLPLVSSQCVNLTTRTQLPPAYTNSFTRGVYYPDKVFRSSVLHSTQDLFLPFFSNVTWFHAIHVSGTNGTKRFDNPVLPFNDGVYFASTEKSNIIRGWIFGTTLDSKTQSLLIVNNATNVVIKVCEFQFCNDPFLGVYYHKNNKSWMESEFRVYSSANNCTFEYVSQPFLMDLEGKQGNFKNLREFVFKNIDGYFKIYSKHTPINLVRDLPQGFSALEPLVDLPIGINITRFQTLLALHRSYLTPGDSSSGWTAGAAAYYVGYLQPRTFLLKYNENGTITDAVDCALDPLSETKCTLKSFTVEKGIYQTSNFRVQPTESIVRFPNITNLCPFGEVFNATRFASVYAWNRKRISNCVADYSVLYNSASFSTFKCYGVSPTKLNDLCFTNVYADSFVIRGDEVRQIAPGQTGKIADYNYKLPDDFTGCVIAWNSNNLDSKVGGNYNYLYRLFRKSNLKPFERDISTEIYQAGSTPCNGVEGFNCYFPLQSYGFQPTNGVGYQPYRVVVLSFELLHAPATVCGPKKSTNLVKNKCVNFNFNGLTGTGVLTESNKKFLPFQQFGRDIADTTDAVRDPQTLEILDITPCSFGGVSVITPGTNTSNQVAVLYQGVNCTEVPVAIHADQLTPTWRVYSTGSNVFQTRAGCLIGAEHVNNSYECDIPIGAGICASYQTQTNSPRRARSVASQSIIAYTMSLGAENSVAYSNNSIAIPTNFTISVTTEILPVSMTKTSVDCTMYICGDSTECSNLLLQYGSFCTQLNRALTGIAVEQDKNTQEVFAQVKQIYKTPPIKDFGGFNFSQILPDPSKPSKRSFIEDLLFNKVTLADAGFIKQYGDCLGDIAARDLICVQKFNGLTVLPPLLTDEMIAQYTSALLAGTITSGWTFGAGAALQIPFAMQMAYRFNGIGVTQNVLYENQKLIANQFNSAIGKIQDSLSSTASALGKLQDVVNQNAQALNTLVKQLSSNFGAISSVLNDILSRLDPPEAEVQIDRLITGRLQSLQTYVTQQLIRAAEIRASANLAATKMSECVLGQSKRVDFCGKGYHLMSFPQSAPHGVVFLHVTYVPAQEKNFTTAPAICHDGKAHFPREGVFVSNGTHWFVTQRNFYEPQIITTDNTFVSGNCDVVIGIVNNTVYDPLQPELDSFKEELDKYFKNHTSPDVDLGDISGINASVVNIQKEIDRLNEVAKNLNESLIDLQELGKYEQYIKGGSGYIPEAPRDGQAYVRKDGEWVLLSTFL

SEQ ID NO: 5731 - protein, 1241 aa, Artificial Sequence
  SARS-CoV-2/Finland/FIN03032020A/2020__EPI_ISL_413602 spike protein (1-1211)(K986P_V987P) Foldon construct
MFVFLVLLPLVSSQCVNLTTRTQLPPAYTNSFTRGVYYPDKVFRSSVLHSTQDLFLPFFSNVTWFHAIHVSGTNGTKRFDNPVLPFNDGVYFASTEKSNIIRGWIFGTTLDSKTQSLLIVNNATNVVIKVCEFQFCNDPFLGVYYHKNNKSWMESEFRVYSSANNCTFEYVSQPFLMDLEGKQGNFKNLREFVFKNIDGYFKIYSKHTPINLVRDLPQGFSALEPLVDLPIGINITRFQTLLALHRSYLTPGDSSSGWTAGAAAYYVGYLQPRTFLLKYNENGTITDAVDCALDPLSETKCTLKSFTVEKGIYQTSNFRVQPTESIVRFPNITNLCPFGEVFNATRFASVYAWNRKRISNCVADYSVLYNSASFSTFKCYGVSPTKLNDLCFTNVYADSFVIRGDEVRQIAPGQTGKIADYNYKLPDDFTGCVISWNSNNLDSKVGGNYNYLYRLFRKSNLKPFERDISTEIYQAGSTPCNGVEGFNCYFPLQSYGFQPTNGVGYQPYRVVVLSFELLHAPATVCGPKKSTNLVKNKCVNFNFNGLTGTGVLTESNKKFLPFQQFGRDIADTTDAVRDPQTLEILDITPCSFGGVSVITPGTNTSNQVAVLYQGVNCTEVPVAIHADQLTPTWRVYSTGSNVFQTRAGCLIGAEHVNNSYECDIPIGAGICASYQTQTNSPRRARSVASQSIIAYTMSLGAENSVAYSNNSIAIPTNFTISVTTEILPVSMTKTSVDCTMYICGDSTECSNLLLQYGSFCTQLNRALTGIAVEQDKNTQEVFAQVKQIYKTPPIKDFGGFNFSQILPDPSKPSKRSFIEDLLFNKVTLADAGFIKQYGDCLGDIAARDLICAQKFNGLTVLPPLLTDEMIAQYTSALLAGTITSGWTFGAGAALQIPFAMQMAYRFNGIGVTQNVLYENQKLIANQFNSAIGKIQDSLSSTASALGKLQDVVNQNAQALNTLVKQLSSNFGAISSVLNDILSRLDPPEAEVQIDRLITGRLQSLQTYVTQQLIRAAEIRASANLAATKMSECVLGQSKRVDFCGKGYHLMSFPQSAPHGVVFLHVTYVPAQEKNFTTAPAICHDGKAHFPREGVFVSNGTHWFVTQRNFYEPQIITTDNTFVSGNCDVVIGIVNNTVYDPLQPELDSFKEELDKYFKNHTSPDVDLGDISGINASVVNIQKEIDRLNEVAKNLNESLIDLQELGKYEQYIKGGSGYIPEAPRDGQAYVRKDGEWVLLSTFL

SEQ ID NO: 5732 - protein, 1241 aa, Artificial Sequence
  SARS-CoV-2/France/GE1977/2020__EPI_ISL_414632 spike protein (1-1211)(K986P_V987P) Foldon construct
MFVFLVLLPLVSSQCVNLTTRTQLPPAYTNSFTRGVYYPDKVFRSSVLHSTQDLFLPFFSNVTWFHAIHVSGTNGTKRFDNPVLPFNDGVYFASTEKSNIIRGWIFGTTLDSKTQSLLIVNNATNVVIKVCEFQFCNDPFLGVYYHKNNKSWMESEFRVYSSANNCTFEYVSQPFLMDLEGKQGNFKNLREFVFKNIDGYFKIYSKHTPINLVRDLPQGFSALEPLVDLPIGINITRFQTLLALHRSYLTPGDSSSGWTAGAAAYYVGYLQPRTFLLKYNENGTITDAVDCALDPLSETKCTLKSFTVEKGIYQTSNFRVQPTESIVRFPNITNLCPFGEVFNATRFASVYAWNRKRISNCVADYSVLYNSASFSTFKCYGVSPTKLNDLCFTNVYADSFVIRGDEVRQIAPGQTGKIADYNYKLPDDFTGCVIAWNSNNLDSKVGGNYNYLYRLFRKSNLKPFERDISTEIYQAGSTPCNGVEGFNCYFPLQSYGFQPTNGVGYQPYRVVVLSFELLHAPATVCGPKKSTNLVKNKCVNFNFNGLTGTGVLTESNKKFLPFQQFGRDIADTTDAVRDPQTLEILDITPCSFGGVSVITPGTNTSNQVAVLYQGVNCTEVPVAIHADQLTPTWRVYSTGSNVFQTRAGCLIGAEHVNNSYECDIPIGAGICASYQTQTNSPRRARSVASQSIIAYTMSLGAENSVAYSNNSIAIPTNFTISVTTEILPVSMTKTSVDCTMYICGDSTECSNLLLQYGSFCTQLNRALTGIAVEQDKNTQEVFAQVKQIYKTPPIKDFGGFNFSQILPDPSKPSKRSFIEDLLFNKVTLADAGFIKQYGDCLGDIAARDLICAQKFNGLTVLPPLLTDEMIAQYTSALLAGTITSGWTFGAGAALQIPFAMQMAYRFNGIGVTQNVLYENQKLIANQFNSAIGKIQDSLFSTASALGKLQDVVNQNAQALNTLVKQLSSNFGAISSVLNDILSRLDPPEAEVQIDRLITGRLQSLQTYVTQQLIRAAEIRASANLAATKMSECVLGQSKRVDFCGKGYHLMSFPQSAPHGVVFLHVTYVPAQEKNFTTAPAICHDGKAHFPREGVFVSNGTHWFVTQRNFYEPQIITTDNTFVSGNCDVVIGIVNNTVYDPLQPELDSFKEELDKYFKNHTSPDVDLGDISGINASVVNIQKEIDRLNEVAKNLNESLIDLQELGKYEQYIKGGSGYIPEAPRDGQAYVRKDGEWVLLSTFL

SEQ ID NO: 5733 - protein, 1241 aa, Artificial Sequence
  SARS-CoV-2/Finland/FIN-313/2020__EPI_ISL_414641 spike protein (1-1211)(K986P_V987P) Foldon construct
MFVFLVLLPLVSSQCVNLTTRTQLPPAYTNSFTRGVYYPDKVFRSSVLHSTQDLFLPFFSNVTWFHAIHVSGTNGTKRFDNPVLPFNDGVYFASTEKSNIIRGWIFGTTLDSKTQSLLIVNNATNVVIKVCEFQFCNDPFLGVYYHKNNKSWMESEFRVYSSANNCTFEYVSQPFLMDLEGKQGNFKNLREFVFKNIDGYFKIYSKHTPINLVRDLPQGFSALEPLVDLPIGINITRFKTLLALHRSYLTPGDSSSGWTAGAAAYYVGYLQPRTFLLKYNENGTITDAVDCALDPLSETKCTLKSFTVEKGIYQTSNFRVQPTESIVRFPNITNLCPFGEVFNATRFASVYAWNRKRISNCVADYSVLYNSASFSTFKCYGVSPTKLNDLCFTNVYADSFVIRGDEVRQIAPGQTGKIADYNYKLPDDFTGCVIAWNSNNLDSKVGGNYNYLYRLFRKSNLKPFERDISTEIYQAGSTPCNGVEGFNCYFPLQSYGFQPTNGVGYQPYRVVVLSFELLHAPATVCGPKKSTNLVKNKCVNFNFNGLTGTGVLTESNKKFLPFQQFGRDIADTTDAVRDPQTLEILDITPCSFGGVSVITPGTNTSNQVAVLYQGVNCTEVPVAIHADQLTPTWRVYSTGSNVFQTRAGCLIGAEHVNNSYECDIPIGAGICASYQTQTNSPRRARSVASQSIIAYTMSLGAENSVAYSNNSIAIPTNFTISVTTEILPVSMTKTSVDCTMYICGDSTECSNLLLQYGSFCTQLNRALTGIAVEQDKNTQEVFAQVKQIYKTPPIKDFGGFNFSQILPDPSKPSKRSFIEDLLFNKVTLADAGFIKQYGDCLGDIAARDLICAQKFNGLTVLPPLLTDEMIAQYTSALLAGTITSGWTFGAGAALQIPFAMQMAYRFNGIGVTQNVLYENQKLIANQFNSAIGKIQDSLSSTASALGKLQDVVNQNAQALNTLVKQLSSNFGAISSVLNDILSRLDPPEAEVQIDRLITGRLQSLQTYVTQQLIRAAEIRASANLAATKMSECVLGQSKRVDFCGKGYHLMSFPQSAPHGVVFLHVTYVPAQEKNFTTAPAICHDGKAHFPREGVFVSNGTHWFVTQRNFYEPQIITTDNTFVSGNCDVVIGIVNNTVYDPLQPELDSFKEELDKYFKNHTSPDVDLGDISGINASVVNIQKEIDRLNEVAKNLNESLIDLQELGKYEQYIKGGSGYIPEAPRDGQAYVRKDGEWVLLSTFL

SEQ ID NO: 5734 - protein, 1241 aa, Artificial Sequence
  SARS-CoV-2/Netherlands/ZuidHolland_2/2020__EPI_ISL_414556 spike protein (1-1211)(K986P_V987P) Foldon construct
MFVFLVLLPLVSSQCVNLTTRTQLPPAYTNSFTRGVYYPDKVFRSSVLHSTQDLFLPFFSNVTWFHAIHVSGTNGTKRFDNPVLPFNDGVYFASTEKSNIIRGWIFGTTLDSKTQSLLIVNNATNVVIKVCEFQFCNDPFLGVYYHKNNKSWMESEFRVYSSANNCTFEYVSQPFLMDLEGKQGNFKNLREFVFKNIDGYFKIYSKHTPINLVRDLPQGFSALEPLVDLPIGINITRFQTLLALHRSYLTPGDSSSGWTAGAAAYYVGYLQPRTFLLKYNENGTITDAVDCALDPLSETKCTLKSFTVEKGIYQTSNFRVQPTESIVRFPNITNLCPFGEVFNATRFASVYAWNRKRISNCVADYSVLYNSASFSTFKCYGVSPTKLNDLCFTNVYADSFVIRGDEVRQIAPGQTGKIADYNYKLPDDFTGCVIAWNSNNLDSKVGGNYNYLYRLFRKSNLKPFERDISTEIYQAGSTPCNGVEGFNCYFPLQSYGFQPTNGVGYQPYRVVVLSFELLHAPATVCGPKKSTNLVKNKCVNFNFNGLTGTGVLTESNKKFLPFQQFGRDIADTTDAVRDPQTLEILDITPCSFGGVSVITPGTNTSNQVAVLYQGVNCTEVPVAIHADQLTPTWRVYSTGSNVFQTRAGCLIGAEHVNNSYECDIPIGAGICASYQTQTNSPRRARSVASQSIIAYTMSLGAENSVAYSNNSIAIPTNFTISVTTEILPVSMTKTSVDCTMYICGDSTECSNLLLQYGSFCTQLNRALTGIALEQDKNTQEVFAQVKQIYKTPPIKDFGGFNFSQILPDPSKPSKRSFIEDLLFNKVTLADAGFIKQYGDCLGDIAARDLICAQKFNGLTVLPPLLTDEMIAQYTSALLAGTITSGWTFGAGAALQIPFAMQMAYRFNGIGVTQNVLYENQKLIANQFNSAIGKIQDSLSSTASALGKLQDVVNQNAQALNTLVKQLSSNFGAISSVLNDILSRLDPPEAEVQIDRLITGRLQSLQTYVTQQLIRAAEIRASANLAATKMSECVLGQSKRVDFCGKGYHLMSFPQSAPHGVVFLHVTYVPAQEKNFTTAPAICHDGKAHFPREGVFVSNGTHWFVTQRNFYEPQIITTDNTFVSGNCDVVIGIVNNTVYDPLQPELDSFKEELDKYFKNHTSPDVDLGDISGINASVVNIQKEIDRLNEVAKNLNESLIDLQELGKYEQYIKGGSGYIPEAPRDGQAYVRKDGEWVLLSTFL

SEQ ID NO: 5735 - protein, 1241 aa, Artificial Sequence
  SARS-CoV-2/USA/WA-UW31/2020__EPI_ISL_414618 spike protein (1-1211)(K986P_V987P) Foldon construct
MFVFLVLLPLVSSQCVNLTTRTQLPPAYTNSFTRGVYYPDKVFRSSVLHSTQDLFLPFFSNVTWFHAIHVSGTNGTKRFDNPVLPFNDGVYFASTEKSNIIRGWIFGTTLDSKTQSLLIVNNATNVVIKVCEFQFCNDPFLGVYYHKNNKSWMESEFRVYSSANNCTFEYVSQPFLMDLEGKQGNFKNLREFVFKNIDGYFKIYSKHTPINLVRDLPQGFSALEPLVDLPIGINITRFQTLLALHRSYLTPGDSSSGWTAGAAAYYVGYLQPRTFLLKYNENGTITDAVDCALDPLSETKCTLKSFTVEKGIYQTSNFRVQPTESIVRFPNITNLCPFGEVFNATRFASVYAWNRKRISNCVADYSVLYNSASFSTFKCYGVSPTKLNDLCFTNVYADSFVIRGDEVRQIAPGQTGKIADYNYKLPDDFTGCVIAWNSNNLDSKVGGNYNYLYRLFRKSNLKPFERDISTEIYQAGSTPCNGAEGFNCYFPLQSYGFQPTNGVGYQPYRVVVLSFELLHAPATVCGPKKSTNLVKNKCVNFNFNGLTGTGVLTESNKKFLPFQQFGRDIADTTDAVRDPQTLEILDITPCSFGGVSVITPGTNTSNQVAVLYQDVNCTEVPVAIHADQLTPTWRVYSTGSNVFQTRAGCLIGAEHVNNSYECDIPIGAGICASYQTQTNSPRRARSVASQSIIAYTMSLGAENSVAYSNNSIAIPTNFTISVTTEILPVSMTKTSVDCTMYICGDSTECSNLLLQYGSFCTQLNRALTGIAVEQDKNTQEVFAQVKQIYKTPPIKDFGGFNFSQILPDPSKPSKRSFIEDLLFNKVTLADAGFIKQYGDCLGDIAARDLICAQKFNGLTVLPPLLTDEMIAQYTSALLAGTITSGWTFGAGAALQIPFAMQMAYRFNGIGVTQNVLYENQKLIANQFNSAIGKIQDSLSSTASALGKLQDVVNQNAQALNTLVKQLSSNFGAISSVLNDILSRLDPPEAEVQIDRLITGRLQSLQTYVTQQLIRAAEIRASANLAATKMSECVLGQSKRVDFCGKGYHLMSFPQSAPHGVVFLHVTYVPAQEKNFTTAPAICHDGKAHFPREGVFVSNGTHWFVTQRNFYEPQIITTDNTFVSGNCDVVIGIVNNTVYDPLQPELDSFKEELDKYFKNHTSPDVDLGDISGINASVVNIQKEIDRLNEVAKNLNESLIDLQELGKYEQYIKGGSGYIPEAPRDGQAYVRKDGEWVLLSTFL

SEQ ID NO: 5736 - protein, 1241 aa, Artificial Sequence
  SARS-CoV-2/South Korea/SNU01/2020__EPI_ISL_411929 spike protein (1-1211)(K986P_V987P) Foldon construct
MFVFLVLLPLVSSQCVNLTTRTQLPPAYTNSFTRGVYYPDKVFRSSVLHSTQDLFLPFFSNVTWFHAIHVSGTNGTKRFDNPVLPFNDGVYFASTEKSNIIRGWIFGTTLDSKTQSLLIVNNATNVVIKVCEFQFCNDPFLGVYYHKNNKSWMESEFRVYSSANNCTFEYVSQPFLMDLEGKQGNFKNLREFVFKNIDGYFKIYSKHTPINLVRDLPQGFWALEPLVDLPIGINITRFQTLLALHRSYLTPGDSSSGWTAGAAAYYVGYLQPRTFLLKYNENGTITDAVDCALDPLSETKCTLKSFTVEKGIYQTSNFRVQPTESIVRFPNITNLCPFGEVFNATRFASVYAWNRKRISNCVADYSVLYNSASFSTFKCYGVSPTKLNDLCFTNVYADSFVIRGDEVRQIAPGQTGKIADYNYKLPDDFTGCVIAWNSNNLDSKVGGNYNYLYRLFRKSNLKPFERDISTEIYQAGSTPCNGVEGFNCYFPLQSYGFQPTNGVGYQPYRVVVLSFELLHAPATVCGPKKSTNLVKNKCVNFNFNGLTGTGVLTESNKKFLPFQQFGRDIADTTDAVRDPQTLEILDITPCSFGGVSVITPGTNTSNQVAVLYQDVNCTEVPVAIHADQLTPTWRVYSTGSNVFQTRAGCLIGAEHVNNSYECDIPIGAGICASYQTQTNSPRRARSVASQSIIAYTMSLGAENSVAYSNNSIAIPTNFTISVTTEILPVSMTKTSVDCTMYICGDSTECSNLLLQYGSFCTQLNRALTGIAVEQDKNTQEVFAQVKQIYKTPPIKDFGGFNFSQILPDPSKPSKRSFIEDLLFNKVTLADAGFIKQYGDCLGDIAARDLICAQKFNGLTVLPPLLTDEMIAQYTSALLAGTITSGWTFGAGAALQIPFAMQMAYRFNGIGVTQNVLYENQKLIANQFNSAIGKIQDSLSSTASALGKLQDVVNQNAQALNTLVKQLSSNFGAISSVLNDILSRLDPPEAEVQIDRLITGRLQSLQTYVTQQLIRAAEIRASANLAATKMSECVLGQSKRVDFCGKGYHLMSFPQSAPHGVVFLHVTYVPAQEKNFTTAPAICHDGKAHFPREGVFVSNGTHWFVTQRNFYEPQIITTDNTFVSGNCDVVIGIVNNTVYDPLQPELDSFKEELDKYFKNHTSPDVDLGDISGINASVVNIQKEIDRLNEVAKNLNESLIDLQELGKYEQYIKGGSGYIPEAPRDGQAYVRKDGEWVLLSTFL

SEQ ID NO: 5737 - protein, 1241 aa, Artificial Sequence
  SARS-CoV-2/China/WF0004/2020__EPI_ISL_413694 spike protein (1-1211)(K986P_V987P) Foldon construct
MFVFLVLLPLVSSQCVNLTTRTQLPPAYTNSFTRGVYYPDKVFRSSVLHSTQDLFLPFFSNVTWFHAIHVSGTNGTKRFDNPVLPFNDGVYFASTEKSNIIRGWIFGTTLDSKTQSLLIVNNATNVVIKVCEFQFCNDPFLGVYYHKNNKSWTESEFRVYSSANNCTFEYVSQPFLMDLEGKQGNFKNLREFVFKNIDGYFKIYSKHTPINLVRDLPQGFSALEPLVDLPIGINITRFQTLLALHRSYLTPGDSSSGWTAGAAAYYVGYLQPRTFLLKYNENGTITDAVDCALDPLSETKCTLKSFTVEKGIYQTSNFRVQPTESIVRFPNITNLCPFGEVFNATRFASVYAWNRKRISNCVADYSVLYNSASFSTFKCYGVSPTKLNDLCFTNVYADSFVIRGDEVRQIAPGQTGKIADYNYKLPDDFTGCVIAWNSNNLDSKVGGNYNYLYRLFRKSNLKPFERDISTEIYQAGSTPCNGVEGFNCYFPLQSYGFQPTNGVGYQPYRVVVLSFELLHAPATVCGPKKSTNLVKNKCVNFNFNGLTGTGVLTESNKKFLPFQQFGRDIADTTDAVRDPQTLEILDITPCSFGGVSVITPGTNTSNQVAVLYQDVNCTEVPVAIHADQLTPTWRVYSTGSNVFQTRAGCLIGAEHVNNSYECDIPIGAGICASYQTQTNSPRRARSVASQSIIAYTMSLGAENSVAYSNNSIAIPTNFTISVTTEILPVSMTKTSVDCTMYICGDSTECSNLLLQYGSFCTQLNRALTGIAVEQDKNTQEVFAQVKQIYKTPPIKDFGGFNFSQILPDPSKPSKRSFIEDLLFNKVTLADAGFIKQYGDCLGDIAARDLICAQKFNGLTVLPPLLTDEMIAQYTSALLAGTITSGWTFGAGAALQIPFAMQMAYRFNGIGVTQNVLYENQKLIANQFNSAIGKIQDSLSSTASALGKLQDVVNQNAQALNTLVKQLSSNFGAISSVLNDILSRLDPPEAEVQIDRLITGRLQSLQTYVTQQLIRAAEIRASANLAATKMSECVLGQSKRFDFCGKGYHLMSFPQSAPHGVVFLHVTYVPAQEKNFTTAPAICHDGKAHFPREGVFVSNGTHWFVTQRNFYEPQIITTDNTFVSGNCDVVIGIVNNTVYDPLQPELDSFKEELDKYFKNHTSPDVDLGDISGINASVVNIQKEIDRLNEVAKNLNESLIDLQELGKYEQYIKGGSGYIPEAPRDGQAYVRKDGEWVLLSTFL

SEQ ID NO: 5738 - protein, 1241 aa, Artificial Sequence
  SARS-CoV-2/China/WF0028/2020__EPI_ISL_413791 spike protein (1-1211)(K986P_V987P) Foldon construct
MFVFLVLLPLVSSQCVNLTTRTQLPPAYTNSFTRGVYYPDKVFRSSVLHSTQDLFLPFFSNVTWFHAIHVSGTNGTKRFDNPVLPFNDGVYFASTEKSNIIRGWIFGTTLDSKTQSLLIVNNATNVVIKVCEFQFCNDPFLGVYYHKNNKSWMESEFRVYSSANNCTFEYVSQPFLMDLEGKQGNFKNLREFVFKNIDGYFKIYSKHTPINLVRDLPQGFSALEPLVDLPIGINITRFQTLLALHRSYLTPGDSSSGWTAGAAAYYVGYLQPRTFLLKYNENGTITDAVDCALDPLSETKCTLKSFTVEKGIYQTSNFRVQPTESIVRFPNITNLCPFGEVFNATRFASVYAWNRKRISNCVADYSVLYNSASFSTFKCYGVSPTKLNDLCFTNVYADSFVIRGDEVRQIAPGQTGKIADYNYKLPDDFTGCVIAWNSNNLDSKVGGNYNYLYRLFRKSNLKPFERDISTEIYQAGSTPCNGVEGFNCYFPLQSYGFQPTNGVGYQPYRVVVLSFELLHAPATVCGPKKSTNLVKNKCVNFNFNGLTGTGVLTESNKKFLPFQQFGRDIADTTDAVRDPQTLEILDITPCSFGGVSVITPGTNTSNQVAVLYQDVNCTEVPVAIHADQLTPTWRVYSTGSNVFQTRAGCLIGAEHVNNSYECDIPIGAGICASYQTQTNSPRRARSVASQSIIAYTMSLGAENSVAYSNNSIAIPTNFTISVTTEILPVSMTKTSVDCTMYICGDSTECSNLLLQYGSFCTQLNRALTGIAVEQDKNTQEVFAQVKQIYKTPPIKDFGGFNFSQILPDPSKPSKRSFIEDLLFNKVTLADAGFIKQYGDCLGDIAARDLICAQKFNGLTVLPPLLTDEMIAQYTSALLAGTITSGWTFGAGAALQIPFAMQMAYRFNGIGVTQNVLYENQKLIANQFNSAIGKIQDSLSSTASALGKLQDVVNQNAQALNTLVKQLSSNFGAISSVLNDILSRLDPPEAEVQIDRLITGRLQSLQTYVTQQLIRAAEIRASANLAATKMSECVLGQSKRVDFCGKGYHLMSFPQSAPHGVVFLHVTYVPAQEKNFTTAPAICHDGKAHFPREGVFVSNGTHWFVTQRNFYEPQIITTDNTFVSGNCDVVIGIVNNTVYDPLQPELESFKEELDKYFKNHTSPDVDLGDISGINASVVNIQKEIDRLNEVAKNLNESLIDLQELGKYEQYIKGGSGYIPEAPRDGQAYVRKDGEWVLLSTFL

SEQ ID NO: 5739 - protein, 1241 aa, Artificial Sequence
  SARS-CoV-2/2019-nCoV/USA-CruiseA-18/2020__MT159716.1 spike protein (1-1211)(K986P_V987P) Foldon construct
MFVFLVLLPLVSSQCVNLTTRTQLPPAYTNSFTRGVYYPDKVFRSSVLHSTQDLFLPFFSNVTWFHAIHVSGTNGTKRFDNPVLPFNDGVYFASTEKSNIIRGWIFGTTLDSKTQSLLIVNNATNVVIKVCEFQFCNDPFLGVYYHKNNKSWMESELRVYSSANNCTFEYVSQPFLMDLEGKQGNFKNLREFVFKNIDGYFKIYSKHTPINLVRDLPQGFSALEPLVDLPIGINITRFQTLLALHRSYLTPGDSSSGWTAGAAAYYVGYLQPRTFLLKYNENGTITDAVDCALDPLSETKCTLKSFTVEKGIYQTSNFRVQPTESIVRFPNITNLCPFGEVFNATRFASVYAWNRKRISNCVADYSVLYNSASFSTFKCYGVSPTKLNDLCFTNVYADSFVIRGDEVRQIAPGQTGKIADYNYKLPDDFTGCVIAWNSNNLDSKVGGNYNYLYRLFRKSNLKPFERDISTEIYQAGSTPCNGVEGFNCYFPLQSYGFQPTNGVGYQPYRVVVLSFELLHAPATVCGPKKSTNLVKNKCVNFNFNGLTGTGVLTESNKKFLPFQQFGRDIADTTDAVRDPQTLEILDITPCSFGGVSVITPGTNTSNQVAVLYQDVNCTEVPVAIHADQLTPTWRVYSTGSNVFQTRAGCLIGAEHVNNSYECDIPIGAGICASYQTQTNSPRRARSVASQSIIAYTMSLGAENSVAYSNNSIAIPTNFTISVTTEILPVSMTKTSVDCTMYICGDSTECSNLLLQYGSFCTQLNRALTGIAVEQDKNTQEVFAQVKQIYKTPPIKDFGGFNFSQILPDPSKPSKRSFIEDLLFNKVTLADAGFIKQYGDCLGDIAARDLICAQKFNGLTVLPPLLTDEMIAQYTSALLAGTITSGWTFGAGAALQIPFAMQMAYRFNGIGVTQNVLYENQKLIANQFNSAIGKIQDSLSSTASALGKLQDVVNQNAQALNTLVKQLSSNFGAISSVLNDILSRLDPPEAEVQIDRLITGRLQSLQTYVTQQLIRAAEIRASANLAATKMSECVLGQSKRVDFCGKGYHLMSFPQSAPHGVVFLHVTYVPAQEKNFTTAPAICHDGKAHFPREGVFVSNGTHWFVTQRNFYEPQIITTDNTFVSGNCDVVIGIVNNTVYDPLQPELDSFKEELDKYFKNHTSPDVDLGDISGINASVVNIQKEIDRLNEVAKNLNESLIDLQELGKYEQYIKGGSGYIPEAPRDGQAYVRKDGEWVLLSTFL

SEQ ID NO: 5740 - protein, 1241 aa, Artificial Sequence
  SARS-CoV-2/SARS-CoV-2/Yunnan-01/human/2020/CHN__MT049951.1 spike protein (1-1211)(K986P_V987P) Foldon construct
MFVFLVLLPLVSSQCVNLTTRTQLPPANTNSFTRGVYYPDKVFRSSVLHSTQDLFLPFFSNVTWFHAIHVSGTNGTKRFDNPVLPFNDGVYFASTEKSNIIRGWIFGTTLDSKTQSLLIVNNATNVVIKVCEFQFCNDPFLGVYYHKNNKSWMESEFRVYSSANNCTFEYVSQPFLMDLEGKQGNFKNLREFVFKNIDGYFKIYSKHTPINLVRDLPQGFSALEPLVDLPIGINITRFQTLLALHRSYLTPGDSSSGWTAGAAAYYVGYLQPRTFLLKYNENGTITDAVDCALDPLSETKCTLKSFTVEKGIYQTSNFRVQPTESIVRFPNITNLCPFGEVFNATRFASVYAWNRKRISNCVADYSVLYNSASFSTFKCYGVSPTKLNDLCFTNVYADSFVIRGDEVRQIAPGQTGKIADYNYKLPDDFTGCVIAWNSNNLDSKVGGNYNYLYRLFRKSNLKPFERDISTEIYQAGSTPCNGVEGFNCYFPLQSYGFQPTNGVGYQPYRVVVLSFELLHAPATVCGPKKSTNLVKNKCVNFNFNGLTGTGVLTESNKKFLPFQQFGRDIADTTDAVRDPQTLEILDITPCSFGGVSVITPGTNTSNQVAVLYQDVNCTEVPVAIHADQLTPTWRVYSTGSNVFQTRAGCLIGAEHVNNSYECDIPIGAGICASYQTQTNSPRRARSVASQSIIAYTMSLGAENSVAYSNNSIAIPTNFTISVTTEILPVSMTKTSVDCTMYICGDSTECSNLLLQYGSFCTQLNRALTGIAVEQDKNTQEVFAQVKQIYKTPPIKDFGGFNFSQILPDPSKPSKRSFIEDLLFNKVTLADAGFIKQYGDCLGDIAARDLICAQKFNGLTVLPPLLTDEMIAQYTSALLAGTITSGWTFGAGAALQIPFAMQMAYRFNGIGVTQNVLYENQKLIANQFNSAIGKIQDSLSSTASALGKLQDVVNQNAQALNTLVKQLSSNFGAISSVLNDILSRLDPPEAEVQIDRLITGRLQSLQTYVTQQLIRAAEIRASANLAATKMSECVLGQSKRVDFCGKGYHLMSFPQSAPHGVVFLHVTYVPAQEKNFTTAPAICHDGKAHFPREGVFVSNGTHWFVTQRNFYEPQIITTDNTFVSGNCDVVIGIVNNTVYDPLQPELDSFKEELDKYFKNHTSPDVDLGDISGINASVVNIQKEIDRLNEVAKNLNESLIDLQELGKYEQYIKGGSGYIPEAPRDGQAYVRKDGEWVLLSTFL

SEQ ID NO: 5741 - protein, 1241 aa, Artificial Sequence
  SARS-CoV-2/USA/WA-UW292/2020__EPI_ISL_418077 spike protein (1-1211)(K986P_V987P) Foldon construct
MFVFLVLLPLVSSQCVNLTTRTQLPPAYTNSFTRGVYYPDKVFRSSVLHSTQDLFLPFFSNVTWFHAIHVSGTNGTKRFDNPVLPFNDGVYFASTEKSNIIRGWIFGTTLDSKTQSLLIVNNATNVVIKVCEFQFCNDPFLGVYYHKNNKSWMESEFRVYSSANNCTFEYVSQPFLMDLEGKQGNFKNLREFVFKNIDGYFKIYSKHTPINLVRDLPQGFSALEPLVDLPIGINITRFQTLLALHRSYLTPGDSSSGWTAGAAAYYVGYLQPRTFLLKYNENGTITDAVDCALDPLSETKCTLKSFTVEKGIYQTSNFRVQPTESIVRFPNITNLCPFGEVFNATRFASVYAWNRKRISNCVADYSVLYNSASFSTFKCYGVSPTKLNDLCFTNVYADSFVIRGDEVRQIAPGQTGKIADYNYKLPDDFTGCVIAWNSNNLDSKVGGNYNYLYRLFRKSNLKPFERDISTEIYQASSTPCNGVEGFNCYFPLQSYGFQPTNGVGYQPYRVVVLSFELLHAPATVCGPKKSTNLVKNKCVNFNFNGLTGTGVLTESNKKFLPFQQFGRDIADTTDAVRDPQTLEILDITPCSFGGVSVITPGTNTSNQVAVLYQDVNCTEVPVAIHADQLTPTWRVYSTGSNVFQTRAGCLIGAEHVNNSYECDIPIGAGICASYQTQTNSPRRARSVASQSIIAYTMSLGAENSVAYSNNSIAIPTNFTISVTTEILPVSMTKTSVDCTMYICGDSTECSNLLLQYGSFCTQLNRALTGIAVEQDKNTQEVFAQVKQIYKTPPIKDFGGFNFSQILPDPSKPSKRSFIEDLLFNKVTLADAGFIKQYGDCLGDIAARDLICAQKFNGLTVLPPLLTDEMIAQYTSALLAGTITSGWTFGAGAALQIPFAMQMAYRFNGIGVTQNVLYENQKLIANQFNSAIGKIQDSLSSTASALGKLQDVVNQNAQALNTLVKQLSSNFGAISSVLNDILSRLDPPEAEVQIDRLITGRLQSLQTYVTQQLIRAAEIRASANLAATKMSECVLGQSKRVDFCGKGYHLMSFPQSAPHGVVFLHVTYVPAQEKNFTTAPAICHDGKAHFPREGVFVSNGTHWFVTQRNFYEPQIITTDNTFVSGNCDVVIGIVNNTVYDPLQPELDSFKEELDKYFKNHTSPDVDLGDISGINASVVNIQKEIDRLNEVAKNLNESLIDLQELGKYEQYIKGGSGYIPEAPRDGQAYVRKDGEWVLLSTFL

SEQ ID NO: 5742 - protein, 1241 aa, Artificial Sequence
  SARS-CoV-2/Iceland/192/2020__EPI_ISL_417819 spike protein (1-1211)(K986P_V987P) Foldon construct
MFVFFVLLPLVSSQCVNLTTRTQLPPAYTNSFTRGVYYPDKVFRSSVLHSTQDLFLPFFSNVTWFHAIHVSGTNGTKRFDNPVLPFNDGVYFASTEKSNIIRGWIFGTTLDSKTQSLLIVNNATNVVIKVCEFQFCNDPFLGVYYHKNNKSWMESEFRVYSSANNCTFEYVSQPFLMDLEGKQGNFKNLREFVFKNIDGYFKIYSKHTPINLVRDLPQGFSALEPLVDLPIGINITRFQTLLALHRSYLTPGDSSSGWTAGAAAYYVGYLQPRTFLLKYNENGTITDAVDCALDPLSETKCTLKSFTVEKGIYQTSNFRVQPTESIVRFPNITNLCPFGEVFNATRFASVYAWNRKRISNCVADYSVLYNSASFSTFKCYGVSPTKLNDLCFTNVYADSFVIRGDEVRQIAPGQTGKIADYNYKLPDDFTGCVIAWNSNNLDSKVGGNYNYLYRLFRKSNLKPFERDISTEIYQAGSTPCNGVEGFNCYFPLQSYGFQPTNGVGYQPYRVVVLSFELLHAPATVCGPKKSTNLVKNKCVNFNFNGLTGTGVLTESNKKFLPFQQFGRDIADTTDAVRDPQTLEILDITPCSFGGVSVITPGTNTSNQVAVLYQGVNCTEVPVAIHADQLTPTWRVYSTGSNVFQTRAGCLIGAEHVNNSYECDIPIGAGICASYQTQTNSPRRARSVASQSIIAYTMSLGAENSVAYSNNSIAIPTNFTISVTTEILPVSMTKTSVDCTMYICGDSTECSNLLLQYGSFCTQLNRALTGIAVEQDKNTQEVFAQVKQIYKTPPIKDFGGFNFSQILPDPSKPSKRSFIEDLLFNKVTLADAGFIKQYGDCLGDIAARDLICAQKFNGLTVLPPLLTDEMIAQYTSALLAGTITSGWTFGAGAALQIPFAMQMAYRFNGIGVTQNVLYENQKLIANQFNSAIGKIQDSLSSTASALGKLQDVVNQNAQALNTLVKQLSSNFGAISSVLNDILSRLDPPEAEVQIDRLITGRLQSLQTYVTQQLIRAAEIRASANLAATKMSECVLGQSKRVDFCGKGYHLMSFPQSAPHGVVFLHVTYVPAQEKNFTTAPAICHDGKAHFPREGVFVSNGTHWFVTQRNFYEPQIITTDNTFVSGNCDVVIGIVNNTVYDPLQPELDSFKEELDKYFKNHTSPDVDLGDISGINASVVNIQKEIDRLNEVAKNLNESLIDLQELGKYEQYIKGGSGYIPEAPRDGQAYVRKDGEWVLLSTFL

SEQ ID NO: 5743 - protein, 1241 aa, Artificial Sequence
  SARS-CoV-2/Belgium/ULG-6939/2020__EPI_ISL_417020 spike protein (1-1211)(K986P_V987P) Foldon construct
MFVFLVLLPLVSSQCVNLTTRTQLPPAYTNSFTRGVYYPDKVFRSSVLHSTQDLFLPFFSNVTWFHAIHVSGTNGTKRFDNPVLPFNDGVYFASTEKSNIIRGWIFGTTLDSKTQSLLIVNNATNVVIKVCEFQFCNDPFLGVYYHKNNKSWMESEFRVYSSANNCTFEYVSQPFLMDLEGKQGNFKNLREFVFKNIDGYFKIYSKHTPINLVRDLPQGFSALEPLVDLPIGINITRFQTLLALHRSYLTPGDSSSGWTAGAAAYYVGYLQPRTFLLKYNENGTITDAVDCALDPLSETKCTLKSFTVEKGIYQTSNFRVQPTESIVRFPNITNLCPFGEVFNATRFASVYAWNRKRISNCVADYSVLYNSASFSTFKCYGVSPTKLNDLCFTNVYADSFVIRGDEVRQIAPGQTGKIADYNYKLPDDFTGCVIAWNSNNLDSKVGGNYNYLYRLFRKSNLKPFERDISTEIYQAGSTPCNGVEGFNCYFPLQSYGFQPTNGVGYQPYRVVVLSFELLHAPATVCGPKKSTNLVKNKCVNFNFNGLTGTGVLTESNKKFLPFQQFGRDIADTTDAVRDPQTLEILDITPCSFGGVSVITPGTNTSNQVAVLYQGVNCTEVPVAIHADQLTPTWRVYSTGSNVFQTRAGCLIGAEHVNNSYECDIPIGAGICASYQTQTNSPRRARSVASQSIIAYTMSLGAENSVVYSNNSIAIPTNFTISVTTEILPVSMTKTSVDCTMYICGDSTECSNLLLQYGSFCTQLNRALTGIAVEQDKNTQEVFAQVKQIYKTPPIKDFGGFNFSQILPDPSKPSKRSFIEDLLFNKVTLADAGFIKQYGDCLGDIAARDLICAQKFNGLTVLPPLLTDEMIAQYTSALLAGTITSGWTFGAGAALQIPFAMQMAYRFNGIGVTQNVLYENQKLIANQFNSAIGKIQDSLSSTASALGKLQDVVNQNAQALNTLVKQLSSNFGAISSVLNDILSRLDPPEAEVQIDRLITGRLQSLQTYVTQQLIRAAEIRASANLAATKMSECVLGQSKRVDFCGKGYHLMSFPQSAPHGVVFLHVTYVPAQEKNFTTAPAICHDGKAHFPREGVFVSNGTHWFVTQRNFYEPQIITTDNTFVSGNCDVVIGIVNNTVYDPLQPELDSFKEELDKYFKNHTSPDVDLGDISGINASVVNIQKEIDRLNEVAKNLNESLIDLQELGKYEQYIKGGSGYIPEAPRDGQAYVRKDGEWVLLSTFL

SEQ ID NO: 5744 - protein, 1241 aa, Artificial Sequence
  SARS-CoV-2/France/HF2496/2020__EPI_ISL_418231 spike protein (1-1211)(K986P_V987P) Foldon construct
MFVFLVLLPLVSSQCVNLTTRTQLPPAYTNSFTRGVYYPDKVFRSSVLHSTQDLFLPFFSNVTWFHAIHVSGTNGTKRFDNPVLPFNDGVYFASTEKSNIIRGWIFGTTLDSKTQSLLIVNNATNVVIKVCEFQFCNDPFLGVYYHKNNKSWMESEFRVYSSANNCTFEYVSQPFLMDLEGKQGNFKNLREFVFKNIDGYFKIYSKHTPINLVRDLPQGFSALEPLVDLPIGINITRFQTLLALHRSYLTPGDSSSGWTAGAAAYYVGYLQPRTFLLKYNENGTITDAVDCALDPLSETKCTLKSFTVEKGIYQTSNFRVQPTESIVRFPNITNLCPFGEVFNATRFASVYAWNRKRISNCVADYSVLYNSASFSTFKCYGVSPTKLNDLCFTNVYADSFVIRGDEVRQIAPGQTGKIADYNYKLPDDFTGCVIAWNSNNLDSKVGGNYNYLYRLFRKSNLKPFERDISTEIYQAGSTPCNGVEGFNCYFPLQSYGFQPTNGVGYQPYRVVVLSFELLHAPATVCGPKKSTNLVKNKCVNFNFNGLTGTGVLTESNKKFLPFQQFGRDIADTTDAVRDPQTLEILDITPCSFGGVSVITPGTNTSNQVAVLYQGVNCTEVPVAIHADQLTPTWRVYSTGSNVFQTRAGCLIGAEHVNNSYECDIPIGAGICASYQTQTNSPRRARSVASQSIIAYTMSLGAENSVAYSNNSIAIPTNFTISVTTEILPVSMTKTSVDCTMYICGDSTECSNLLLQYGSFCTQLNRALTGIAVEQDKNTQEVFAQVKQIYKTPPIKDFGGFNFSQILPDPSKPSKRSFIEDLLFNKVTLADAGFIKQYGDCLGDIVARDLICAQKFNGLTVLPPLLTDEMIAQYTSALLAGTITSGWTFGAGAALQIPFAMQMAYRFNGIGVTQNVLYENQKLIANQFNSAIGKIQDSLSSTASALGKLQDVVNQNAQALNTLVKQLSSNFGAISSVLNDILSRLDPPEAEVQIDRLITGRLQSLQTYVTQQLIRAAEIRASANLAATKMSECVLGQSKRVDFCGKGYHLMSFPQSAPHGVVFLHVTYVPAQEKNFTTAPAICHDGKAHFPREGVFVSNGTHWFVTQRNFYEPQIITTDNTFVSGNCDVVIGIVNNTVYDPLQPELDSFKEELDKYFKNHTSPDVDLGDISGINASVVNIQKEIDRLNEVAKNLNESLIDLQELGKYEQYIKGGSGYIPEAPRDGQAYVRKDGEWVLLSTFL

SEQ ID NO: 5745 - protein, 1241 aa, Artificial Sequence
  SARS-CoV-2/USA/WA-UW291/2020__EPI_ISL_418076 spike protein (1-1211)(K986P_V987P) Foldon construct
MFVFLVLLPLVSSQCVNLTTRTQLPPAYTNSFTRGVYYPDKVFRSSVLHSTQDLFLPFFSNVTWFHAIHVSGTNGTKRFDNPVLPFNDGVYFASTEKSNIIRGWIFGTTLDSKTQSLLIVNNATNVVIKVCEFQFCNDPFLGVYYHKNNKSWMESEFRVYSSANNCTFEYVSQPFLMDLEGKQGNFKNLREFVFKNIDGYFKIYSKHTPINLVRDLPQGFSALEPLVDLPIGINITRFQTLLALHRSYLTPGDSSSGWTAGAAAYYVGYLQPRTFLLKYNENGTITDAVDCALDPLSETKCTLKSFTVEKGIYQTSNFRVQPTESIVRFPNITNLCPFGEVFNATRFASVYAWNRKRISNCVADYSVLYNSASFSTFKCYGVSPTKLNDLCFTNVYADSFVIRGDEVRQIAPGQTGKIADYNYKLPDDFTGCVIAWNSNNLDSKVGGNYNYLYRLFRKSNLKPFERDISTEIYQAGSTPCNGVEGFNCYFPLQSYGFQPTNGVGYQPYRVVVLSFELLHAPATVCGPKKSTNLVKNKCVNFNFNGLTGTGVLTESNKKFLPFQQFGRDIADTTDAVRDPQTLEILDITPCSFGGVSVITPGTNTSNQVAVLYQGVNCTEVPVAIHADQLTPTWRVYSTGSNVFQTRAGCLIGAEHVNNSYECDIPIGAGICASYQTQTNSPRRARSVASQSIIAYTMSLGAENSVAYSNNSIAIPTNFTISVTTEILPVSMTKTSVDCTMYICGDSTECSNLLLQYGSFCTQLNRALTGIAVEQDKNTQEVFAQVKQIYKTPPIKDFGGFNFSQILPDPSKPSKRSFIEDLLFNKVTLADAGFIKQYGDCLGDIAARDLICAQKFNGLTVLPPLLTDEMIAQYTSALLAGTITSGWTFGAGAALQIPFAMQMAYRFNGIGVTQNVLYENQKLIANQFNSAIGKIQYSLSSTASALGKLQDVVNQNAQALNTLVKQLSSNFGAISSVLNDILSRLDPPEAEVQIDRLITGRLQSLQTYVTQQLIRAAEIRASANLAATKMSECVLGQSKRVDFCGKGYHLMSFPQSAPHGVVFLHVTYVPAQEKNFTTAPAICHDGKAHFPREGVFVSNGTHWFVTQRNFYEPQIITTDNTFVSGNCDVVIGIVNNTVYDPLQPELDSFKEELDKYFKNHTSPDVDLGDISGINASVVNIQKEIDRLNEVAKNLNESLIDLQELGKYEQYIKGGSGYIPEAPRDGQAYVRKDGEWVLLSTFL

SEQ ID NO: 5746 - protein, 1241 aa, Artificial Sequence; identical to SEQ ID NO: 111
  SARS-CoV-2/Portugal/PT0034/2020__EPI_ISL_418019 spike protein (1-1211)(K986P_V987P) Foldon construct

SEQ ID NO: 5747 - protein, 1241 aa, Artificial Sequence
  SARS-CoV-2/Iceland/202/2020__EPI_ISL_417750 spike protein (1-1211)(K986P_V987P) Foldon construct
MFVFLVLLPLVSSQCVNLTTRTQLPPAYTNSFTRGVYYPDKVFRSSVLHSTQDLFLPFFSNVTWFHAIHVSGTNGTKRFDNPVLPFNDGVYFASTEKSNIIRGWIFGTTLDSKTQSLLIVNNATNVVIKVCEFQFCNDPFLGVYYHKNNKSWMESEFRVYSSANNCTFEYVSQPFLMDLEGKQGNFKNLREFVFKNIDGYFKIYSKHTPINLVRDLPQGFSALEPLVDLPIGINITRFQTLLALHRSYLTPGDSSSGWTAGAAAYYVGYLQPRTFLLKYNENGTITDAVDCALDPLSETKCTLKSFTVEKGIYQTSNFRVQPTESIVRFPNITNLCPFGEVFNATRFASVYAWNRKRISNCVADYSVLYNSASFSTFKCYGVSPTKLNDLCFTNVYADSFVIRGDEVRQIAPGQTGKIADYNYKLPDDFTGCVIAWNSNNLDSKVGGNYNYLYRLFRKSNLKPFERDISTEIYQAGSTPCNGVEGFNCYFPLQSYGFQPTNGVGYQPYRVVVLSFELLHAPATVCGPKKSTNLVKNKCVNFNFNGLTGTGVLTESNKKFLPFQQFGRDIADTTDAVRDPQTLEILDITPCSFGGVSVITPGTNTSNQVAVLYQDVNCTEVPVAIHADQLTPTWRVYSTGSNVFQTRAGCLIGAEHVNNSYECDIPIGAGICASYQTQTNSPRRARSVASQSIIAYTMSLGAENSVAYSNNSIAIPTNFTISVTTEILPVSMTKTSVDCTMYICGDSTECSNLLLQYGSFCTQLNRALTGIAVEQDKNTQEVFAQVKQIYKTPPIKDFGGFNFSQILPDPSKPSKRSFIEDLLFNKVTLADAGFIKQYGDCLGDIAARDLICAQKFNGLTVLPPLLTDEMIAQYTSALLAGTITSGWTFGAGAALQIPFAMQMAYRFNGIGVTQNVLYENQKLIANQFNSAIGKIQDSLSSTASALGKLQDVVNQNAQALNTLVKQLSSNFGAISSVLNDILSRLDPPEAEVQIDRLITGRLQSLQTYVTQQLIRAAEIRASANLAATKMSECVLGQSKRVDFCGKGYHLMSFPQSAPHGVVFLHVTYVPAQEKNFTTAPAICHDGKAHFPREGVFVSNGTHWFVTQRNFYEPQIITTDNTFVSGNCDVVIGIVNNTVYDPLQPELDSFKEELDKYFKNHTSPDVDLGDIPGINASVVNIQKEIDRLNEVAKNLNESLIDLQELGKYEQYIKGGSGYIPEAPRDGQAYVRKDGEWVLLSTFL

SEQ ID NO: 5748 - protein, 1241 aa, Artificial Sequence
  SARS-CoV-2/USA/WA-UW261/2020__EPI_ISL_418046 spike protein (1-1211)(K986P_V987P) Foldon construct
MFVFLVLLPLVSSQCVNLTTRTQLPPAYTNSFTRGVYYPDKVFRSSVLHSTQDLFLPFFSNVTWFHAIHVSGTNGTKRFDNPVLPFNDGVYFASTEKSNIIRGWIFGTTLDSKTQSLLIVNNATNVVIKVCEFQFCNDPFLGVYYHKNNKSWMESEFRVYSSANNCTFEYVSQPFLMDLEGKQGNFKNLREFVFKNIDGYFKIYSKHTPINLVRDLPQGFSALEPLVDLPIGINITRFQTLLALHRSYLTPGDSSSGWTAGAAAYYVGYLQPRTFLLKYNENGTITDAVDCALDPLSETKCTLKSFTVEKGIYQTSNFRVQPTESIVRFPNITNLCPFGEVFNATRFTSVYAWNRKRISNCVADYSVLYNSASFSTFKCYGVSPTKLNDLCFTNVYADSFVIRGDEVRQIAPGQTGKIADYNYKLPDDFTGCVIAWNSNNLDSKVGGNYNYLYRLFRKSNLKPFERDISTEIYQAGSTPCNGVEGFNCYFPLQSYGFQPTNGVGYQPYRVVVLSFELLHAPATVCGPKKSTNLVKNKCVNFNFNGLTGTGVLTESNKKFLPFQQFGRDIADTTDAVRDPQTLEILDITPCSFGGVSVITPGTNTSNQVAVLYQDVNCTEVPVAIHADQLTPTWRVYSTGSNVFQTRAGCLIGAEHVNNSYECDIPIGAGICASYQTQTNSPRRARSVASQSIIAYTMSLGAENSVAYSNNSIAIPTNFTISVTTEILPVSMTKTSVDCTMYICGDSTECSNLLLQYGSFCTQLNRALTGIAVEQDKNTQEVFAQVKQIYKTPPIKDFGGFNFSQILPDPSKPSKRSFIEDLLFNKVTLADAGFIKQYGDCLGDIAARDLICAQKFNGLTVLPPLLTDEMIAQYTSALLAGTITSGWTFGAGAALQIPFAMQMAYRFNGIGVTQNVLYENQKLIANQFNSAIGKIQDSLSSTASALGKLQDVVNQNAQALNTLVKQLSSNFGAISSVLNDILSRLDPPEAEVQIDRLITGRLQSLQTYVTQQLIRAAEIRASANLAATKMSECVLGQSKRVDFCGKGYHLMSFPQSAPHGVVFLHVTYVPAQEKNFTTAPAICHDGKAHFPREGVFVSNGTHWFVTQRNFYEPQIITTDNTFVSGNCDVVIGIVNNTVYDPLQPELDSFKEELDKYFKNHTSPDVDLGDISGINASVVNIQKEIDRLNEVAKNLNESLIDLQELGKYEQYIKGGSGYIPEAPRDGQAYVRKDGEWVLLSTFL

SEQ ID NO: 5749 - protein, 1241 aa, Artificial Sequence
  SARS-CoV-2/Portugal/PT0035/2020__EPI_ISL_418020 spike protein (1-1211)(K986P_V987P) Foldon construct
MFVFLVLLPLVSSQCVNLTTRTQLPPAYTNSFTRGVYYPDKVFRSSVLHSTQDLFLPFFSNVTWFHAIHVSGTNGTKRFDNPVLPFNDGVYFASTEKSNIIRGWIFGTTLDSKTQSLLIVNNATNVVIKVCEFQFCNDPFLGVYYHKNNKSWMESEFRVYSSANNCTFEYVSQPFLMDLEGKQGNFKNLREFVFKNIDGYFKIYSKHTPINLVRDLPQGFSALEPLVDLPIGINITRFQTLLALHRSYLTPGDSSSGWTAGAAAYYVGYLQPRTFLLKYNENGTITDAVDCALDPLSETKCTLKSFTVEKGIYQTSNFRVQPTESIVRFPNITNLCPFGEVFNATRFASVYAWNRKRISNCVADYSVLYNSASFSTFKCYGVSPTKLNDLCFTNVYADSFVIRGDEVRQIAPGQTGKIADYNYKLPDDFTGCVIAWNSNNLDSKVGGNYNYLYRLFRKSNLKPFERDISTEIYQAGSTPCNGVEGFNCYFPLQSYGFQPTNGVGYQPYRVVVLSFELLHAPATVCGPKKSTNLVKNKCVNFNFNGLTGTGVLTESNKKFLPFQQFGRDIADTTDAVRDPQTLEILDITPCSFGGVSVITPGTNTSNQVAVLYQDVNCTEVPVAIHADQLTPTWRVYSTGSNVFQTRAGCLIGAEHVNNSYECDIPIGAGICASYQTQTNSPRRARSVASQSIIAYTMSLGAENSVAYSNNSIAIPTNFTISVTTEILPVSMTKTSVDCTMYICGDSTECSNLLLQYGSFCTQLNRALTGIAVEQDKNTQEVFAQVKQIYKTPPIKDFGGFNFSQILPDPSKPSKRSFIEDLLFNKVTLADAGFIKQYGDCLGDISARDLICAQKFNGLTVLPPLLTDEMIAQYTSALLAGTITSGWTFGAGAALQIPFAMQMAYRFNGIGVTQNVLYENQKLIANQFNSAIGKIQDSLSSTASALGKLQDVVNQNAQALNTLVKQLSSNFGAISSVLNDILSRLDPPEAEVQIDRLITGRLQSLQTYVTQQLIRAAEIRASANLAATKMSECVLGQSKRVDFCGKGYHLMSFPQSAPHGVVFLHVTYVPAQEKNFTTAPAICHDGKAHFPREGVFVSNGTHWFVTQRNFYEPQIITTDNTFVSGNCDVVIGIVNNTVYDPLQPELDSFKEELDKYFKNHTSPDVDLGDISGINASVVNIQKEIDRLNEVAKNLNESLIDLQELGKYEQYIKGGSGYIPEAPRDGQAYVRKDGEWVLLSTFL

SEQ ID NO: 5750 - protein, 1241 aa, Artificial Sequence
  SARS-CoV-2/USA/NY-NYUMC7/2020__EPI_ISL_418192 spike protein (1-1211)(K986P_V987P) Foldon construct
MFVFLVLLPLVSSQCVNLTTRTQLPPAYTNSFTRGVYYPDKVFRSSVLHSTQDLFLPFFSNVTWFHAIHVSGTNGTKRFDNPVLPFNDGVYFASTEKSNIIRGWIFGTTLDSKTQSLLIVNNATNVVIKVCEFQFCNDPFLGVYHHKNNKSWMESEFRVYSSANNCTFEYVSQPFLMDLEGKQGNFKNLREFVFKNIDGYFKIYSKHTPINLVRDLPQGFSALEPLVDLPIGINITRFQTLLALHRSYLTPGDSSSGWTAGAAAYYVGYLQPRTFLLKYNENGTITDAVDCALDPLSETKCTLKSFTVEKGIYQTSNFRVQPTESIVRFPNITNLCPFGEVFNATRFASVYAWNRKRISNCVADYSVLYNSASFSTFKCYGVSPTKLNDLCFTNVYADSFVIRGDEVRQIAPGQTGKIADYNYKLPDDFTGCVIAWNSNNLDSKVGGNYNYLYRLFRKSNLKPFERDISTEIYQAGSTPCNGVEGFNCYFPLQSYGFQPTNGVGYQPYRVVVLSFELLHAPATVCGPKKSTNLVKNKCVNFNFNGLTGTGVLTESNKKFLPFQQFGRDIADTTDAVRDPQTLEILDITPCSFGGVSVITPGTNTSNQVAVLYQGVNCTEVPVAIHADQLTPTWRVYSTGSNVFQTRAGCLIGAEHVNNSYECDIPIGAGICASYQTQTNSPRRARSVASQSIIAYTMSLGAENSVAYSNNSIAIPTNFTISVTTEILPVSMTKTSVDCTMYICGDSTECSNLLLQYGSFCTQLNRALTGIAVEQDKNTQEVFAQVKQIYKTPPIKDFGGFNFSQILPDPSKPSKRSFIEDLLFNKVTLADAGFIKQYGDCLGDIAARDLICAQKFNGLTVLPPLLTDEMIAQYTSALLAGTITSGWTFGAGAALQIPFAMQMAYRFNGIGVTQNVLYENQKLIANQFNSAIGKIQDSLSSTASALGKLQDVVNQNAQALNTLVKQLSSNFGAISSVLNDILSRLDPPEAEVQIDRLITGRLQSLQTYVTQQLIRAAEIRASANLAATKMSECVLGQSKRVDFCGKGYHLMSFPQSAPHGVVFLHVTYVPAQEKNFTTAPAICHDGKAHFPREGVFVSNGTHWFVTQRNFYEPQIITTDNTFVSGNCDVVIGIVNNTVYDPLQPELDSFKEELDKYFKNHTSPDVDLGDISGINASVVNIQKEIDRLNEVAKNLNESLIDLQELGKYEQYIKGGSGYIPEAPRDGQAYVRKDGEWVLLSTFL

SEQ ID NO: 5751 - protein, 1241 aa, Artificial Sequence
  SARS-CoV-2/Iceland/189/2020__EPI_ISL_417709 spike protein (1-1211)(K986P_V987P) Foldon construct
MFVFLVLLPLVSSQCVNLTTRTQLPPAYTNSFTRGVYYPDKVFRSSVLHSTQDLFLPFFSNVTWFHAIHVSGTNGTKRFDNPVLPFNDGVYFASTEKSNIIRGWIFGTTLDSKTQSLLIVNNATNVVIKVCEFQFCNDPFLGVYYHKNNKSWMESEFRVYSSANNCTFEYVSQPFLMDLEGKQGNFKNLREFVFKNIDGYFKIYSKHTPINLVRDLPQGFSALEPLVDLPIGINITRFQTLLALHRSYLTPGDSSSGWTAGAAAYYVGYLQPRTFLLKYNENGTITDAVDCALDPLSETKCTLKSFTVEKGIYQTSNFRVQPTESIVRFPNITNLCPFGEVFNATRFASVYAWNRKRISNCVADYSVLYNSASFSTFKCYGVSPTKLNDLCFTNVYADSFVIRGDEVRQIAPGQTGKIADYNYKLPDDFTGCVIAWNSNNLDSKVGGNYNYLYRLFRKSNLKPFERDISTEIYQAGSTPCNGVEGFNCYFPLQSYGFQPTNGVGYQPYRVVVLSFELLHAPATVCGPKKSTNLVKNKCVNFNFNGLTGTGVLTESNKKFLPFQQFGRDIADTTDAVRDPQTLEILDITPCSFGGVSVITPGTNTSNQVAVLYQGVNCTEVPVAIHADQLTPTWRVYSTGSNVFQTRAGCLIGAEHVNNSYECDIPIGAGICASYQTQTNSPRRARSVASQSIIAYTMSLGAENSVAYSNNSIAIPTNFTISVTTEILPVSMTKTSVDCTMYICGDSTECSNLLLQYGSFCTQLNRALTGIAVEQDKNTQEVFAQVKQIYKTPPIKDFGGFNFSQILPDPSKPSKRSFIEDLLFNKVTLADAGFTKQYGDCLGDIAARDLICAQKFNGLTVLPPLLTDEMIAQYTSALLAGTITSGWTFGAGAALQIPFAMQMAYRFNGIGVTQNVLYENQKLIANQFNSAIGKIQDSLSSTASALGKLQDVVNQNAQALNTLVKQLSSNFGAISSVLNDILSRLDPPEAEVQIDRLITGRLQSLQTYVTQQLIRAAEIRASANLAATKMSECVLGQSKRVDFCGKGYHLMSFPQSAPHGVVFLHVTYVPAQEKNFTTAPAICHDGKAHFPREGVFVSNGTHWFVTQRNFYEPQIITTDNTFVSGNCDVVIGIVNNTVYDPLQPELDSFKEELDKYFKNHTSPDVDLGDISGINASVVNIQKEIDRLNEVAKNLNESLIDLQELGKYEQYIKGGSGYIPEAPRDGQAYVRKDGEWVLLSTFL

SEQ ID NO: 5752 - protein, 1241 aa, Artificial Sequence
  SARS-CoV-2/Australia/NSW56/2020__EPI_ISL_417408 spike protein (1-1211)(K986P_V987P) Foldon construct
MFVFLVLLPLVSSQCVNLTTRTQLPPAYTNSFTRGVYYPDKVFRSSVLHSTQDLFLPFFSNVTWFHAIHVSGTNGTKRFDNPVLPFNDGVYFASTEKSNIIRGWIFGTTLDSKTQSLLIVNNATNVVIKVCEFQFCNDPFLGVYYHKNNKSWMESEFRVYSSANNCTFEYVSQPFLMDLEGKQGNFKNLREFVFKNIDGYFKIYSKHTPINLVRDLPQGFSALEPLVDLPIGINITRFQTLLALHRSYLTPGDSSSGWTAGAAAYYVGYLQPRTFLLKYNENGTITDAVDCALDPLSETKCTLKSFTVEKGIYQTSNFRVQPTESIVRFPNITNLCPFGEVFNATRFASVYAWNRKRISNCVADYSVLYNSASFSTFKCYGVSPTKLNDLCFTNVYADSFVIRGDEVRQIAPGQTGKIADYNYKLPDDFTGCVIAWNSNNLDSKVGGNYNYLYRLFRKSNLKPFERDISTEIYQAGSTPCNGVEGFNCYFPLQSYGFQPTNGVGYQPYRVVVLSFELLHAPATVCGPKKSTNLVKNKCVNFNFNGLTGTGVLTESNKKFLPFQQFGRDIADTTDAVRDPQTLEILDITPCSFGGVSVITPGTNTSNQVAVLYQDVNCTEVPVAIHADQLTPTWRVYSTGSNVFQTRAGCLIGAEHVNNSYECDIPIGAGICASYQTQTNSPRRARSVASQSIIAYTMSLGAENSVAYSNNSIAIPTNFTISVTTEILPVSMTKTSVDCTMYICGDSTECSNLLLQYGSFCTQLNRALTGIAVEQDKNTQEVFAQVKQIYKTPPIKDFGGFNFSQILPDSSKPSKRSFIEDLLFNKVTLADAGFIKQYGDCLGDIAARDLICAQKFNGLTVLPPLLTDEMIAQYTSALLAGTITSGWTFGAGAALQIPFAMQMAYRFNGIGVTQNVLYENQKLIANQFNSAIGKIQDSLSSTASALGKLQDVVNQNAQALNTLVKQLSSNFGAISSVLNDILSRLDPPEAEVQIDRLITGRLQSLQTYVTQQLIRAAEIRASANLAATKMSECVLGQSKRVDFCGKGYHLMSFPQSAPHGVVFLHVTYVPAQEKNFTTAPAICHDGKAHFPREGVFVSNGTHWFVTQRNFYEPQIITTDNTFVSGNCDVVIGIVNNTVYDPLQPELDSFKEELDKYFKNHTSPDVDLGDISGINASVVNIQKEIDRLNEVAKNLNESLIDLQELGKYEQYIKGGSGYIPEAPRDGQAYVRKDGEWVLLSTFL

SEQ ID NO: 5753 - protein, 1241 aa, Artificial Sequence
  SARS-CoV-2/Iceland/280/2020__EPI_ISL_417608 spike protein (1-1211)(K986P_V987P) Foldon construct
MFVFLVLLPLVSSQCVNLTTRTQLPPAYTNSFTRGVYYPDKVFRSSVLHSTQDLFLPFFSNVTWFHAIHVSGTNGTKRFDNPVLPFNDGVYFASTEKSNIIRGWIFGTTLDSKTQSLLIVNNATNVVIKVCEFQFCNDPFLGVYYHKNNKSWMESEFRVYSSANNCTFEYVSQPFLMDLEGKQGNFKNLREFVFKNIDGYFKIYSKHTPINLVRDLPQGFSALEPLVDLPIGINITRFQTLLALHRSYLTPGDSSSGWTAGAAAYYVGYLQPRTFLLKYNENGTITDAVDCALDPLSETKCTLKSFTVEKGIYQTSNFRVQPTESIVRFPNITNLCPFGEVFNATRFASVYAWNRKRISNCVADYSVLYNSASFSTFKCYGVSPTKLNDLCFTNVYADSFVIRGDEVRQIAPGQTGKIADYNYKLPDDFTGCVIAWNSNNLDSKVGGNYNYLYRLFRKSNLKPFERDISTEIYQAGSTPCNGVEGFNCYFPLQSYGFQPTNGVGYQPYRVVVLSFELLHAPATVCGPKKSTNLVKNKCVNFNFNGLTGTGVLTESNKKFLPFQQFGRDIADTTDAVRDPQTLEILDITPCSFGGVSVITPGTNTSNQVAVLYQGVNCTEVPVAIHADQLTPTWRVYSTGSNVFQTRAGCLIGAEHVNNSYECDIPIGAGICASYHTQTNSPRRARSVASQSIIAYTMSLGAENSVAYSNNSIAIPTNFTISVTTEILPVSMTKTSVDCTMYICGDSTECSNLLLQYGSFCTQLNRALTGIAVEQDKNTQEVFAQVKQIYKTPPIKDFGGFNFSQILPDPSKPSKRSFIEDLLFNKVTLADAGFIKQYGDCLGDIAARDLICAQKFNGLTVLPPLLTDEMIAQYTSALLAGTITSGWTFGAGAALQIPFAMQMAYRFNGIGVTQNVLYENQKLIANQFNSAIGKIQDSLSSTASALGKLQDVVNQNAQALNTLVKQLSSNFGAISSVLNDILSRLDPPEAEVQIDRLITGRLQSLQTYVTQQLIRAAEIRASANLAATKMSECVLGQSKRVDFCGKGYHLMSFPQSAPHGVVFLHVTYVPAQEKNFTTAPAICHDGKAHFPREGVFVSNGTHWFVTQRNFYEPQIITTDNTFVSGNCDVVIGIVNNTVYDPLQPELDSFKEELDKYFKNHTSPDVDLGDISGINASVVNIQKEIDRLNEVAKNLNESLIDLQELGKYEQYIKGGSGYIPEAPRDGQAYVRKDGEWVLLSTFL

SEQ ID NO: 5754 - protein, 1241 aa, Artificial Sequence; identical to SEQ ID NO: 111
  SARS-CoV-2/Iceland/247/2020__EPI_ISL_417575 spike protein (1-1211)(K986P_V987P) Foldon construct

SEQ ID NO: 5755 - protein, 1241 aa, Artificial Sequence
  SARS-CoV-2/Iceland/238/2020__EPI_ISL_417566 spike protein (1-1211)(K986P_V987P) Foldon construct
MFVFLVLLPLVSSQCVNLTTRTQLPPAYTNSFTRGVYYPDKVFRSSVLHSTQDLFLPFFSNVTWFHAIHVSGTNGTKRFDNPVLPFNDGVYFASTEKSNIIRGWIFGTTLDSKTQSLLIVNNATNVVIKVCEFQFCNDPFLGVYYHKNNKSWMESEFRVYSSANNCTFEYVSQPFLMDLEGKQGNFKNLREFVFKNIDGYFKIYSKHTPINLVRDLPQGFSALEPLVDLPIGINITRFQTLLALHRSYLTPGDSSSGWTAGAAAYYVGYLQPRTFLLKYNENGTITDAVDCALDPLSETKCTLKSFTVEKGIYQTSNFRVQPTESIVRFPNITNLCPFGEVFNATRFASVYAWNRKRISNCVADYSVLYNSASFSTFKCYGVSPTKLNDLCFTNVYADSFVIRGDEVRQIAPGQTGKIADYNYKLPDDFTGCVIAWNSNNLDSKVGGNYNYLYRLFRKSNLKPFERDISTEIYQAGSTPCNGVEGFNCYFPLQSYGFQPTNGVGYQPYRVVVLSFELLHAPATVCGPKKSTNLVKNKCVNFNFNGLTGTGVLTESNKKFLPFQQFGRDIADTTDAVRDPQTLEILDITPCSFGGVSVITPGTNTSNQVAVLYQGVNCTEVPVAIHADQLTPTWRVYSTGSNVFQTRAGCLIGAEHVNNSYECDIPIGAGICASYQTQTNSPRRARSVASQSIIAYTMSLGAENSVAYSNNSIAIPTNFTISVTTEILPVSMTKTSVDCTMYICGDSTECSNLLLQYGSFCTQLNRALTGIAVEQDKNTQEVFAQVKQIYKTPPIKDFGGFNFSQILPDPSKPSKRSFIEDLLFNKVTLADVGFIKQYGDCLGDIAARDLICAQKFNGLTVLPPLLTDEMIAQYTSALLAGTITSGWTFGAGAALQIPFAMQMAYRFNGIGVTQNVLYENQKLIANQFNSAIGKIQDSLSSTASALGKLQDVVNQNAQALNTLVKQLSSNFGAISSVLNDILSRLDPPEAEVQIDRLITGRLQSLQTYVTQQLIRAAEIRASANLAATKMSECVLGQSKRVDFCGKGYHLMSFPQSAPHGVVFLHVTYVPAQEKNFTTAPAICHDGKAHFPREGVFVSNGTHWFVTQRNFYEPQIITTDNTFVSGNCDVVIGIVNNTVYDPLQPELDSFKEELDKYFKNHTSPDVDLGDISGINASVVNIQKEIDRLNEVAKNLNESLIDLQELGKYEQYIKGGSGYIPEAPRDGQAYVRKDGEWVLLSTFL

SEQ ID NO: 5756 - protein, 1241 aa, Artificial Sequence
  SARS-CoV-2/Greece/16/2020__EPI_ISL_418265 spike protein (1-1211)(K986P_V987P) Foldon construct
MFVFLVLLPLVSSQCVNLTTRTQLPPAYTNSFTRGVYYPDKVFRSSVLHSTQDLFLPFFSNVTWFHAIHVSGTNGTKRFDNPVLPFNDGVYFASTEKSNIIRGWIFGTTLDSKTQSLLIVNNATNVVIKVCEFQFCNDPFLGVYYHKNNKSWMESEFRVYSSANNCTFEYVSQPFLMDLEGKQGNFKNLREFVFKNVDGYFKIYSKHTPINLVRDLPQGFSALEPLVDLPIGINITRFQTLLALHRSYLTPGDSSSGWTAGAAAYYVGYLQPRTFLLKYNENGTITDAVDCALDPLSETKCTLKSFTVEKGIYQTSNFRVQPTESIVRFPNITNLCPFGEVFNATRFASVYAWNRKRISNCVADYSVLYNSASFSTFKCYGVSPTKLNDLCFTNVYADSFVIRGDEVRQIAPGQTGKIADYNYKLPDDFTGCVIAWNSNNLDSKVGGNYNYLYRLFRKSNLKPFERDISTEIYQAGSTPCNGVEGFNCYFPLQSYGFQPTNGVGYQPYRVVVLSFELLHAPATVCGPKKSTNLVKNKCVNFNFNGLTGTGVLTESNKKFLPFQQFGRDIADTTDAVRDPQTLEILDITPCSFGGVSVITPGTNTSNQVAVLYQDVNCTEVPVAIHADQLTPTWRVYSTGSNVFQTRAGCLIGAEHVNNSYECDIPIGAGICASYQTQTNSPRRARSVASQSIIAYTMSLGAENSVAYSNNSIAIPTNFTISVTTEILPVSMTKTSVDCTMYICGDSTECSNLLLQYGSFCTQLNRALTGIAVEQDKNTQEVFAQVKQIYKTPPIKDFGGFNFSQILPDPSKPSKRSFIEDLLFNKVTLADAGFIKQYGDCLGDIAARDLICAQKFNGLTVLPPLLTDEMIAQYTSALLAGTITSGWTFGAGAALQIPFAMQMAYRFNGIGVTQNVLYENQKLIANQFNSAIGKIQDSLSSTASALGKLQDVVNQNAQALNTLVKQLSSNFGAISSVLNDILSRLDPPEAEVQIDRLITGRLQSLQTYVTQQLIRAAEIRASANLAATKMSECVLGQSKRVDFCGKGYHLMSFPQSAPHGVVFLHVTYVPAQEKNFTTAPAICHDGKAHFPREGVFVSNGTHWFVTQRNFYEPQIITTDNTFVSGNCDVVIGIVNNTVYDPLQPELDSFKEELDKYFKNHTSPDVDLGDISGINASVVNIQKEIDRLNEVAKNLNESLIDLQELGKYEQYIKGGSGYIPEAPRDGQAYVRKDGEWVLLSTFL

SEQ ID NO: 5757 - protein, 1241 aa, Artificial Sequence
  SARS-CoV-2/Iceland/319/2020__EPI_ISL_417648 spike protein (1-1211)(K986P_V987P) Foldon construct
MFVFLVLLPLVSSQCVNLTTRTQLPPAYTNSFTRGVYYPDKVFRSSVLHSTQDLFLPFFSNVTWFHAIHVSGTNGTKRFDNPVLPFNDGVYFASTEKSNIIRGWIFGTTLDSKTQSLLIVNNATNVVIKVCEFQFCNDPFLGVYYHKNNKSWMESEFRVYSSANNCTFEYVSQPFLIDLEGKQGNFKNLREFVFKNIDGYFKIYSKHTPINLVRDLPQGFSALEPLVDLPIGINITRFQTLLALHRSYLTPGDSSSGWTAGAAAYYVGYLQPRTFLLKYNENGTITDAVDCALDPLSETKCTLKSFTVEKGIYQTSNFRVQPTESIVRFPNITNLCPFGEVFNATRFASVYAWNRKRISNCVADYSVLYNSASFSTFKCYGVSPTKLNDLCFTNVYADSFVIRGDEVRQIAPGQTGKIADYNYKLPDDFTGCVIAWNSNNLDSKVGGNYNYLYRLFRKSNLKPFERDISTEIYQAGSTPCNGVEGFNCYFPLQSYGFQPTNGVGYQPYRVVVLSFELLHAPATVCGPKKSTNLVKNKCVNFNFNGLTGTGVLTESNKKFLPFQQFGRDIADTTDAVRDPQTLEILDITPCSFGGVSVITPGTNTSNQVAVLYQGVNCTEVPVAIHADQLTPTWRVYSTGSNVFQTRAGCLIGAEHVNNSYECDIPIGAGICASYQTQTNSPRRARSVASQSIIAYTMSLGAENSVAYSNNSIAIPTNFTISVTTEILPVSMTKTSVDCTMYICGDSTECSNLLLQYGSFCTQLNRALTGIAVEQDKNTQEVFAQVKQIYKTPPIKDFGGFNFSQILPDPSKPSKRSFIEDLLFNKVTLADAGFIKQYGDCLGDIAARDLICAQKFNGLTVLPPLLTDEMIAQYTSALLAGTITSGWTFGAGAALQIPFAMQMAYRFNGIGVTQNVLYENQKLIANQFNSAIGKIQDSLSSTASALGKLQDVVNQNAQALNTLVKQLSSNFGAISSVLNDILSRLDPPEAEVQIDRLITGRLQSLQTYVTQQLIRAAEIRASANLAATKMSECVLGQSKRVDFCGKGYHLMSFPQSAPHGVVFLHVTYVPAQEKNFTTAPAICHDGKAHFPREGVFVSNGTHWFVTQRNFYEPQIITTDNTFVSGNCDVVIGIVNNTVYDPLQPELDSFKEELDKYFKNHTSPDVDLGDISGINASVVNIQKEIDRLNEVAKNLNESLIDLQELGKYEQYIKGGSGYIPEAPRDGQAYVRKDGEWVLLSTFL

SEQ ID NO: 5758 - protein, 1241 aa, Artificial Sequence
  SARS-CoV-2/Congo/94/2020__EPI_ISL_417947 spike protein (1-1211)(K986P_V987P) Foldon construct
MFVFLVLLPLVSSQCVNLTTRTQLPPAYTNSFTRGVYYPDKVFRSSVLHSTQDLFLPFFSNVTWFHAIHVSGTNGTKRFDNPVLPFNDGVYFASTEKSNIIRGWIFGTTLDSKTQSLLIVNNATNVVIKVCEFQFCNDPFLGVYYHKNNKSWMESEFRVYSSANNCTFEYVSQPFLMDLEGKQGNFKNLREFVFKNIDGYFKIYSKHTPINLVRDLPQGFSALEPLVDLPIGINITRFQTLLALHRSYLTPGDSSSGWTAGAAAYYVGYLQPRTFLLKYNENGTITDAVDCALDPLSETKCTLKSFTVEKGIYQTSNFRVQPTESIVRFPNITNLCPFGEVFNATRFASVYAWNRKRISNCVADYSVLYNSASFSTFKCYGVSPTKLNDLCFTNVYADSFVIRGDEVRQIAPGQTGKIADYNYKLPDDFTGCVIAWNSNNLDSKVGGNYNYLYRLFRKSNLKPFERDISTEIYQAGSTPCNGVEGFNCYFPLQSYGFQPTNGVGYQPYRVVVLSFELLHAPATVCGPKKSTNLVKNKCVNFNFNGLTGTGVLTESNKKFLPFQQFGRDIADTTDAVRDPQTLEILDITPCSFGGVSVITPGTNTSNQVAVLYQGVNCTEVPVAIHADQLTPTWRVYSTGSNVFQTRAGCLIGAEHVNNSYECDIPIGAGICASYQTQTNSPRRARSVASQSIIAYTMSLGAENSVAYSNNSIAIPTNFTISVTTEILPVSMTKTSVDCTMYICGDSTECSNLLLQYGSFCTQLNRALTGIAVEQDKNTQEVFAQVKQIYKTPPIKDFGGFNFSQILPDPSKPSKRSFIEDILFNKVTLADAGFIKQYGDCLGDIAARDLICAQKFNGLTVLPPLLTDEMIAQYTSALLAGTITSGWTFGAGAALQIPFAMQMAYRFNGIGVTQNVLYENQKLIANQFNSAIGKIQDSLSSTASALGKLQDVVNQNAQALNTLVKQLSSNFGAISSVLNDILSRLDPPEAEVQIDRLITGRLQSLQTYVTQQLIRAAEIRASANLAATKMSECVLGQSKRVDFCGKGYHLMSFPQSAPHGVVFLHVTYVPAQEKNFTTAPAICHDGKAHFPREGVFVSNGTHWFVTQRNFYEPQIITTDNTFVSGNCDVVIGIVNNTVYDPLQPELDSFKEELDKYFKNHTSPDVDLGDISGINASVVNIQKEIDRLNEVAKNLNESLIDLQELGKYEQYIKGGSGYIPEAPRDGQAYVRKDGEWVLLSTFL

SEQ ID NO: 5759 - protein, 1241 aa, Artificial Sequence
  SARS-CoV-2/Congo/158/2020__EPI_ISL_417950 spike protein (1-1211)(K986P_V987P) Foldon construct
MFVFLVLLPLVSSQCVNLTTRTQLPPAYTNSFTRGVYYPDKVFRSSVLHSTQDLFLPFFSNVTWFHAIHVSGTNGTKRFDNPVLPFNDGVYFASTEKSNIIRGWIFGTTLDSKTQSLLIVNNATNVVIKVCEFQFCNDPFLGVYYHKNNKSWMESEFRVYSSANNCTFEYVSQPFLMDLEGKQGNFKNLREFVFKNIDGYFKIYSKHTPINLVRDLPQGFSALEPLVDLPIGINITRFQTLLALHRSYLTPGDSSSGWTAGAAAYYVGYLQPRTFLLKYNENGTITDAVDCALDPLSETKCTLKSFTVEKGIYQTSNFRVQPTESIVRFPNITNLCPFGEVFNATRFASVYAWNRKRISNCVADYSVLYNSASFSTFKCYGVSPTKLNDLCFTNVYADSFVIRGDEVRQIAPGQTGKIADYNYKLPDDFTGCVIAWNSNNLDSKVGGNYNYLYRLFRKSNLKPFERDISTEIYQAGSTPCNGVEGFNCYFPLQSYGFQPTNGVGYQPYRVVVLSFELLHAPATVCGPKKSTNLVKNKCVNFNFNGLTGTGVLTESNKKFLPFQQFGRDIADTTDAVRDPQTLEILDITPCSFGGVSVITPGTNTSNQVAVLYQDVNCTEVPVAIHADQLTPTWRVYSTGSNVFQTRAGCLIGAEHVNNSYECDIPIGAGICASYQTQTNSPRRARSVASQSIIAYTMSLGAENSVAYSNNSIAIPTNFTISVTTEILPVSMTKTSVDCTMYICGDSTECSNLLLQYGSFCTQLNRALTGIAVEQDKNTQEVFAQVKQIYKTPPIKDFGGFNFSQILPDPSKPSKRSFIEDLLFNKVTLADAGFIKQYGDCLGDIAARDLICAQKFNGLTVLPPLLTDEMIAQYTSALLAGTITSGWTFGAGAALQIPFAMQMAYRFNGIGVTQNVLYENQKLIANQFNSAIGKIQDSLSSTASALGKLQDVVNQNAQALNTLVKQLSSNFGAISSVLNDILSRLDPPEAEVQIDRLITGRLQSLQTYVTQQLIRAAEIRASANLAATKMSECVLGQSKRVDFCGKGYHLMSFPQSAPHGVVFLHVTYVPAQEKNFTTAPAICHDGKAHFPREGVFVSNGTHWFVTQRNFYEPQIITTDNTFLSGNCDVVIGIVNNTVYDPLQPELDSFKEELDKYFKNHTSPDVDLGDISGINASVVNIQKEIDRLNEVAKNLNESLIDLQELGKYEQYIKGGSGYIPEAPRDGQAYVRKDGEWVLLSTFL

SEQ ID NO: 5760 - protein, 1241 aa, Artificial Sequence
  SARS-CoV-2/USA/UT-00034/2020__EPI_ISL_417977 spike protein (1-1211)(K986P_V987P) Foldon construct
MFVFLVLLPLVSSQCVNLTTRTQLPPAYTNSFTRGVYYPDKVFRSSVLHSTQDLFLPFFSNVTWFHAIHVSGTNGTKRFDNPVLPFNDGVYFASTEKSNIIRGWIFGTTLDSKTQSLLIVNNATNVVIKVCEFQFCNDPFLGVYYYKNNKSWMESEFRVYSSANNCTFEYVSQPFLMDLEGKQGNFKNLREFVFKNIDGYFKIYSKHTPINLVRDLPQGFSALEPLVDLPIGINITRFQTLLALHRSYLTPGDSSSGWTAGAAAYYVGYLQPRTFLLKYNENGTITDAVDCALDPLSETKCTLKSFTVEKGIYQTSNFRVQPTESIVRFPNITNLCPFGEVFNATRFASVYAWNRKRISNCVADYSVLYNSASFSTFKCYGVSPTKLNDLCFTNVYADSFVIRGDEVRQIAPGQTGKIADYNYKLPDDFTGCVIAWNSNNLDSKVGGNYNYLYRLFRKSNLKPFERDISTEIYQAGSTPCNGVEGFNCYFPLQSYGFQPTNGVGYQPYRVVVLSFELLHAPATVCGPKKSTNLVKNKCVNFNFNGLTGTGVLTESNKKFLPFQQFGRDIADTTDAVRDPQTLEILDITPCSFGGVSVITPGTNTSNQVAVLYQGVNCTEVPVAIHADQLTPTWRVYSTGSNVFQTRAGCLIGAEHVNNSYECDIPIGAGICASYQTQTNSPRRARSVASQSIIAYTMSLGAENSVAYSNNSIAIPTNFTISVTTEILPVSMTKTSVDCTMYICGDSTECSNLLLQYGSFCTQLNRALTGIAVEQDKNTQEVFAQVKQIYKTPPIKDFGGFNFSQILPDPSKPSKRSFIEDLLFNKVTLADAGFIKQYGDCLGDIAARDLICAQKFNGLTVLPPLLTDEMIAQYTSALLAGTITSGWTFGAGAALQIPFAMQMAYRFNGIGVTQNVLYENQKLIANQFNSAIGKIQDSLSSTASALGKLQDVVNQNAQALNTLVKQLSSNFGAISSVLNDILSRLDPPEAEVQIDRLITGRLQSLQTYVTQQLIRAAEIRASANLAATKMSECVLGQSKRVDFCGKGYHLMSFPQSAPHGVVFLHVTYVPAQEKNFTTAPAICHDGKAHFPREGVFVSNGTHWFVTQRNFYEPQIITTDNTFVSGNCDVVIGIVNNTVYDPLQPELDSFKEELDKYFKNHTSPDVDLGDISGINASVVNIQKEIDRLNEVAKNLNESLIDLQELGKYEQYIKGGSGYIPEAPRDGQAYVRKDGEWVLLSTFL

SEQ ID NO: 5761 - protein, 1241 aa, Artificial Sequence
  SARS-CoV-2/USA/UT-00033/2020__EPI_ISL_417976 spike protein (1-1211)(K986P_V987P) Foldon construct
MFVFLVLLPLVSSQCVNLTTRTQLPPAYTNSFTRGVYYPDKVFRSSVLHSTQDLFLPFFSNVTWFHAIHVSGTNGTKRFDNPVLPFNDGVYFASTEKSNIIRGWIFGTTLDSKTQSLLIVNNATNVVIKVCEFQFCNDPFLGVYYHKNNKSWMESEFRVYSSANNCTFEYVSQPFLMDLEGKQGNFKNLREFVFKNIDGYFKIYSKHTPINLVRDLPQGFSALEPLVDLPIGINITRFQTLLALHRSYLTPGDSSSGLTAGAAAYYVGYLQPRTFLLKYNENGTITDAVDCALDPLSETKCTLKSFTVEKGIYQTSNFRVQPTESIVRFPNITNLCPFGEVFNATRFASVYAWNRKRISNCVADYSVLYNSASFSTFKCYGVSPTKLNDLCFTNVYADSFVIRGDEVRQIAPGQTGKIADYNYKLPDDFTGCVIAWNSNNLDSKVGGNYNYLYRLFRKSNLKPFERDISTEIYQAGSTPCNGVEGFNCYFPLQSYGFQPTNGVGYQPYRVVVLSFELLHAPATVCGPKKSTNLVKNKCVNFNFNGLTGTGVLTESNKKFLPFQQFGRDIADTTDAVRDPQTLEILDITPCSFGGVSVITPGTNTSNQVAVLYQGVNCTEVPVAIHADQLTPTWRVYSTGSNVFQTRAGCLIGAEHVNNSYECDIPIGAGICASYQTQTNSPRRARSVASQSIIAYTMSLGAENSVAYSNNSIAIPTNFTISVTTEILPVSMTKTSVDCTMYICGDSTECSNLLLQYGSFCTQLNRALTGIAVEQDKNTQEVFAQVKQIYKTPPIKDFGGFNFSQILPDPSKPSKRSFIEDLLFNKVTLADAGFIKQYGDCLGDIAARDLICAQKFNGLTVLPPLLTDEMIAQYTSALLAGTITSGWTFGAGAALQIPFAMQMAYRFNGIGVTQNVLYENQKLIANQFNSAIGKIQDSLSSTASALGKLQDVVNQNAQALNTLVKQLSSNFGAISSVLNDILSRLDPPEAEVQIDRLITGRLQSLQTYVTQQLIRAAEIRASANLAATKMSECVLGQSKRVDFCGKGYHLMSFPQSAPHGVVFLHVTYVPAQEKNFTTAPAICHDGKAHFPREGVFVSNGTHWFVTQRNFYEPQIITTDNTFVSGNCDVVIGIVNNTVYDPLQPELDSFKEELDKYFKNHTSPDVDLGDISGINASVVNIQKEIDRLNEVAKNLNESLIDLQELGKYEQYIKGGSGYIPEAPRDGQAYVRKDGEWVLLSTFL

SEQ ID NO: 5762 - protein, 1241 aa, Artificial Sequence
  SARS-CoV-2/USA/WI-13/2020__EPI_ISL_417516 spike protein (1-1211)(K986P_V987P) Foldon construct
MFVFLVLLPLVSSQCVNLTTRTQLPPAYTNSFTRGVYYPDKVFRSSVLHSTQDLFLPFFSNVTWFHAIHVSGTNGTKRFDNPVLPFNDGVYFASTEKSNIIRGWIFGTTLDSKTQSLLIVNNATNVVIKVCEFQFCNDPFLGVYYHKNNKSWMESEFRVYSSANNCTFEYVSQPFLMDLEGKQGNFKNLREFVFKNIDGYFKIYSKHTPINLVRDLPQGFSALEPLVDLPIGINITRFQTLLALHRSYLTPGDSSSGWTAGAAAYYVGYLQPRTFLLKYNENGTITDAVDCALDPLSETKCTLKSFTVEKGIYQTSNFRVLPTESIVRFPNITNLCPFGEVFNATRFASVYAWNRKRISNCVADYSVLYNSASFSTFKCYGVSPTKLNDLCFTNVYADSFVIRGDEVRQIAPGQTGKIADYNYKLPDDFTGCVIAWNSNNLDSKVGGNYNYLYRLFRKSNLKPFERDISTEIYQAGSTPCNGVEGFNCYFPLQSYGFQPTNGVGYQPYRVVVLSFELLHAPATVCGPKKSTNLVKNKCVNFNFNGLTGTGVLTESNKKFLPFQQFGRDIADTTDAVRDPQTLEILDITPCSFGGVSVITPGTNTSNQVAVLYQGVNCTEVPVAIHADQLTPTWRVYSTGSNVFQTRAGCLIGAEHVNNSYECDIPIGAGICASYQTQTNSPRRARSVASQSIIAYTMSLGAENSVAYSNNSIAIPTNFTISVTTEILPVSMTKTSVDCTMYICGDSTECSNLLLQYGSFCTQLNRALTGIAVEQDKNTQEVFAQVKQIYKTPPIKDFGGFNFSQILPDPSKPSKRSFIEDLLFNKVTLADAGFIKQYGDCLGDIAARDLICAQKFNGLTVLPPLLTDEMIAQYTSALLAGTITSGWTFGAGAALQIPFAMQMAYRFNGIGVTQNVLYENQKLIANQFNSAIGKIQDSLSSTASALGKLQDVVNQNAQALNTLVKQLSSNFGAISSVLNDILSRLDPPEAEVQIDRLITGRLQSLQTYVTQQLIRAAEIRASANLAATKMSECVLGQSKRVDFCGKGYHLMSFPQSAPHGVVFLHVTYVPAQEKNFTTAPAICHDGKAHFPREGVFVSNGTHWFVTQRNFYEPQIITTDNTFVSGNCDVVIGIVNNTVYDPLQPELDSFKEELDKYFKNHTSPDVDLGDISGINASVVNIQKEIDRLNEVAKNLNESLIDLQELGKYEQYIKGGSGYIPEAPRDGQAYVRKDGEWVLLSTFL

SEQ ID NO: 5763 - protein, 1240 aa, Artificial Sequence
  SARS-CoV-2/India/1-27/2020__EPI_ISL_413522 spike protein (1-1210)(K985P_V986P) Foldon construct
MFVFLVLLPLVSSQCVNLTTRTQLPPAYTNSFTRGVYYPDKVFRSSVLHSTQDLFLPFFSNVTWFHAIHVSGTNGTKRFDNPVLPFNDGVYFASTEKSNIIRGWIFGTTLDSKTQSLLIVNNATNVVIKVCEFQFCNDPFLGVYHKNNKSWMESEFRVYSSANNCTFEYVSQPFLMDLEGKQGNFKNLREFVFKNIDGYFKIYSKHTPINLVRDLPQGFSALEPLVDLPIGINITRFQTLLALHRSYLTPGDSSSGWTAGAAAYYVGYLQPRTFLLKYNENGTITDAVDCALDPLSETKCTLKSFTVEKGIYQTSNFRVQPTESIVRFPNITNLCPFGEVFNATRFASVYAWNRKRISNCVADYSVLYNSASFSTFKCYGVSPTKLNDLCFTNVYADSFVIRGDEVIQIAPGQTGKIADYNYKLPDDFTGCVIAWNSNNLDSKVGGNYNYLYRLFRKSNLKPFERDISTEIYQAGSTPCNGVEGFNCYFPLQSYGFQPTNGVGYQPYRVVVLSFELLHAPATVCGPKKSTNLVKNKCVNFNFNGLTGTGVLTESNKKFLPFQQFGRDIADTTDAVRDPQTLEILDITPCSFGGVSVITPGTNTSNQVAVLYQDVNCTEVPVAIHADQLTPTWRVYSTGSNVFQTRAGCLIGAEHVNNSYECDIPIGAGICASYQTQTNSPRRARSVASQSIIAYTMSLGAENSVAYSNNSIAIPTNFTISVTTEILPVSMTKTSVDCTMYICGDSTECSNLLLQYGSFCTQLNRALTGIAVEQDKNTQEVFAQVKQIYKTPPIKDFGGFNFSQILPDPSKPSKRSFIEDLLFNKVTLADAGFIKQYGDCLGDIAARDLICAQKFNGLTVLPPLLTDEMIAQYTSALLAGTITSGWTFGAGAALQIPFAMQMAYRFNGIGVTQNVLYENQKLIANQFNSAIGKIQDSLSSTASALGKLQDVVNQNAQALNTLVKQLSSNFGAISSVLNDILSRLDPPEAEVQIDRLITGRLQSLQTYVTQQLIRAAEIRASANLAATKMSECVLGQSKRVDFCGKGYHLMSFPQSAPHGVVFLHVTYVPAQEKNFTTAPAICHDGKAHFPREGVFVSNGTHWFVTQRNFYEPQIITTDNTFVSGNCDVVIGIVNNTVYDPLQPELDSFKEELDKYFKNHTSPDVDLGDISGINASVVNIQKEIDRLNEVAKNLNESLIDLQELGKYEQYIKGGSGYIPEAPRDGQAYVRKDGEWVLLSTFL

SEQ ID NO: 5764 - protein, 1235 aa, Artificial Sequence
  SARS-CoV-2/pangolin/Guangxi/P4L/2017__EPI_ISL_410538 spike protein (1-1205)(K980P_V981P) Foldon construct
MFVFLFVLPLVSSQCVNLTTRTGIPPGYTNSSTRGVYYPDKVFRSSILHLTQDLFLPFFSNVTWFNTINYQGGFKKFDNPVLPFNDGVYFASTEKSNIIRGWIFGTTLDARTQSLLIVNNATNVVIKVCEFQFCTDPFLGVYYHNNNKTWVENEFRVYSSANNCTFEYISQPFLMDLEGKQGNFKNLREFVFKNVDGYFKIYSKHTPIDLVRDLPRGFAALEPLVDLPIGINITRFQTLLALHRSYLTPGNLESGWTTGAAAYYVGYLQQRTFLLSYNQNGTITDAVDCSLDPLSETKCTLKSLTVEKGIYQTSNFRVQPTISIVRFPNITNLCPFGEVFNASKFASVYAWNRKRISNCVADYSVLYNSTSFSTFKCYGVSPTKLNDLCFTNVYADSFVVKGDEVRQIAPGQTGVIADYNYKLPDDFTGCVIAWNSVKQDALTGGNYGYLYRLFRKSKLKPFERDISTEIYQAGSTPCNGQVGLNCYYPLERYGFHPTTGVNYQPFRVVVLSFELLNGPATVCGPKLSTTLVKDKCVNFNFNGLTGTGVLTTSKKQFLPFQQFGRDISDTTDAVRDPQTLEILDITPCSFGGVSVITPGTNTSNQVAVLYQDVNCTEVPMAIHAEQLTPAWRVYSAGANVFQTRAGCLVGAEHVNNSYECDIPVGAGICASYHSMSSLRSVNQRSIIAYTMSLGAENSVAYSNNSIAIPTNFTISVTTEILPVSMTKTSVDCTMYICGDSIECSNLLLQYGSFCTQLNRALTGIAVEQDKNTQEVFAQVKQIYKTPPIKDFGGFNFSQILPDPSKPSKRSFIEDLLFNKVTLADAGFIKQYGDCLGDIAARDLICAQKFNGLTVLPPLLTDEMIAQYTSALLAGTITSGWTFGAGAALQIPFAMQMAYRFNGIGVTQNVLYENQKLIANQFNSAIGKIQDSLSSTASALGKLQDVVNQNAQALNTLVKQLSSNFGAISSVLNDILSRLDPPEAEVQIDRLITGRLQSLQTYVTQQLIRAAEIRASANLAATKMSECVLGQSKRVDFCGKGYHLMSFPQSAPHGVVFLHVTYVPAQEKNFTTAPAICHEGKAHFPREGVFVSNGTHWFITQRNFYEPQIITTDNTFVSGSCDVVIGIVNNTVYDPLQPELDSFKEELDKYFKNHTSPDVDLGDISGINASVVNIQKEIDRLNEVAKNLNESPIDLQELGKYEQYIKGGSGYIPEAPRDGQAYVRKDGEWVLLSTFL

SEQ ID NO: 5765 - protein, 1235 aa, Artificial Sequence
  SARS-CoV-2/pangolin/Guangxi/P5L/2017__EPI_ISL_410540 spike protein (1-1205)(K980P_V981P) Foldon construct
MFVFLFVLPLVSSQCVNLTTRTGIPPGYTNSSTRGVYYPDKVFRSSILHLTQDLFLPFFSNVTWFNTINYQGGFKKFDNPVLPFNDGVYFASTEKSNIIRGWIFGTTLDARTQSLLIVNNATNVVIKVCEFQFCTDPFLGVYYHNNNKTWVENEFRVYSSANNCTFEYISQPFLMDLEGKQGNFKNLREFVFKNVDGYFKIYSKHTPIDLVRDLPRGFAALEPLVDLPIGINITRFQTLLALHRSYLTPGKLESGWTTGAAAYYVGYLQQRTFLLSYNQNGTITDAVDCSLDPLSETKCTLKSLTVEKGIYQTSNFRVQPTISIVRFPNITNLCPFGEVFNASKFASVYAWNRKRISNCVADYSVLYNSTSFSTFKCYGVSPTKLNDLCFTNVYADSFVVKGDEVRQIAPGQTGVIADYNYKLPDDFTGCVIAWNSVKQDALTGGNYGYLYRLFRKSKLKPFERDISTEIYQAGSTPCNGQVGLNCYYPLERYGFHPTTGVNYQPFRVVVLSFELLNGPATVCGPKLSTTLVKDKCVNFNFNGLTGTGVLTTSKKQFLPFQQFGRDISDTTDAVRDPQTLEILDITPCSFGGVSVITPGTNTSNQVAVLYQDVNCTEVPMAIHAEQLTPAWRVYSAGANVFQTRAGCLVGAEHVNNSYECDIPVGAGICASYHSMSSFRSVNQRSIIAYTMSLGAENSVAYSNNSIAIPTNFTISVTTEILPVSMTKTSVDCTMYICGDSIECSNLLLQYGSFCTQLNRALTGIAVEQDKNTQEVFAQVKQIYKTPPIKDFGGFNFSQILPDPSKPSKRSFIEDLLFNKVTLADAGFIKQYGDCLGDIAARDLICAQKFNGLTVLPPLLTDEMIAQYTSALLAGTITSGWTFGAGAALQIPFAMQMAYRFNGIGVTQNVLYENQKLIANQFNSAIGKIQDSLSSTASALGKLQDVVNQNAQALNTLVKQLSSNFGAISSVLNDILSRLDPPEAEVQIDRLITGRLQSLQTYVTQQLIRAAEIRASANLAATKMSECVLGQSKRVDFCGKGYHLMSFPQSAPHGVVFLHVTYVPAQEKNFTTAPAICHEGKAHFPREGVFVSNGTHWFITQRNFYEPQIITTDNTFVSGSCDVVIGIVNNTVYDPLQPELDSFKEELDKYFKNHTSPDVDLGDISGINASVVNIQKEIDRLNEVAKNLNESLIDLQELGKYEQYIKGGSGYIPEAPRDGQAYVRKDGEWVLLSTFL

SEQ ID NO: 5766 - protein, 1235 aa, Artificial Sequence
  SARS-CoV-2/pangolin/Guangxi/P5E/2017__EPI_ISL_410541 spike protein (1-1205)(K980P_V981P) Foldon construct
MFVFLFVLPLVSSQCVNLTTRTGIPPGYTNSSTRGVYYPDKVFRSSILHLTQDLFLPFFSNVTWFNTITYQGGSKKFDNPVLPFNDGVYFASTEKSNIIRGWIFGTTLDARTQSLLIVNNATNVVIKVCEFQFCTDPFLGVYYHNNNKTWVENEFRVYSSANNCTFEYISQPFLMDLEGKQGNFKNLREFVFKNVDGYFKIYSKHTPIDLVRDLPRGFAALEPLVDLPIGINITRFQTLLALHRSYLTPGKLESGWTTGAAAYYVGYLQQRTFLLSYNQNGTITDAVDCSLDPLSETKCTLKSLTVEKGIYQTSNFRVQPTISIVRFPNITNLCPFGEVFNASKFASVYAWNRKRISNCVADYSVLYNSTSFSTFKCYGVSPTKLNDLCFTNVYADSFVVKGDEVRQIAPGQTGVIADYNYKLPDDFTGCVIAWNSVKQDALTGDNYGYLYRLFRKSKLKPFERDISTEIYQAGSTPCNGQVGLNCYYPLERYGFHPTTGVNYQPFRVVVLSFELLNGPATVCGPKLSTTLVKDKCVNFNFNGLTGTGVLTTSKKQFLPFQQFGRDISDTTDAVRDPQTLEILDITPCSFGGVSVITPGTNTSNQVAVLYQDVNCTEVPMAIHAEQLTPAWRVYSAGANVFQTRAGCLVGAEHVNNSYECDIPVGAGICASYHSMSSFRSVNQRSIIAYTMSLGAENSVAYSNNSIAIPTNFTISVTTEILPVSMTKTSVDCTMYICGDSIECSNLLLQYGSFCTQLNRALTGIAVEQDKNTQEVFAQVKQIYKTPPIKDFGGFNFSQILPDPSKPSKRSFIEDLLFNKVTLADAGFIKQYGDCLGDIAARDLICAQKFNGLTVLPPLLTDEMIAQYTSALLAGTITSGWTFGAGAALQIPFAMQMAYRFNGIGVTQNVLYENQKLIANQFNSAIGKIQDSLSSTASALGKLQDVVNQNAQALNTLVKQLSSNFGAISSVLNDILSRLDPPEAEVQIDRLITGRLQSLQTYVTQQLIRAAEIRASANLAATKMSECVLGQSKRVDFCGKGYHLMSFPQSAPHGVVFLHVTYVPAQEKNFTTAPAICHEGKAHFPREGVFVSNGTHWFITQRNFYEPQIITTDNTFVSGSCDVVIGIVNNTVYDPLQPELDSFKEELDKYFKNHTSPDVDLGDISGINASVVNIQKEIDRLNEVAKNLNESLIDLQELGKYEQYIKGGSGYIPEAPRDGQAYVRKDGEWVLLSTFL

SEQ ID NO: 5767 - protein, 1233 aa, Artificial Sequence
  SARS-CoV-2/pangolin/Guangxi/P1E/2017__EPI_ISL_410539 spike protein (1-1203)(K978P_V979P) Foldon construct
MFVFLFVLPLVSSQCVNLTTRTGIQPGYTNSSTRGVYYPDKVFRSSILHLTQDLFLPFFSNVTWFNTINYQGGFKKFDNPVLPFNDGVYFASTEKSNIIRGWIFGTTLDARTQSLLIVNNATNVVIKVCEFQFCTDPFLGVYYHNNNKTWVENEFRVYSSANNCTFEYISQPFLMDLEGKQGNFKNLREFVFKNVDGYFKIYSKHTPIDLVRDLPRGFAALEPLVDLPIGINITRFQTLLALHRSYLTPGKLESGWTTGAAAYYVGYLQQRTFLLSYNQNGTITDAVDCSLDPLSETKCTLKSLTVEKGIYQTSNFRVQPTISIVRFPNITNLCPFGEVFNASKFASVYAWNRKRISNCVADYSVLYNSTSFSTFKCYGVSPTKLNDLCFTNVYADSFVVKGDEVRQIAPGQTGVIADYNYKLPDDFTGCVIAWNSVKQDALTGGNYLYRLFRKSKLKPFERDISTEIYQAGSTPCNGQVGLNCYYPLERYGFHPTTGVNYQPFRVVVLSFELLNGPATVCGPKLSTTLVKDKCVNFNFNGLTGTGVLTTSKKQFLPFQQFGRDISDTTDAVRDPQTLEILDITPCSFGGVSVITPGTNTSNQVAVLYQDVNCTEVPMAIHAEQLTPAWRVYSAGANVFQTRAGCLVGAEHVNNSYECDIPVGAGICASYHSMSSLRSVNQRSIIAYTMSLGAENSVAYSNNSIAIPTNFTISVTTEILPVSMTKTSVDCTMYICGDSIECSNLLLQYGSFCTQLNRALTGIAVEQDKNTQEVFAQVKQIYKTPPIKDFGGFNFSQILPDPSKPSKRSFIEDLLFNKVTLADAGFIKQYGDCLGDIAARDLICAQKFNGLTVLPPLLTDEMIAQYTSALLAGTITSGWTFGAGAALQIPFAMQMAYRFNGIGVTQNVLYENQKLIANQFNSAIGKIQDSLSSTASALGKLQDVVNQNAQALNTLVKQLSSNFGAISSVLNDILSRLDPPEAEVQIDRLITGRLQSLQTYVTQQLIRAAEIRASANLAATKMSECVLGQSKRVDFCGKGYHLMSFPQSAPHGVVFLHVTYVPAQEKNFTTAPAICHEGKAHFPREGVFVSNGTHWFITQRNFYEPQIITTDNTFVSGSCDVVIGIVNNTVYDPLQPELDSFKEELDKYFKNHTSPDVDLGDISGINASVVNIQKEIDRLNEVAKNLNESLIDLQELGKYEQYIKGGSGYIPEAPRDGQAYVRKDGEWVLLSTFL

SEQ ID NO: 5768 - protein, 1241 aa, Artificial Sequence
  SARS-CoV-2/Wuhan/WIV05/2019__EPI_ISL_402128 spike protein (1-1211)(K986P_V987P_T887W_A1020W) Foldon construct
MFVFLVLLPLVSSQCVNLTTRTQLPPAYTNSFTRGVYYPDKVFRSSVLHSTQDLFLPFFSNVTWFHAIHVSGTNGTKRFDNPVLPFNDGVYFASTEKSNIIRGWIFGTTLDSKTQSLLIVNNATNVVIKVCEFQFCNDPFLGVYYHKNNKSWMESEFRVYSSANNCTFEYVSQPFLMDLEGKQGNFKNLREFVFKNIDGYFKIYSKHTPINLVRDLPQGFSALEPLVDLPIGINITRFQTLLALHRSYLTPGDSSSGWTAGAAAYYVGYLQPRTFLLKYNENGTITDAVDCALDPLSETKCTLKSFTVEKGIYQTSNFRVQPTESIVRFPNITNLCPFGEVFNATRFASVYAWNRKRISNCVADYSVLYNSASFSTFKCYGVSPTKLNDLCFTNVYADSFVIRGDEVRQIAPGQTGKIADYNYKLPDDFTGCVIAWNSNNLDSKVGGNYNYLYRLFRKSNLKPFERDISTEIYQAGSTPCNGVEGFNCYFPLQSYGFQPTNGVGYQPYRVVVLSFELLHAPATVCGPKKSTNLVKNKCVNFNFNGLTGTGVLTESNKKFLPFQQFGRDIADTTDAVRDPQTLEILDITPCSFGGVSVITPGTNTSNQVAVLYQDVNCTEVPVAIHADQLTPTWRVYSTGSNVFQTRAGCLIGAEHVNNSYECDIPIGAGICASYQTQTNSPRRARSVASQSIIAYTMSLGAENSVAYSNNSIAIPTNFTISVTTEILPVSMTKTSVDCTMYICGDSTECSNLLLQYGSFCTQLNRALTGIAVEQDKNTQEVFAQVKQIYKTPPIKDFGGFNFSQILPDPSKPSKRSFIEDLLFNKVTLADAGFIKQYGDCLGDIAARDLICAQKFNGLTVLPPLLTDEMIAQYTSALLAGTITSGWWFGAGAALQIPFAMQMAYRFNGIGVTQNVLYENQKLIANQFNSAIGKIQDSLSSTASALGKLQDVVNQNAQALNTLVKQLSSNFGAISSVLNDILSRLDPPEAEVQIDRLITGRLQSLQTYVTQQLIRAAEIRWSANLAATKMSECVLGQSKRVDFCGKGYHLMSFPQSAPHGVVFLHVTYVPAQEKNFTTAPAICHDGKAHFPREGVFVSNGTHWFVTQRNFYEPQIITTDNTFVSGNCDVVIGIVNNTVYDPLQPELDSFKEELDKYFKNHTSPDVDLGDISGINASVVNIQKEIDRLNEVAKNLNESLIDLQELGKYEQYIKGGSGYIPEAPRDGQAYVRKDGEWVLLSTFL

SEQ ID NO: 5769 - protein, 1237 aa, Artificial Sequence
  SARS-CoV-2/bat/Yunnan/RaTG13/2013__EPI_ISL_402131 spike protein (1-1207)(K982P_V983P_T883W_A1016W) Foldon construct
MFVFLVLLPLVSSQCVNLTTRTQLPPAYTNSSTRGVYYPDKVFRSSVLHLTQDLFLPFFSNVTWFHAIHVSGTNGIKRFDNPVLPFNDGVYFASTEKSNIIRGWIFGTTLDSKTQSLLIVNNATNVVIKVCEFQFCNDPFLGVYYHKNNKSWMESEFRVYSSANNCTFEYVSQPFLMDLEGKQGNFKNLREFVFKNIDGYFKIYSKHTPINLVRDLPPGFSALEPLVDLPIGINITRFQTLLALHRSYLTPGDSSSGWTAGAAAYYVGYLQPRTFLLKYNENGTITDAVDCALDPLSETKCTLKSFTVEKGIYQTSNFRVQPTDSIVRFPNITNLCPFGEVFNATTFASVYAWNRKRISNCVADYSVLYNSTSFSTFKCYGVSPTKLNDLCFTNVYADSFVITGDEVRQIAPGQTGKIADYNYKLPDDFTGCVIAWNSKHIDAKEGGNFNYLYRLFRKANLKPFERDISTEIYQAGSKPCNGQTGLNCYYPLYRYGFYPTDGVGHQPYRVVVLSFELLNAPATVCGPKKSTNLVKNKCVNFNFNGLTGTGVLTESNKKFLPFQQFGRDIADTTDAVRDPQTLEILDITPCSFGGVSVITPGTNASNQVAVLYQDVNCTEVPVAIHADQLTPTWRVYSTGSNVFQTRAGCLIGAEHVNNSYECDIPIGAGICASYQTQTNSRSVASQSIIAYTMSLGAENSVAYSNNSIAIPTNFTISVTTEILPVSMTKTSVDCTMYICGDSTECSNLLLQYGSFCTQLNRALTGIAVEQDKNTQEVFAQVKQIYKTPPIKDFGGFNFSQILPDPSKPSKRSFIEDLLFNKVTLADAGFIKQYGDCLGDIAARDLICAQKFNGLTVLPPLLTDEMIAQYTSALLAGTITSGWWFGAGAALQIPFAMQMAYRFNGIGVTQNVLYENQKLIANQFNSAIGKIQDSLSSTASALGKLQDVVNQNAQALNTLVKQLSSNFGAISSVLNDILSRLDPPEAEVQIDRLITGRLQSLQTYVTQQLIRAAEIRWSANLAATKMSECVLGQSKRVDFCGKGYHLMSFPQSAPHGVVFLHVTYVPAQEKNFTTAPAICHDGKAHFPREGVFVSNGTHWFVTQRNFYEPQIITTDNTFVSGSCDVVIGIVNNTVYDPLQPELDSFKEELDKYFKNHTSPDVDLGDISGINASVVNIQKEIDRLNEVAKNLNESLIDLQELGKYEQYIKGGSGYIPEAPRDGQAYVRKDGEWVLLSTFL

SEQ ID NO: 5770 - protein, 1241 aa, Artificial Sequence
  SARS-CoV-2/Wuhan/HBCDC-HB-01/2019__EPI_ISL_402132 spike protein (1-1211)(K986P_V987P_T887W_A1020W) Foldon construct
MFVFLVLLPLVSSQCVNLTTRTQLPPAYTNSITRGVYYPDKVFRSSVLHSTQDLFLPFFSNVTWFHAIHVSGTNGTKRFDNPVLPFNDGVYFASTEKSNIIRGWIFGTTLDSKTQSLLIVNNATNVVIKVCEFQFCNDPFLGVYYHKNNKSWMESEFRVYSSANNCTFEYVSQPFLMDLEGKQGNFKNLREFVFKNIDGYFKIYSKHTPINLVRDLPQGFSALEPLVDLPIGINITRFQTLLALHRSYLTPGDSSSGWTAGAAAYYVGYLQPRTFLLKYNENGTITDAVDCALDPLSETKCTLKSFTVEKGIYQTSNFRVQPTESIVRFPNITNLCPFGEVFNATRFASVYAWNRKRISNCVADYSVLYNSASFSTFKCYGVSPTKLNDLCFTNVYADSFVIRGDEVRQIAPGQTGKIADYNYKLPDDFTGCVIAWNSNNLDSKVGGNYNYLYRLFRKSNLKPFERDISTEIYQAGSTPCNGVEGFNCYFPLQSYGFQPTNGVGYQPYRVVVLSFELLHAPATVCGPKKSTNLVKNKCVNFNFNGLTGTGVLTESNKKFLPFQQFGRDIADTTDAVRDPQTLEILDITPCSFGGVSVITPGTNTSNQVAVLYQDVNCTEVPVAIHADQLTPTWRVYSTGSNVFQTRAGCLIGAEHVNNSYECDIPIGAGICASYQTQTNSPRRARSVASQSIIAYTMSLGAENSVAYSNNSIAIPTNFTISVTTEILPVSMTKTSVDCTMYICGDSTECSNLLLQYGSFCTQLNRALTGIAVEQDKNTQEVFAQVKQIYKTPPIKDFGGFNFSQILPDPSKPSKRSFIEDLLFNKVTLADAGFIKQYGDCLGDIAARDLICAQKFNGLTVLPPLLTDEMIAQYTSALLAGTITSGWWFGAGAALQIPFAMQMAYRFNGIGVTQNVLYENQKLIANQFNSAIGKIQDSLSSTASALGKLQDVVNQNAQALNTLVKQLSSNFGAISSVLNDILSRLDPPEAEVQIDRLITGRLQSLQTYVTQQLIRAAEIRWSANLAATKMSECVLGQSKRVDFCGKGYHLMSFPQSAPHGVVFLHVTYVPAQEKNFTTAPAICHDGKAHFPREGVFVSNGTHWFVTQRNFYEPQIITTDNTFVSGNCDVVIGIVNNTVYDPLQPELDSFKEELDKYFKNHTSPDVDLGDISGINASVVNIQKEIDRLNEVAKNLNESLIDLQELGKYEQYIKGGSGYIPEAPRDGQAYVRKDGEWVLLSTFL

SEQ ID NO: 5771 - protein, 1241 aa, Artificial Sequence
  SARS-CoV-2/Guangdong/20SF028/2020__EPI_ISL_403936 spike protein (1-1211)(K986P_V987P_T887W_A1020W) Foldon construct
MFVFLVLLPLVSSQCVNLTTRTQLPPAYTNSFTRGVYYPDKVFRSSVLYSTQDLFLPFFSNVTWFHAIHVSGTNGTKRFDNPVLPFNDGVYFASTEKSNIIRGWIFGTTLDSKTQSLLIVNNATNVVIKVCEFQFCNDPFLGVYYHKNNKSWMESEFRVYSSANNCTFEYVSQPFLMDLEGKQGNFKNLREFVFKNIDGYFKIYSKHTPINLVRDLPQGFSALEPLVDLPIGINITRFQTLLALHRSYLTPGDSSSGWTAGAAAYYVGYLQPRTFLLKYNENGTITDAVDCALDPLSETKCTLKSFTVEKGIYQTSNFRVQPTESIVRFPNITNLCPFGEVFNATRFASVYAWNRKRISNCVADYSVLYNSASFSTFKCYGVSPTKLNDLCFTNVYADSFVIRGDEVRQIAPGQTGKIADYNYKLPDDFTGCVIAWNSNNLDSKVGGNYNYLYRLFRKSNLKPFERDISTEIYQAGSTPCNGVEGFNCYFPLQSYGFQPTNGVGYQPYRVVVLSFELLHAPATVCGPKKSTNLVKNKCVNFNFNGLTGTGVLTESNKKFLPFQQFGRDIADTTDAVRDPQTLEILDITPCSFGGVSVITPGTNTSNQVAVLYQDVNCTEVPVAIHADQLTPTWRVYSTGSNVFQTRAGCLIGAEHVNNSYECDIPIGAGICASYQTQTNSPRRARSVASQSIIAYTMSLGAENSVAYSNNSIAIPTNFTISVTTEILPVSMTKTSVDCTMYICGDSTECSNLLLQYGSFCTQLNRALTGIAVEQDKNTQEVFAQVKQIYKTPPIKDFGGFNFSQILPDPSKPSKRSFIEDLLFNKVTLADAGFIKQYGDCLGDIAARDLICAQKFNGLTVLPPLLTDEMIAQYTSALLAGTITSGWWFGAGAALQIPFAMQMAYRFNGIGVTQNVLYENQKLIANQFNSAIGKIQDSLSSTASALGKLQDVVNQNAQALNTLVKQLSSNFGAISSVLNDILSRLDPPEAEVQIDRLITGRLQSLQTYVTQQLIRAAEIRWSANLAATKMSECVLGQSKRVDFCGKGYHLMSFPQSAPHGVVFLHVTYVPAQEKNFTTAPAICHDGKAHFPREGVFVSNGTHWFVTQRNFYEPQIITTDNTFVSGNCDVVIGIVNNTVYDPLQPELDSFKEELDKYFKNHTSPDVDLGDISGINASVVNIQKEIDRLNEVAKNLNESLIDLQELGKYEQYIKGGSGYIPEAPRDGQAYVRKDGEWVLLSTFL

SEQ ID NO: 5772 - protein, 1241 aa, Artificial Sequence
  SARS-CoV-2/Shenzhen/SZTH-001/2020__EPI_ISL_406592 spike protein (1-1211)(K986P_V987P_T887W_A1020W) Foldon construct
MFVFLVLLPLVSSQCVNLTTRTQLPPAYTNSFTRGVYYPDKVFRSSVLHSTQDLFLPFFSNVTWFHAIHVSGTNGTKRFDNPVLPFNDGVYFASTEKSNIIRGWIFGTTLDSKTQSLLIVNNATNVVIKVCEFQFCNDPFLGVYYHKNNKSWMESEFRVYSSANNCTFEYVSQPFLMDLEGKQGNFKNLREFVFKNIDGYFKIYSKHTPINLVRDLPQGFSALEPLVDLPIGINITRFQTLLALHRSYLTPGDSSSGWTAGAAAYYVGYLQPRTFLLKYNENGTITDAVDCALDPLSETKCTLKSFTVEKGIYQTSNFRVQPTESIVRFPNITNLCPFGEVFNATRFASVYAWNRKRISNCVADYSVLYNSASFSTFKCYGVSPTKLNDLCFTNVYADSFVIRGDEVRQIAPGQTGKIADYNYKLPDDFTGCVIAWNSNNLDSKVGGNYNYLYRLFRKSNLKPFERDISTEIYQAGSTPCNGVEGFNCYFPLQSYGFQPTNGVGYQPYRVVVLSFELLHAPATVCGPKKSTNLVKNKCVNFNFNGLTGTGVLTESNKKFLPFQQFGRDIADTTDAVRDPQTLEILDITPCSFGGVSVITPGTNTSNQVAVLYQDVNCTEVPVAIHADQLTPTWRVYSTGSNVFQTRAGCLIGAEHVNNSYECDIPIGAGICASYQTQTNSPRRARSVASQSIIAYTMSLGAENSVAYSNNSIAIPTNFTISVTTEILPVSMTKTSVDCTMYICGDSTECSNLLLQYGSFCTQLNRALTGIAVEQDKNTQEVFAQVKQIYKTPPIKDFGGFNFSQILPDPSKPSKRSFIEDLLFNKVTLADAGFIKQYGDCLGDIAARDLICAQKFNGLTVLPPLLTDEMIAQYTSALLAGTITSGWWFGAGAALQIPFAMQMAYRFNGIGVTQNVLYENQKLIANQFNSAIGKIQDSLSSTASALGKLQDVVNQNAQALNTLVKQLSSNFGAISSVLNDILSRLDPPEAEVQIDRLITGRLQSLQTYVTQQLIRAAEIRWSANLAATKMSECVLGQSKRVDFCGKGYHLMSFPQSAPHGVVFLHVTYVPAQEKNFTTAPAICHDGKAHFPREGVFVSNGTHWFVTQRNFYEPQIITTDNTFVSGNCDVLIGIVNNTVYDPLQPELDSFKEELDKYFKNHTSPDVDLGDISGINASVVNIQKEIDRLNEVAKNLNESLIDLQELGKYEQYIKGGSGYIPEAPRDGQAYVRKDGEWVLLSTFL

SEQ ID NO: 5773 - protein, 1241 aa, Artificial Sequence
  SARS-CoV-2/Shenzhen/SZTH-004/2020__EPI_ISL_406595 spike protein (1-1211)(K986P_V987P_T887W_A1020W) Foldon construct
MFVFLVLLPLVSSQCVNLTTRTQLPPAYTNSFTRGVYYPDKVFRSSVLHSTQDLFLPFFSNVTWFHAIHVSGTNGTKRFDNPVLPFNDGVYFASTEKSNIIRGWIFGTTLDSKTQSLLIVNNATNVVIKVCEFQFCNDPFLGVYYHKNNKSWMESEFRVYSSANNCTFEYVSQPFLMDLEGKQGNFKNLREFVFKNIDGYFKIYSKHTPINLVRDLPQGFSALEPLVDLPIGINITRFQTLLALHRSYLTPGDSSSGWTAGAAAYYVGYLQPRTFLLKYNENGTITDAVDCALDPLSETKCTLKSFTVEKGIYQTSNFRVQPTESIVRFPNITNLCPFGEVFNATRFASVYAWDRKRISNCVAYYSVLYNSASFSTFKCYGVSPTKLNDLCFTNVYADSFVIRGDEVRQIAPGQTGKIADYNYKLPDDFTGCVIAWNSNNLDSKVGGNYNYLYRLFRKSNLKPFERDISTEIYQAGSTPCNGVEGFNCYFPLQSYGFQPTNGVGYQPYRVVVLSFELLHAPATVCGPKKSTNLVKNKCVNFNFNGLTGTGVLTESNKKFLPFQQFGRDIADTTDAVRDPQTLEILDITPCSFGGVSVITPGTNTSNQVAVLYQDVNCTEVPVAIHADQLTPTWRVYSTGSNVFQTRAGCLIGAEHVNNSYECDIPIGAGICASYQTQTNSPRRARSVASQSIIAYTMSLGAENSVAYSNNSIAIPTNFTISVTTEILPVSMTKTSVDCTMYICGDSTECSNLLLQYGSFCTQLNRALTGIAVEQDKNTQEVFAQVKQIYKTPPIKDFGGFNFSQILPDPSKPSKRSFIEDLLFNKVTLADAGFIKQYGDCLGDIAARDLICAQKFNGLTVLPPLLTDEMIAQYTSALLAGTITSGWWFGAGAALQIPFAMQMAYRFNGIGVTQNVLYENQKLIANQFNSAIGKIQDSLSSTASALGKLQDVVNQNAQALNTLVKQLSSNFGAISSVLNDILSRLDPPEAEVQIDRLITGRLQSLQTYVTQQLIRAAEIRWSANLAATKMSECVLGQSKRVDFCGKGYHLMSFPQSAPHGVVFLHVTYVPAQEKNFTTAPAICHDGKAHFPREGVFVSNGTHWFVTQRNFYEPQIITTDNTFVSGNCDVVIGIVNNTVYDPLQPELDSFKEELDKYFKNHTSPDVDLGDISGINASVVNIQKEIDRLNEVAKNLNESLIDLQELGKYEQYIKGGSGYIPEAPRDGQAYVRKDGEWVLLSTFL

SEQ ID NO: 5774 - protein, 1241 aa, Artificial Sequence
  SARS-CoV-2/France/IDF0372/2020__EPI_ISL_406596 spike protein (1-1211)(K986P_V987P_T887W_A1020W) Foldon construct
MFVFLVLLPLVSSQCVNLTTRTQLPPAYTNSFTRGVYYPDKVFRSSVLHSTQDLFLPFFSNVTWFHAIHVSGTNGTKRFDNPVLPFNDGVYFASTEKSNIIRGWIFGTTLDSKTQSLLIVNNATNVVIKVCEFQFCNDPFLGVYYHKNNKSWMESEFRVYSSANNCTFEYVSQPFLMDLEGKQGNFKNLREFVFKNIDGYFKIYSKHTPINLVRDLPQGFSALEPLVDLPIGINITRFQTLLALHRSYLTPGDSSSGWTAGAAAYYVGYLQPRTFLLKYNENGTITDAVDCALDPLSETKCTLKSFTVEKGIYQTSNFRVQPTESIVRFPNITNLCPFGEVFNATRFASVYAWNRKRISNCVADYSFLYNSASFSTFKCYGVSPTKLNDLCFTNVYADSFVIRGDEVRQIAPGQTGKIADYNYKLPDDFTGCVIAWNSNNLDSKVGGNYNYLYRLFRKSNLKPFERDISTEIYQAGSTPCNGVEGFNCYFPLQSYGFQPTNGVGYQPYRVVVLSFELLHAPATVCGPKKSTNLVKNKCVNFNFNGLTGTGVLTESNKKFLPFQQFGRDIADTTDAVRDPQTLEILDITPCSFGGVSVITPGTNTSNQVAVLYQDVNCTEVPVAIHADQLTPTWRVYSTGSNVFQTRAGCLIGAEHVNNSYECDIPIGAGICASYQTQTNSPRRARSVASQSIIAYTMSLGAENSVAYSNNSIAIPTNFTISVTTEILPVSMTKTSVDCTMYICGDSTECSNLLLQYGSFCTQLNRALTGIAVEQDKNTQEVFAQVKQIYKTPPIKDFGGFNFSQILPDPSKPSKRSFIEDLLFNKVTLADAGFIKQYGDCLGDIAARDLICAQKFNGLTVLPPLLTDEMIAQYTSALLAGTITSGWWFGAGAALQIPFAMQMAYRFNGIGVTQNVLYENQKLIANQFNSAIGKIQDSLSSTASALGKLQDVVNQNAQALNTLVKQLSSNFGAISSVLNDILSRLDPPEAEVQIDRLITGRLQSLQTYVTQQLIRAAEIRWSANLAATKMSECVLGQSKRVDFCGKGYHLMSFPQSAPHGVVFLHVTYVPAQEKNFTTAPAICHDGKAHFPREGVFVSNGTHWFVTQRNFYEPQIITTDNTFVSGNCDVVIGIVNNTVYDPLQPELDSFKEELDKYFKNHTSPDVDLGDISGINASVVNIQKEIDRLNEVAKNLNESLIDLQELGKYEQYIKGGSGYIPEAPRDGQAYVRKDGEWVLLSTFL

SEQ ID NO: 5775 - protein, 1241 aa, Artificial Sequence
  SARS-CoV-2/Australia/VIC01/2020__EPI_ISL_406844 spike protein (1-1211)(K986P_V987P_T887W_A1020W) Foldon construct
MFVFLVLLPLVSSQCVNLTTRTQLPPAYTNSFTRGVYYPDKVFRSSVLHSTQDLFLPFFSNVTWFHAIHVSGTNGTKRFDNPVLPFNDGVYFASTEKSNIIRGWIFGTTLDSKTQSLLIVNNATNVVIKVCEFQFCNDPFLGVYYHKNNKSWMESEFRVYSSANNCTFEYVSQPFLMDLEGKQGNFKNLREFVFKNIDGYFKIYSKHTPINLVRDLPQGFSALEPLVDLPIGINITRFQTLLALHRRYLTPGDSSSGWTAGAAAYYVGYLQPRTFLLKYNENGTITDAVDCALDPLSETKCTLKSFTVEKGIYQTSNFRVQPTESIVRFPNITNLCPFGEVFNATRFASVYAWNRKRISNCVADYSVLYNSASFSTFKCYGVSPTKLNDLCFTNVYADSFVIRGDEVRQIAPGQTGKIADYNYKLPDDFTGCVIAWNSNNLDSKVGGNYNYLYRLFRKSNLKPFERDISTEIYQAGSTPCNGVEGFNCYFPLQSYGFQPTNGVGYQPYRVVVLSFELLHAPATVCGPKKSTNLVKNKCVNFNFNGLTGTGVLTESNKKFLPFQQFGRDIADTTDAVRDPQTLEILDITPCSFGGVSVITPGTNTSNQVAVLYQDVNCTEVPVAIHADQLTPTWRVYSTGSNVFQTRAGCLIGAEHVNNSYECDIPIGAGICASYQTQTNSPRRARSVASQSIIAYTMSLGAENSVAYSNNSIAIPTNFTISVTTEILPVSMTKTSVDCTMYICGDSTECSNLLLQYGSFCTQLNRALTGIAVEQDKNTQEVFAQVKQIYKTPPIKDFGGFNFSQILPDPSKPSKRSFIEDLLFNKVTLADAGFIKQYGDCLGDIAARDLICAQKFNGLTVLPPLLTDEMIAQYTSALLAGTITSGWWFGAGAALQIPFAMQMAYRFNGIGVTQNVLYENQKLIANQFNSAIGKIQDSLSSTASALGKLQDVVNQNAQALNTLVKQLSSNFGAISSVLNDILSRLDPPEAEVQIDRLITGRLQSLQTYVTQQLIRAAEIRWSANLAATKMSECVLGQSKRVDFCGKGYHLMSFPQSAPHGVVFLHVTYVPAQEKNFTTAPAICHDGKAHFPREGVFVSNGTHWFVTQRNFYEPQIITTDNTFVSGNCDVVIGIVNNTVYDPLQPELDSFKEELDKYFKNHTSPDVDLGDISGINASVVNIQKEIDRLNEVAKNLNESLIDLQELGKYEQYIKGGSGYIPEAPRDGQAYVRKDGEWVLLSTFL

SEQ ID NO: 5776 - protein, 1241 aa, Artificial Sequence
  SARS-CoV-2/Germany/BavPat1/2020__EPI_ISL_406862 spike protein (1-1211)(K986P_V987P_T887W_A1020W) Foldon construct
MFVFLVLLPLVSSQCVNLTTRTQLPPAYTNSFTRGVYYPDKVFRSSVLHSTQDLFLPFFSNVTWFHAIHVSGTNGTKRFDNPVLPFNDGVYFASTEKSNIIRGWIFGTTLDSKTQSLLIVNNATNVVIKVCEFQFCNDPFLGVYYHKNNKSWMESEFRVYSSANNCTFEYVSQPFLMDLEGKQGNFKNLREFVFKNIDGYFKIYSKHTPINLVRDLPQGFSALEPLVDLPIGINITRFQTLLALHRSYLTPGDSSSGWTAGAAAYYVGYLQPRTFLLKYNENGTITDAVDCALDPLSETKCTLKSFTVEKGIYQTSNFRVQPTESIVRFPNITNLCPFGEVFNATRFASVYAWNRKRISNCVADYSVLYNSASFSTFKCYGVSPTKLNDLCFTNVYADSFVIRGDEVRQIAPGQTGKIADYNYKLPDDFTGCVIAWNSNNLDSKVGGNYNYLYRLFRKSNLKPFERDISTEIYQAGSTPCNGVEGFNCYFPLQSYGFQPTNGVGYQPYRVVVLSFELLHAPATVCGPKKSTNLVKNKCVNFNFNGLTGTGVLTESNKKFLPFQQFGRDIADTTDAVRDPQTLEILDITPCSFGGVSVITPGTNTSNQVAVLYQGVNCTEVPVAIHADQLTPTWRVYSTGSNVFQTRAGCLIGAEHVNNSYECDIPIGAGICASYQTQTNSPRRARSVASQSIIAYTMSLGAENSVAYSNNSIAIPTNFTISVTTEILPVSMTKTSVDCTMYICGDSTECSNLLLQYGSFCTQLNRALTGIAVEQDKNTQEVFAQVKQIYKTPPIKDFGGFNFSQILPDPSKPSKRSFIEDLLFNKVTLADAGFIKQYGDCLGDIAARDLICAQKFNGLTVLPPLLTDEMIAQYTSALLAGTITSGWWFGAGAALQIPFAMQMAYRFNGIGVTQNVLYENQKLIANQFNSAIGKIQDSLSSTASALGKLQDVVNQNAQALNTLVKQLSSNFGAISSVLNDILSRLDPPEAEVQIDRLITGRLQSLQTYVTQQLIRAAEIRWSANLAATKMSECVLGQSKRVDFCGKGYHLMSFPQSAPHGVVFLHVTYVPAQEKNFTTAPAICHDGKAHFPREGVFVSNGTHWFVTQRNFYEPQIITTDNTFVSGNCDVVIGIVNNTVYDPLQPELDSFKEELDKYFKNHTSPDVDLGDISGINASVVNIQKEIDRLNEVAKNLNESLIDLQELGKYEQYIKGGSGYIPEAPRDGQAYVRKDGEWVLLSTFL

SEQ ID NO: 5777 - protein, 1241 aa, Artificial Sequence
  SARS-CoV-2/Wuhan/HBCDC-HB-02/2020__EPI_ISL_412978 spike protein (1-1211)(K986P_V987P_T887W_A1020W) Foldon construct
MFVFLVLLPLVSSQCVNLTTRTQLPPAYTNSFTRGVYYPDKVFRSSVLHSTQDLFLPFFSNVTWFHAIHVSGTNGTKRFDNPVLPFNDGVYFASTEKSNIIRGWIFGTTLDSKTQSLLIVNNATNVVIKVCEFQFCNDPFLGVYYHKNNKSWMESEFRVYSSANNCTFEYVSQPFLMDLEGKQGNFKNLREFVFKNIDGYFKIYSKHTPINLVRDLPQGFSALEPLVDLPIGINITRFQTLLALHRSYLTPGDSSSGWTAGAAAYYVGYLQPRTFLLKYNENGTITDAVDCALDPLSETKCTLKSFTVEKGIYQTSNFRVQPTESIVRFPNITNLCPFGEVFNATRFASVYAWNRKRISNCVADYSVLYNSASFSTFKCYGVSPTKLNDLCFTNVYADSFVIRGDEVRQIAPGQTGKIADYNYKLPDDFTGCVIAWNSNNLDSKVGGNYNYLYRLFRKSNLKPFERDISTEIYQAGSTPCNGVEGFNCYFPLQSYGFQPTNGVGYQPYRVVVLSFELLHAPATVCGPKKSTNLVKNKCVNFNFNGLTGTGVLTESNKKFLPFQQFGRDIADTTDAVRDPQTLEILDITPCSFGGVSVITPGTNTSNQVAVLYQDVNCTEVPVAIHADQLTPTWRVYSTGSNVFQTRAGCLIGAEHVNNSYECDIPIGAGICASYQTQTNSPRRARSVASQSIIAYTMSLGAENSVAYSNNSIAIPTNFTISVTTEILPVSMTKTSVDCTMYICGDSTECSNFLLQYGSFCTQLNRALTGIAVEQDKNTQEVFAQVKQIYKTPPIKDFGGFNFSQILPDPSKPSKRSFIEDLLFNKVTLADAGFIKQYGDCLGDIAARDLICAQKFNGLTVLPPLLTDEMIAQYTSALLAGTITSGWWFGAGAALQIPFAMQMAYRFNGIGVTQNVLYENQKLIANQFNSAIGKIQDSLSSTASALGKLQDVVNQNAQALNTLVKQLSSNFGAISSVLNDILSRLDPPEAEVQIDRLITGRLQSLQTYVTQQLIRAAEIRWSANLAATKMSECVLGQSKRVDFCGKGYHLMSFPQSAPHGVVFLHVTYVPAQEKNFTTAPAICHDGKAHFPREGVFVSNGTHWFVTQRNFYEPQIITTDNTFVSGNCDVVIGIVNNTVYDPLQPELDSFKEELDKYFKNHTSPDVDLGDISGINASVVNIQKEIDRLNEVAKNLNESLIDLQELGKYEQYIKGGSGYIPEAPRDGQAYVRKDGEWVLLSTFL

SEQ ID NO: 5778 - protein, 1241 aa, Artificial Sequence
  SARS-CoV-2/Australia/QLD02/2020__EPI_ISL_407896 spike protein (1-1211)(K986P_V987P_T887W_A1020W) Foldon construct
MFVFLVLLPLVSSQCVNLTTRTQLPPAYTNSFTRGVYYPDKVFRSSVLHSTQDLFLPFFSNVTWFHAIHVSGTNGTKRFDNPVLPFNDGVYFASTEKSNIIRGWIFGTTLDSKTQSLLIVNNATNVVIKVCEFQFCNDPFLGVYYHKNNKSWMESEFRVYSSANNCTFEYVSQPFLMDLEGKQGNFKNLREFVFKNIDGYFKIYSKHTPINLVRDLPQGFSALEPLVDLPIGINITRFQTLLALHRSYLTPGDSSSGWTAGAAAYYVGYLQPRTFLLKYNENGTITDAVDCALDPLSETKCTLKSFTVEKGIYQTSNFRVQPTESIVRFPNITNLCPFGEVFNATRFASVYAWNRKRISNCVADYSVLYNSASFSTFKCYGVSPTKLNDLCFTNVYADSFVIRGDEVRQIAPGQTGKIADYNYKLPDDFTGCVIAWNSNNLDSKVGGNYNYLYRLFRKSNLKPFERDISTEIYQAGSTPCNGVEGFNCYFPLQSYGFQPTNGVGYQPYRVVVLSFELLHAPATVCGPKKSTNLVKNKCVNFNFNGLTGTGVLTESNKKFLPFQQFGRDIADTTDAVRDPQTLEILDITPCSFGGVSVITPGTNTSNQVAVLYQDVNCTEVPVAIHADQLTPTWRVYSTGSNVFQTRAGCLIGAEHVNNSYECDIPIGAGICASYQTQTNSPRRARSVASQSIIAYTMSLGAENSVAYSNNSIAIPTNFTISVTTEILPVSMTKTSVDCTMYICGDSTECSNLLLQYGSFCTQLNRALTGIAVEQDKNTQEVFAQVKQIYKTPPIKDFGGFNFSQILPDPSKPSKRSFIEDLLFNKVTLADAGFIKQYGDCLGDIAARDLICAQKFNGLTVLPPLLTDEMIAQYTSALLAGTITSGWWFGAGAALQIPFAMQMAYRFNGIGVTQNVLYENQKLIANQFNSAIGKIQDSLSSTASALGKLQDVVNQNAQALNTLVKQLSSNFGAISSVLNDILSRLDPPEAEVQIDRLITGRLQSLQTYVTQQLIRAAEIRWSANLAATKMSECVLGQSKRVDFCGKGYHLMSFPQSAPHGVVFLHVTYVPAQEKNFTTAPAICHDGKAHFPREGVFVSNGTHWFVTQRNFYEPQIITTDNTFVSGNCDVVIGIVNNTVYDPLQLELDSFKEELDKYFKNHTSPDVDLGDISGINASVVNIQKEIDRLNEVAKNLNESLIDLQELGKYEQYIKGGSGYIPEAPRDGQAYVRKDGEWVLLSTFL

SEQ ID NO: 5779 - protein, 1241 aa, Artificial Sequence
  SARS-CoV-2/India/1-31/2020__EPI_ISL_413523 spike protein (1-1211)(K986P_V987P_T887W_A1020W) Foldon construct
MFVFLVLLPLVSSQCVNLTTRTQLPPAYTNSFTRGVYYPDKVFRSSVLHSTQDLFLPFFSNVTWFHAIHVSGTNGTKRFDNPVLPFNDGVYFASTEKSNIIRGWIFGTTLDSKTQSLLIVNNATNVVIKVCEFQFCNDPFLGVYYHKNNKSWMESEFRVYSSANNCTFEYVSQPFLMDLEGKQGNFKNLREFVFKNIDGYFKIYSKHTPINLVRDLPQGFSALEPLVDLPIGINITRFQTLLALHRSYLTPGDSSSGWTAGAAAYYVGYLQPRTFLLKYNENGTITDAVDCALDPLSETKCTLKSFTVEKGIYQTSNFRVQPTESIVRFPNITNLCPFGEVFNATRFASVYAWNRKRISNCVADYSVLYNSASFSTFKCYGVSPTKLNDLCFTNVYADSFVIRGDEVRQIAPGQTGKIADYNYKLPDDFTGCVIAWNSNNLDSKVGGNYNYLYRLFRKSNLKPFERDISTEIYQAGSTPCNGVEGFNCYFPLQSYGFQPTNGVGYQPYRVVVLSFELLHAPATVCGPKKSTNLVKNKCVNFNFNGLTGTGVLTESNKKFLPFQQFGRDIADTTDAVRDPQTLEILDITPCSFGGVSVITPGTNTSNQVAVLYQDVNCTEVPVAIHADQLTPTWRVYSTGSNVFQTRAGCLIGAEHVNNSYECDIPIGAGICASYQTQTNSPRRARSVASQSIIAYTMSLGAENSVAYSNNSIAIPTNFTISVTTEILPVSMTKTSVDCTMYICGDSTECSNLLLQYGSFCTQLNRALTGIAVEQDKNTQEVFAQVKQIYKTPPIKDFGGFNFSQILPDPSKPSKRSFIEDLLFNKVTLADAGFIKQYGDCLGDIAARDLICAQKFNGLTVLPPLLTDEMIAQYTSALLAGTITSGWWFGAGAALQIPFAMQMAYRFNGIGVTQNVLYENQKLIANQFNSVIGKIQDSLSSTASALGKLQDVVNQNAQALNTLVKQLSSNFGAISSVLNDILSRLDPPEAEVQIDRLITGRLQSLQTYVTQQLIRAAEIRWSANLAATKMSECVLGQSKRVDFCGKGYHLMSFPQSAPHGVVFLHVTYVPAQEKNFTTAPAICHDGKAHFPREGVFVSNGTHWFVTQRNFYEPQIITTDNTFVSGNCDVVIGIVNNTVYDPLQPELDSFKEELDKYFKNHTSPDVDLGDISGINASVVNIQKEIDRLNEVAKNLNESLIDLQELGKYEQYIKGGSGYIPEAPRDGQAYVRKDGEWVLLSTFL

SEQ ID NO: 5780 - protein, 1241 aa, Artificial Sequence
  SARS-CoV-2/Guangdong/GD2020087-P0008/2020__EPI_ISL_413863 spike protein (1-1211)(K986P_V987P_T887W_A1020W) Foldon construct
MFVFLVLLPLVSSQCVNLTTRTQLPPAYTNSFTRGVYYPDKVFRSSVLHSTQDLFLPFFSNVTWFHAIHVSGTNGTKRFDNPVLPFNDGVYFASTEKSNIIRGWIFGTTLDSKTQSLLIVNNATNVVIKVCEFQFCNDPFLGVYYHKNNKSWMESEFRVYSSANNCTFEYVSQPFLMDLEGKQGNFKNLREFVFKNIDGYFKIYSKHTPINLVRDLPQGFSALEPLVDLPIGINITRFQTLLALHRSYLTPGDSSSGWTAGAAAYYVGYLQPRTFLLKYNENGTITDAVDCALDPLSETKCTLKSFTVEKGIYQTSNFRVQPTESIVRFPNITNLCPFGEVFNATRFASVYAWNRKRISNCVADYSVLYNSASFSTFKCYGVSPTKLNDLCFTNVYADSFVIRGDEVREIAPGQTGKIADYNYKLPDDFTGCVIAWNSNNLDSKVGGNYNYLYRLFRKSNLKPFERDISTEIYQAGSTPCNGVEGFNCYFPLQSYGFQPTNGVGYQPYRVVVLSFELLHAPATVCGPKKSTNLVKNKCVNFNFNGLTGTGVLTESNKKFLPFQQFGRDIADTTDAVRDPQTLEILDITPCSFGGVSVITPGTNTSNQVAVLYQDVNCTEVPVAIHADQLTPTWRVYSTGSNVFQTRAGCLIGAEHVNNSYECDIPIGAGICASYQTQTNSPRRARSVASQSIIAYTMSLGAENSVAYSNNSIAIPTNFTISVTTEILPVSMTKTSVDCTMYICGDSTECSNLLLQYGSFCTQLNRALTGIAVEQDKNTQEVFAQVKQIYKTPPIKDFGGFNFSQILPDPSKPSKRSFIEDLLFNKVTLADAGFIKQYGDCLGDIAARDLICAQKFNGLTVLPPLLTDEMIAQYTSALLAGTITSGWWFGAGAALQIPFAMQMAYRFNGIGVTQNVLYENQKLIANQFNSAIGKIQDSLSSTASALGKLQDVVNQNAQALNTLVKQLSSNFGAISSVLNDILSRLDPPEAEVQIDRLITGRLQSLQTYVTQQLIRAAEIRWSANLAATKMSECVLGQSKRVDFCGKGYHLMSFPQSAPHGVVFLHVTYVPAQEKNFTTAPAICHDGKAHFPREGVFVSNGTHWFVTQRNFYEPQIITTDNTFVSGNCDVVIGIVNNTVYDPLQPELDSFKEELDKYFKNHTSPDVDLGDISGINASVVNIQKEIDRLNEVAKNLNESLIDLQELGKYEQYIKGGSGYIPEAPRDGQAYVRKDGEWVLLSTFL

SEQ ID NO: 5781 - protein, 1241 aa, Artificial Sequence
  SARS-CoV-2/Sweden/01/2020__EPI_ISL_411951 spike protein (1-1211)(K986P_V987P_T887W_A1020W) Foldon construct
MFVFLVLLPLVSSQCVNLTTRTQLPPAYTNSFTRGVYYPDKVFRSSVLHSTQDLFLPFFSNVTWFHAIHVSGTNGTKRFDNPVLPFNDGVYFASTEKSNIIRGWIFGTTLDSKTQSLLIVNNATNVVIKVCEFQFCNDPFLGVYYHKNNKSWMESEFRVYSSANNCTFEYVSQPFLMDLEGKQGNFKNLREFVFKNIDGYFKIYSKHTPINLVRDLPQGFSALEPLVDLPIGINITRFQTLLALHRSYLTPGDSSSGWTAGAAAYYVGYLQPRTFLLKYNENGTITDAVDCALDPLSETKCTLKSFTVEKGIYQTSNFRVQPTESIVRFPNITNLCPFGEVFNATRFASVYAWNRKRISNCVADYSVLYNSASFSTFKCYGVSPTKLNDLCFTNVYADSFVIRGDEVRQIAPGQTGKIADYNYKLPDDFTGCVIAWNSNNLDSKVGGNYNYLYRLFRKSNLKPFERDISTEIYQAGSTPCNGVEGFNCYFPLQSYGFQPTNGVGYQPYRVVVLSFELLHAPATVCGPKKSTNLVKNKCVNFNFNGLTGTGVLTESNKKFLPFQQFGRDIADTTDAVRDPQTLEILDITPCSFGGVSVITPGTNTSNQVAVLYQDVNCTEVPVAIHADQLTPTWRVYSTGSNVFQTRAGCLIGAEHVNNSYECDIPIGAGICASYQTQTNSPRRARSVASQSIIAYTMSLGAENSVAYSNNSIAIPTNFTISVTTEILPVSMTKTSVDCTMYICGDSTECSNLLLQYGSFCTQLNRALTGIAVEQDKNTQEVFAQVKQIYKTPPIKDCGGFNFSQILPDPSKPSKRSFIEDLLFNKVTLADAGFIKQYGDCLGDIAARDLICAQKFNGLTVLPPLLTDEMIAQYTSALLAGTITSGWWFGAGAALQIPFAMQMAYRFNGIGVTQNVLYENQKLIANQFNSAIGKIQDSLSSTASALGKLQDVVNQNAQALNTLVKQLSSNFGAISSVLNDILSRLDPPEAEVQIDRLITGRLQSLQTYVTQQLIRAAEIRWSANLAATKMSECVLGQSKRVDFCGKGYHLMSFPQSAPHGVVFLHVTYVPAQEKNFTTAPAICHDGKAHFPREGVFVSNGTHWFVTQRNFYEPQIITTDNTFVSGNCDVVIGIVNNTVYDPLQPELDSFKEELDKYFKNHTSPDVDLGDISGINASVVNIQKEIDRLNEVAKNLNESLIDLQELGKYEQYIKGGSGYIPEAPRDGQAYVRKDGEWVLLSTFL

SEQ ID NO: 5782 - protein, 1241 aa, Artificial Sequence
  SARS-CoV-2/Tianmen/HBCDC-HB-07/2020__EPI_ISL_412983 spike protein (1-1211)(K986P_V987P_T887W_A1020W) Foldon construct
MFVFLVLLPLVSSQCVNLTTRTQLPPAYTNSFTRGVYYPDKVFRSSVLHSTQDLFLPFFSNVTWFHAIHVSGTNGTKRFDNPVLPFNDGVYFASTEKSNIIRGWIFGTTLDSKTQSLLIVNNATNVVIKVCEFQFCNDPFLGVYYHKNNKSWMESEFRVYSSANNCTFEYVSQPFLMDLEGKQGNFKNLREFVFKNIDGYFKIYSKHTPINLVRDLPQGFSALEPLVDLPIGINITRFQTLLALHRSYLTPGDSSSGWTAGAAAYYVGYLQPRTFLLKYNENGTITDAVDCALDPLSETKCTLKSFTVEKGIYQTSNFRVQPTESIVRFPNITNLCPFGEVFNATRFASVYAWNRKRISNCVADYSVLYNSASFSTFKCYGVSPTKLNDLCFTNVYADSFVIRGDEVRQIAPGQTGKIADYNYKLPDDFTGCVIAWNSNNLDSKVGGNYNYLYRLFRKSNLKPFERDISTEIYQAGSTPCNGVEGFNCYFPLQSYGFQPTNGVGYQPYRVVVLSFELLHAPATVCGPKKSTNLVKNKCVNFNFNGLTGTGVLTESNKKFLPFQQFGRDIADTTDAVRDPQTLEILDITPCSFGGVSVITPGTNTSNQVAVLYQDLNCTEVPVAIHADQLTPTWRVYSTGSNVFQTRAGCLIGAEHVNNSYECDIPIGAGICASYQTQTNSPRRARSVASQSIIAYTMSLGAENSVAYSNNSIAIPTNFTISVTTEILPVSMTKTSVDCTMYICGDSTECSNLLLQYGSFCTQLNRALTGIAVEQDKNTQEVFAQVKQIYKTPPIKDFGGFNFSQILPDPSKPSKRSFIEDLLFNKVTLADAGFIKQYGDCLGDIAARDLICAQKFNGLTVLPPLLTDEMIAQYTSALLAGTITSGWWFGAGAALQIPFAMQMAYRFNGIGVTQNVLYENQKLIANQFNSAIGKIQDSLSSTASALGKLQDVVNQNAQALNTLVKQLSSNFGAISSVLNDILSRLDPPEAEVQIDRLITGRLQSLQTYVTQQLIRAAEIRWSANLAATKMSECVLGQSKRVDFCGKGYHLMSFPQSAPHGVVFLHVTYVPAQEKNFTTAPAICHDGKAHFPREGVFVSNGTHWFVTQRNFYEPQIITTDNTFVSGNCDVVIGIVNNTVYDPLQPELDSFKEELDKYFKNHTSPDVDLGDISGINASVVNIQKEIDRLNEVAKNLNESLIDLQELGKYEQYIKGGSGYIPEAPRDGQAYVRKDGEWVLLSTFL

SEQ ID NO: 5783 - protein, 1241 aa, Artificial Sequence
  SARS-CoV-2/Hong Kong/case42_VM20002493/2020__EPI_ISL_414527 spike protein (1-1211)(K986P_V987P_T887W_A1020W) Foldon construct
MFVFLVLLPLVSSQCVNLTTRTQLPPAYTNSFTRGVYYPDKVFRSSVLHSTQDLFLPFFSNVTWFHAIHVSGTNGTKRFDNPVLPFNDGVYFASTEKSNIIRGWIFGTTLDSKTQSLLIVNNATNVVIKVCEFQFCNDPFLGVYYHKNNKSWMESEFRVYSSANNCTFEYVSQPFLMDLEGKQGNFKNLREFVFKNIDGYFKIYSKHTPINLVRDLPQGFSALEPLVDLPIGINITRFQTLLALHRSYLTPGDSSSGWTAGAAAYYVGYLQPRTFLLKYNENGTITDAVDCALDPLSETKCTLKSFTVEKGIYQTSNFRVQPTESIVRFPNITNLCPFGEVFNATRFASVYAWNRKRISNCVADYSVLYNSASFSTFKCYGVSPTKLNDLCFTNVYADSFVIRGDEVRQIAPGQTGKIADYNYKLPDDFTGCVIAWNSNNLDSKVGGNYNYLYRLFRKSNLKPFERDISTEIYQAGSTPCNGVEGFNCYFPLQSYGFQPTNGVGYQPYRVVVLSFELLHAPATVCGPKKSTNLVKNKCVNFNFNGLTGTGVLTESNKKFLPFQQFGRDIADTTDAVRDPQTLEILDITPCSFGGVSVITPGTNTSNQVAVLYQDVNCTEVPVAIHADQLTPTWRVYSTGSNVFQTRAGCLIGAEHVNNSYECDIPIGAGICASYQTQTNSPRRARSVASQSIIAYTMSLGAENSVAYSNNSIAIPTNFAISVTTEILPVSMTKTSVDCTMYICGDSTECSNLLLQYGSFCTQLNRALTGIAVEQDKNTQEVFAQVKQIYKTPPIKDFGGFNFSQILPDPSKPSKRSFIEDLLFNKVTLADAGFIKQYGDCLGDIAARDLICAQKFNGLTVLPPLLTDEMIAQYTSALLAGTITSGWWFGAGAALQIPFAMQMAYRFNGIGVTQNVLYENQKLIANQFNSAIGKIQDSLSSTASALGKLQDVVNQNAQALNTLVKQLSSNFGAISSVLNDILSRLDPPEAEVQIDRLITGRLQSLQTYVTQQLIRAAEIRWSANLAATKMSECVLGQSKRVDFCGKGYHLMSFPQSAPHGVVFLHVTYVPAQEKNFTTAPAICHDGKAHFPREGVFVSNGTHWFVTQRNFYEPQIITTDNTFVSGNCDVVIGIVNNTVYDPLQPELDSFKEELDKYFKNHTSPDVDLGDISGINASVVNIQKEIDRLNEVAKNLNESLIDLQELGKYEQYIKGGSGYIPEAPRDGQAYVRKDGEWVLLSTFL

SEQ ID NO: 5784 - protein, 1241 aa, Artificial Sequence
  SARS-CoV-2/USA/CruiseA-23/2020__EPI_ISL_414482 spike protein (1-1211)(K986P_V987P_T887W_A1020W) Foldon construct
MFVFLVLLPLVSSQCVNLTTRTQLPPAYTNSFTRGVYYPDKVFRSSVLHSTQDLFLPFFSNVTWFHAIHVSGTNGTKRFDNPVLPFNDGVYFASTEKSNIIRGWIFGTTLDSKTQSLLIVNNATNVVIKVCEFQFCNDPFLGVYYHKNNKSWMESEFRVYSSANNCTFEYVSQPFLMDLEVKQGNFKNLREFVFKNIDGYFKIYSKHTPINLVRDLPQGFSALEPLVDLPIGINITRFQTLLALHRSYLTPGDSSSGWTAGAAAYYVGYLQPRTFLLKYNENGTITDAVDCALDPLSETKCTLKSFTVEKGIYQTSNFRVQPTESIVRFPNITNLCPFGEVFNATRFASVYAWNRKRISNCVADYSVLYNSASFSTFKCYGVSPTKLNDLCFTNVYADSFVIRGDEVRQIAPGQTGKIADYNYKLPDDFTGCVIAWNSNNLDSKVGGNYNYLYRLFRKSNLKPFERDISTEIYQAGSTPCNGVEGFNCYFPLQSYGFQPTNGVGYQPYRVVVLSFELLHAPATVCGPKKSTNLVKNKCVNFNFNGLTGTGVLTESNKKFLPFQQFGRDIADTTDAVRDPQTLEILDITPCSFGGVSVITPGTNTSNQVAVLYQDVNCTEVPVAIHADQLTPTWRVYSTGSNVFQTRAGCLIGAEHVNNSYECDIPIGAGICASYQTQTNSPRRARSVASQSIIAYTMSLGAENSVAYSNNSIAIPTNFTISVTTEILPVSMTKTSVDCTMYICGDSTECSNLLLQYGSFCTQLNRALTGIAVEQDKNTQEVFAQVKQIYKTPPIKDFGGFNFSQILPDPSKPSKRSFIEDLLFNKVTLADAGFIKQYGDCLGDIAARDLICAQKFNGLTVLPPLLTDEMIAQYTSALLAGTITSGWWFGAGAALQIPFAMQMAYRFNGIGVTQNVLYENQKLIANQFNSAIGKIQDSLSSTASALGKLQDVVNQNAQALNTLVKQLSSNFGAISSVLNDILSRLDPPEAEVQIDRLITGRLQSLQTYVTQQLIRAAEIRWSANLAATKMSECVLGQSKRVDFCGKGYHLMSFPQSAPHGVVFLHVTYVPAQEKNFTTAPAICHDGKAHFPREGVFVSNGTHWFVTQRNFYEPQIITTDNTFVSGNCDVVIGIVNNTVYDPLQPELDSFKEELDKYFKNHTSPDVDLGDISGINASVVNIQKEIDRLNEVAKNLNESLIDLQELGKYEQYIKGGSGYIPEAPRDGQAYVRKDGEWVLLSTFL

SEQ ID NO: 5785 - protein, 1241 aa, Artificial Sequence
  SARS-CoV-2/Hong Kong/case85_VM20002868/2020__EPI_ISL_414519 spike protein (1-1211)(K986P_V987P_T887W_A1020W) Foldon construct
MFVFLVLVPLVSSQCVNLTTRTQLPPAYTNSFTRGVYYPDKVFRSSVLHSTQDLFLPFFSNVTWFHAIHVSGTNGTKRFDNPVLPFNDGVYFASTEKSNIIRGWIFGTTLDSKTQSLLIVNNATNVVIKVCEFQFCNDPFLGVYYHKNNKSWMESEFRVYSSANNCTFEYVSQPFLMDLEGKQGNFKNLREFVFKNIDGYFKIYSKHTPINLVRDLPQGFSALEPLVDLPIGINITRFQTLLALHRSYLTPGDSSSGWTAGAAAYYVGYLQPRTFLLKYNENGTITDAVDCALDPLSETKCTLKSFTVEKGIYQTSNFRVQPTESIVRFPNITNLCPFGEVFNATRFASVYAWNRKRISNCVADYSVLYNSASFSTFKCYGVSPTKLNDLCFTNVYADSFVIRGDEVRQIAPGQTGKIADYNYKLPDDFTGCVIAWNSNNLDSKVGGNYNYLYRLFRKSNLKPFERDISTEIYQAGSTPCNGVEGFNCYFPLQSYGFQPTNGVGYQPYRVVVLSFELLHAPATVCGPKKSTNLVKNKCVNFNFNGLTGTGVLTESNKKFLPFQQFGRDIADTTDAVRDPQTLEILDITPCSFGGVSVITPGTNTSNQVAVLYQDVNCTEVPVAIHADQLTPTWRVYSTGSNVFQTRAGCLIGAEHVNNSYECDIPIGAGICASYQTQTNSPRRARSVASQSIIAYTMSLGAENSVAYSNNSIAIPTNFTISVTTEILPVSMTKTSVDCTMYICGDSTECSNLLLQYGSFCTQLNRALTGIAVEQDKNTQEVFAQVKQIYKTPPIKDFGGFNFSQILPDPSKPSKRSFIEDLLFNKVTLADAGFIKQYGDCLGDIAARDLICAQKFNGLTVLPPLLTDEMIAQYTSALLAGTITSGWWFGAGAALQIPFAMQMAYRFNGIGVTQNVLYENQKLIANQFNSAIGKIQDSLSSTASALGKLQDVVNQNAQALNTLVKQLSSNFGAISSVLNDILSRLDPPEAEVQIDRLITGRLQSLQTYVTQQLIRAAEIRWSANLAATKMSECVLGQSKRVDFCGKGYHLMSFPQSAPHGVVFLHVTYVPAQEKNFTTAPAICHDGKAHFPREGVFVSNGTHWFVTQRNFYEPQIITTDNTFVSGNCDVVIGIVNNTVYDPLQPELDSFKEELDKYFKNHTSPDVDLGDISGINASVVNIQKEIDRLNEVAKNLNESLIDLQELGKYEQYIKGGSGYIPEAPRDGQAYVRKDGEWVLLSTFL

SEQ ID NO: 5786 - protein, 1241 aa, Artificial Sequence; identical to SEQ ID NO: 5776
  SARS-CoV-2/England/200990660/2020__EPI_ISL_414523 spike protein (1-1211)(K986P_V987P_T887W_A1020W) Foldon construct

SEQ ID NO: 5787 - protein, 1241 aa, Artificial Sequence
  SARS-CoV-2/Australia/NSW09/2020__EPI_ISL_413595 spike protein (1-1211)(K986P_V987P_T887W_A1020W) Foldon construct
MFVFLVLLPLVSSQCVNLTTRTQLPPAYTNSFTRGVYYPDKVFRSSVLHSTQDLFLPFFSNVTWFHAIHVSGTNGTKRFDNPVLPFNDGVYFASTEKSNIIRGWIFGTTLDSKTQSLLIVNNATNVVIKVCEFQFCNDPFLGVYYHKNNKSWMESEFRVYSSANNCTFEYVSQPFLMDLEGKQGNFKNLREFVFKNIDGYFKIYSKHTPINLVRDLPQGFSALEPLVDLPIGINITRFQTLLALHRSYLTPGDSSSGWTAGAAAYYVGYLQPRTFLLKYNENGTITDAVDCALDPLSETKCTLKSFTVEKGIYQTSNFRVQPTESIVRFPNITNLCPFGEVFNATRFASVYAWNRKRISNCVADYSVLYNSASFSTFKCYGVSPTKLNDLCFTNVYADSFVIRGDEVRQIAPGQTGKIADYNYKLPDDFTGCVIAWNSNNLDSKVGGNYNYLYRLFRKSNLKPFERDISTEIYQAGSTPCNGVEGFNCYFPLQSYGFQPTNGVGYQPYRVVVLSFELLHAPATVCGPKKSTNLVKNKCVNFNFNGLTGTGVLTESNKKFLPFQQFGRDIADTTDAVRDPQTLEILDITPCSFGGVSVITPGTNTSNQVAVLYQDVNCTEVPVAIHADQLTPTWRVYSTGSNVFQTRAGCLIGAEHVNNSYECDIPIGAGICASYQTQTNSPRRARSVASQSIIAYTMSLGAENSVAYSNNSIAIPTNFTISVTTEILPVSMTKTSVDCTMYICGDSTECSNLLLQYGSFCTQLNRALTGIAVEQDKNTQEVFAQVKQIYKTPPIKDFGGFNFSQILPDPSKPSKRSFIEDLLFNKVTLADAGFIKQYGDCLGDIAARDLICAQKFNGLTVLPPLLTDEMIAQYTSALLAGTITSGWWFGAGAALQIPFAMQMAYRFNGIGVTQNVLYENQKLIANQFNSAIGKIQDSLSFTASALGKLQDVVNQNAQALNTLVKQLSSNFGAISSVLNDILSRLDPPEAEVQIDRLITGRLQSLQTYVTQQLIRAAEIRWSANLAATKMSECVLGQSKRVDFCGKGYHLMSFPQSAPHGVVFLHVTYVPAQEKNFTTAPAICHDGKAHFPREGVFVSNGTHWFVTQRNFYEPQIITTDNTFVSGNCDVVIGIVNNTVYDPLQPELDSFKEELDKYFKNHTSPDVDLGDISGINASVVNIQKEIDRLNEVAKNLNESLIDLQELGKYEQYIKGGSGYIPEAPRDGQAYVRKDGEWVLLSTFL

SEQ ID NO: 5788 - protein, 1241 aa, Artificial Sequence; identical to SEQ ID NO: 5768
  SARS-CoV-2/Australia/NSW10/2020__EPI_ISL_413596 spike protein (1-1211)(K986P_V987P_T887W_A1020W) Foldon construct

SEQ ID NO: 5789 - protein, 1241 aa, Artificial Sequence
  SARS-CoV-2/Switzerland/1000477797/2020__EPI_ISL_413023 spike protein (1-1211)(K986P_V987P_T887W_A1020W) Foldon construct
MFVFLVLLPLVSSQCVNLTTRTQLPPAYTNSFTRGVYYPDKVFRSSVLHSTQDLFLPFFSNVTWFHAIHVSGTNGTKRFDNPVLPFNDGVYFASTEKSNIIRGWIFGTTLDSKTQSLLIVNNATNVVIKVCEFQFCNDPFLGVYYHKNNKSWMESEFRVYSSANNCTFEYVSQPFLMDLEGKQGNFKNLREFVFKNIDGYFNIYSKHTPINLVRDLPQGFSALEPLVDLPIGINITRFQTLLALHRSYLTPGDSSSGWTAGAAAYYVGYLQPRTFLLKYNENGTITDAVDCALDPLSETKCTLKSFTVEKGIYQTSNFRVQPTESIVRFPNITNLCPFGEVFNATRFASVYAWNRKRISNCVADYSVLYNSASFSTFKCYGVSPTKLNDLCFTNVYADSFVIRGDEVRQIAPGQTGKIADYNYKLPDDFTGCVIAWNSNNLDSKVGGNYNYLYRLFRKSNLKPFERDISTEIYQAGSTPCNGVEGFNCYFPLQSYGFQPTNGVGYQPYRVVVLSFELLHAPATVCGPKKSTNLVKNKCVNFNFNGLTGTGVLTESNKKFLPFQQFGRDIADTTDAVRDPQTLEILDITPCSFGGVSVITPGTNTSNQVAVLYQGVNCTEVPVAIHADQLTPTWRVYSTGSNVFQTRAGCLIGAEHVNNSYECDIPIGAGICASYQTQTNSPRRARSVASQSIIAYTMSLGAENSVAYSNNSIAIPTNFTISVTTEILPVSMTKTSVDCTMYICGDSTECSNLLLQYGSFCTQLNRALTGIAVEQDKNTQEVFAQVKQIYKTPPIKDFGGFNFSQILPDPSKPSKRSFIEDLLFNKVTLADAGFIKQYGDCLGDIAARDLICAQKFNGLTVLPPLLTDEMIAQYTSALLAGTITSGWWFGAGAALQIPFAMQMAYRFNGIGVTQNVLYENQKLIANQFNSAIGKIQDSLSSTASALGKLQDVVNQNAQALNTLVKQLSSNFGAISSVLNDILSRLDPPEAEVQIDRLITGRLQSLQTYVTQQLIRAAEIRWSANLAATKMSECVLGQSKRVDFCGKGYHLMSFPQSAPHGVVFLHVTYVPAQEKNFTTAPAICHDGKAHFPREGVFVSNGTHWFVTQRNFYEPQIITTDNTFVSGNCDVVIGIVNNTVYDPLQPELDSFKEELDKYFKNHTSPDVDLGDISGINASVVNIQKEIDRLNEVAKNLNESLIDLQELGKYEQYIKGGSGYIPEAPRDGQAYVRKDGEWVLLSTFL

SEQ ID NO: 5790 - protein, 1241 aa, Artificial Sequence
  SARS-CoV-2/Belgium/BA-02291/2020__EPI_ISL_415159 spike protein (1-1211)(K986P_V987P_T887W_A1020W) Foldon construct
MFVFLVLLPLVSSQCVNLTTRTQLPPAYTNSFTRGVYYPDKVFRSSVLHSTQDLFLPFFSNVTWFHAIHVSGTNGTKRFDNPVLPFNDGVYFASTEKSNIIRGWIFGTTLDSKTQSLLIVNNATNVVIKVCEFQFCNDPFLGVYYHKNNKSWMESEFRVYSSANNCTFEYVSQPFLMDLEGKQGNFKNLREFVFKNIDGYFKIYSKHTPINLVRDLPQGFSALEPLVDLPIGINITRFQTLLALHRSYLTPGDSSSGWTAGAAAYYVGYLQPRTFLLKYNENGTITDAVDCALDPLSETKCTLKSFTVEKGIYQTSNFRVQPTESIVRFPNITNLCPFGEVFNATRFASVYAWNRKRISNCVADYSVLYNSASFSTFKCYGVSPTKLNDLCFTNVYADSFVIRGDEVRQIAPGQTGKIADYNYKLPDDFTGCVIAWNSNNLDSKVGGNYNYLYRLFRRSNLKPFERDISTEIYQAGSTPCNGVEGFNCYFPLQSYGFQPTNGVGYQPYRVVVLSFELLPAPATVCGPKKSTNLVKNKCVNFNFNGLTGTGVLTESNKKFLPFQQFGRDIADTTDAVRDPQTLEILDITPCSFGGVSVITPGTNTSNQVAVLYQGVNCTEVPVAIHADQLTPTWRVYSTGSNVFQTRAGCLIGAEHVNNSYECDIPIGAGICASYQTQTNSPRRARSVASQSIIAYTMSLGAENSVAYSNNSIAIPTNFTISVTTEILPVSMTKTSVDCTMYICGDSTECSNLLLQYGSFCTQLNRALTGIAVEQDKNTQEVFAQVKQIYKTPPIKDFGGFNFSQILPDPSKPSKRSFIEDLLFNKVTLADAGFIKQYGDCLGDIAARDLICAQKFNGLTVLPPLLTDEMIAQYTSALLAGTITSGWWFGAGAALQIPFAMQMAYRFNGIGVTQNVLYENQKLIANQFNSAIGKIQDSLSSAAPALGKLQDVVNQNAQALNTLVKQLSSNFGAISSVLNDILSRLDPPEAEVQIDRLITGRLQSLQTYVTQQLIRAAEIRWSANLAATKMSECVLGQSKRVDFCGKGYHLMSFPQSAPHGVVFLHVTYVPAQEKNFTTAPAICHDGKAHFPREGVFVSNGTHWFVTQRNFYEPQIITTDNTFVSGNCDVVIGIVNNTVYDPLQPELDSFKEELDKYFKNHTSPDVDLGDISGINASVVNIQKEIDRLNEVAKNLNESLIDLQELGKYEQYIKGGSGYIPEAPRDGQAYVRKDGEWVLLSTFL

SEQ ID NO: 5791 - protein, 1241 aa, Artificial Sequence
  SARS-CoV-2/USA/WA8-UW5/2020__EPI_ISL_413486 spike protein (1-1211)(K986P_V987P_T887W_A1020W) Foldon construct
MFVFLVLLPLVSSQCVNLTTRTQLPPAYTNSFTRGVYYPDKVFRSSVLHSTQDLFLPFFSNVTWFHAIHVSGTNGTKRFDNPVLPFNDGVYFASTEKSNIIRGWIFGTTLDSKTQSLLIVNNATNVVIKVCEFQFCNDPFLGVYYHKNNKSWMESEFRVYSSANNCTFEYVSQPFLMDLEGKQGNFKNLREFVFKNIDGYFKIYSKHTPINLVRDLPQGFSALEPLVDLPIGINITRFQTLLALHRSYLTPGDSSSGWTAGAAAYYVGYLQPRTFLLKYNENGTITDAVDCALDPLSETKCTLKSFTVEKGIYQTSNFRVQPTESIVRFPNITNLCPFGEVFNATRFASVYAWNRKRISNCVADYSVLYNSASFSTFKCYGVSPTKLNDLCFTNVYADSFVIRGDEVRQIAPGQTGKIADYNYKLPDDFTGCVIAWNSNNLDSKVGGNYNYLYRLFRKSNLKPFERDISTEIYQAGSTPCNGVEGFNCYFPLQSYGFQPTNGVGYQPYRVVVLSFELLHAPATVCGPKKSTNLVKNKCVNFNFNGLTGTGVLTESNKKFLPFQQFGRDIADTTDAVRDPQTLEILDITPCSFGGVSVITPGTNTSNQVAVLYQDVNCTEVPVAIHADQLTPTWRVYSTGSNVFQTRAGCLIGAEYVNNSYECDIPIGAGICASYQTQTNSPRRARSVASQSIIAYTMSLGAENSVAYSNNSIAIPTNFTISVTTEILPVSMTKTSVDCTMYICGDSTECSNLLLQYGSFCTQLNRALTGIAVEQDKNTQEVFAQVKQIYKTPPIKDFGGFNFSQILPDPSKPSKRSFIEDLLFNKVTLADAGFIKQYGDCLGDIAARDLICAQKFNGLTVLPPLLTDEMIAQYTSALLAGTITSGWWFGAGAALQIPFAMQMAYRFNGIGVTQNVLYENQKLIANQFNSAIGKIQDSLSSTASALGKLQDVVNQNAQALNTLVKQLSSNFGAISSVLNDILSRLDPPEAEVQIDRLITGRLQSLQTYVTQQLIRAAEIRWSANLAATKMSECVLGQSKRVDFCGKGYHLMSFPQSAPHGVVFLHVTYVPAQEKNFTTAPAICHDGKAHFPREGVFVSNGTHWFVTQRNFYEPQIITTDNTFVSGNCDVVIGIVNNTVYDPLQPELDSFKEELDKYFKNHTSPDVDLGDISGINASVVNIQKEIDRLNEVAKNLNESLIDLQELGKYEQYIKGGSGYIPEAPRDGQAYVRKDGEWVLLSTFL

SEQ ID NO: 5792 - protein, 1241 aa, Artificial Sequence
  SARS-CoV-2/England/20102000506/2020__EPI_ISL_415147 spike protein (1-1211)(K986P_V987P_T887W_A1020W) Foldon construct
MFVFLVLLPLVSSQCVNLTTRTQLPPAYTNSFTRGVYYPDKVFRSSVLHSTQDLFLPFFSNVTWFHAIHVSGTNGTKRFDNPVLPFNDGVYFASTEKSNIIRGWIFGTTLDSKTQSLLIVNNATNVVIKVCEFQFCNDPFLGVYYHKNNKSWMESEFRVYSSANNCTFEYVSQPFLMDLEGKQGNFKNLREFVFKNIDGYFKIYSKHTPINLVRDLPQGFSALEPLVDLPIGINITRFQTLLALHRSYLTPGDSSSGWTAGAAAYYVGYLQPRTFLLKYNENGTITDAVDCALDPLSETKCTLKSFTVEKGIYQTSNFRVQPTESIVRFPNITNLCPFGEVFNATRFASVYAWNRKRISNCVADYSVLYNSASFSTFKCYGVSPTKLNDLCFTNVYADSFVIRGDEVRQIAPGQTGKIADYNYKLPDDFTGCVIAWNSNNLDSKVGGNYNYLYRLFRKSNLKPFERDISTEIYQAGSTPCNGVEGFNCYFPLQSYGFQPTNGVGYQPYRVVVLSFELLHAPATVCGPKKSTNLVKNKCVNFNFNGLTGTGVLTESNKKFLPFQQFGRDIADTTDAVRDPQTLEILDITPCSFGGVSVITPGTNTSNQVAVLYQGVNCTEVPVAIHADQLTPTWRVYSTGSNVFQTRAGCLIGAEHVNNSYECDIPIGAGICASYQTQTNSPRRARSVASQSIIAYTMSLGAENSVAYSNNSIAIPTNFTISVTTEILPVSMTKTSVDCTMYICGDSTECSNLLLQYGSFCTQLNRALTGIAVEQDKNTQEVFAQVKQIYKTPPIKDFGGFNFSQILPDPSKPSKRSFIEDLLFNKVTLADAGFIKQYGYCLGDIAARDLICAQKFNGLTVLPPLLTDEMIAQYTSALLAGTITSGWWFGAGAALQIPFAMQMAYRFNGIGVTQNVLYENQKLIANQFNSAIGKIQDSLSSTASALGKLQDVVNQNAQALNTLVKQLSSNFGAISSVLNDILSRLDPPEAEVQIDRLITGRLQSLQTYVTQQLIRAAEIRWSANLAATKMSECVLGQSKRVDFCGKGYHLMSFPQSAPHGVVFLHVTYVPAQEKNFTTAPAICHDGKAHFPREGVFVSNGTHWFVTQRNFYEPQIITTDNTFVSGNCDVVIGIVNNTVYDPLQPELDSFKEELDKYFKNHTSPDVDLGDISGINASVVNIQKEIDRLNEVAKNLNESLIDLQELGKYEQYIKGGSGYIPEAPRDGQAYVRKDGEWVLLSTFL

SEQ ID NO: 5793 - protein, 1241 aa, Artificial Sequence
  SARS-CoV-2/Belgium/VAG-03013/2020__EPI_ISL_415155 spike protein (1-1211)(K986P_V987P_T887W_A1020W) Foldon construct
MFVFLVLLPLVSSQCVNLTTRTQLPPAYTNSFTRGVYYPDKVFRSSVLHSTQDLFLPFFSNVTWFHAIHVSGTNGTKRFDNPVLPFNDGVYFASTEKSNIIRGWIFGTTLDSKTQSLLIVNNATNVVIKVCEFQFCNDPFLGVYYHKNNKSWMESEFRVYSSANNCTFEYVSQPFLMDLEGKQGNFKNLREFVFKNIDGYFKIYSKHTPINLVRDLPQGFSALEPLVDLPIGINITRFQTLLALHRSYLTPGDSSSGWTAGAAAYYVGYLQPRTFLLKYNENGTITDAVDCALDPLSETKCTLKSFTVEKGIYQTSNFRVQPTESIVRFPNITNLCPFGEVFNATRFASVYAWNRKRISNCVADYSVLYNSASFSTFKCYGVSPTKLNDLCFTNVYADSFVIRGDEVRQIAPGQTGKIADYNYKLPDDFTGCVIAWNSNNLDSKVGGNYNYLYRLFRKSNLKPFERDISTEIYQAGSTPCNGVEGFNCYFPLQSYGFQPTNGVGYQPYRVVVLSFELLHAPATVCGPKKSTNLVKNKCVNFNFNGLTGTGVLTESNKKFLPFQQFGRDIADTTDAVRDPQTLEILDITPCSFGGVSVITPGTNTSNQVAVLYQGVNCTEVPVAIHADQLTPTWRVYSTGSNVFQTRAGCLIGAEHVNNSYECDIPIGAGICASYQTQTNSPRRARSVASQSIIAYTMSLGAENSVAYSNNSIAIPTNFTISVTTEILPVSMTKTSVDCTMYICGDSTECSNLLLQYGSFCTQLNRALTGIAVEQDKNTQEVFAQVKQIYKTPPIKDFGGFNFSQILPDPSKPSKRSFIEDLLFNKVTLADAGFIKQYGDCLGDIAARDLICAQKFNGLTVLPPLLTDEMIAQYTSALLAGTITSGWWFGAGAALQIPFAMQMAYRFNGIGVTQNVLYENQKLIANQFNSAIGKIQDSLSSTATALGKLQDVVNQNAQALNTLVKQLSSNFGAISSVLNDILSRLDPPEAEVQIDRLITGRLQSLQTYVTQQLIRAAEIRWSANLAATKMSECVLGQSKRVDFCGKGYHLMSFPQSAPHGVVFLHVTYVPAQEKNFTTAPAICHDGKAHFPREGVFVSNGTHWFVTQRNFYEPQIITTDNTFVSGNCDVVIGIVNNTVYDPLQPELDSFKEELDKYFKNHTSPDVDLGDISGINASVVNIQKEIDRLNEVAKNLNESLIDLQELGKYEQYIKGGSGYIPEAPRDGQAYVRKDGEWVLLSTFL

SEQ ID NO: 5794 - protein, 1241 aa, Artificial Sequence
  SARS-CoV-2/Belgium/BC-03016/2020__EPI_ISL_415157 spike protein (1-1211)(K986P_V987P_T887W_A1020W) Foldon construct
MFVFLVLLPLVSSQCVNLTTRTQLPPAYTNSFTRGVYYPDKVFRSSVLHSTQDLFLPFFSNVTWFHAIHVSGTNGTKRFDNPVLPFNDGVYFASTEKSNIIRGWIFGTTLDSKTQSLLIVNNATNVVIKVCEFQFCNDPFLGVYYHKNNKSWMESEFRVYSSANNCTFEYVSQPFLMDLEGKQGNFKNLREFVFKNIDGYFKIYSKHTPINLVRDLPQGFSALEPLVDLPIGINITRFQTLLALHRSYLTPGDSSSGWTAGAAAYYVGYLQPRTFLLKYNENGTITDAVDCALDPLSETKCTLKSFTVEKGIYQTSNFRVQPTESIVRFPNITNLCPFGEVFNATRFASVYAWNRKRISNCVADYSVLYNSASFSTFKCYGVSPTKLNDLCFTNVYADSFVIRGDEVRQIAPGQTGKIADYNYKLPDDFTGCVIAWNSNNLDSKVGGNYNYLYRLFRKSNLKPFERDISTEIYQAGSTPCNGVEGFNCYFPLQSYGFQPTNGVGYQPYRVVVLSFELLHAPATVCGPKKSTNLVKNKCVNFNFNGLTGTGVLTESNKKFLPFQQFGRDIADTTDAVRDPQTLEILDITPCSFGGVSVITPGTNTSNQVAVLYQGVNCTEVPVAIHADQLTPTWRVYSTGSNVFQTRAGCLIGAEHVNNSYECDIPIGAGICASYQTQTNSPRRARSVASQSIIAYTMSLGAENSVAYSNNSIAIPTNFTISVTTEILPVSMTKTSVDCTMYICGDSTECSNLLLQYGSFCTQLNRALTGIAVEQDKNTQEVFAQVKQIYKTPPIKDFGGFNFSQILPDPSKPSKRSFIEDLLFNKVTLADAGFIKQYGDCLGDIAARDLICAQKFNGLTVLPPLLTDEMIAQYTSALLAGTITSGWWFGAGAALQIPFAMQMAYRFNGIGVTQNVLYENQKLIANQFNSAIGKIQDSLSSTAPALGKLQDVVNQNAQALNTLVKQLSSNFGAISSVLNDILSRLDPPEAEVQIDRLITGRLQSLQTYVTQQLIRAAEIRWSANLAATKMSECVLGQSKRVDFCGKGYHLMSFPQSAPHGVVFLHVTYVPAQEKNFTTAPAICHDGKAHFPREGVFVSNGTHWFVTQRNFYEPQIITTDNTFVSGNCDVVIGIVNNTVYDPLQPELDSFKEELDKYFKNHTSPDVDLGDISGINASVVNIQKEIDRLNEVAKNLNESLIDLQELGKYEQYIKGGSGYIPEAPRDGQAYVRKDGEWVLLSTFL

SEQ ID NO: 5795 - protein, 1241 aa, Artificial Sequence
  SARS-CoV-2/Germany/BavPat3/2020__EPI_ISL_414521 spike protein (1-1211)(K986P_V987P_T887W_A1020W) Foldon construct
MFVFLVLLPLVSSQCVNLTTRTQLPPAYTNSFTRGVYYPDKVFRSSVLHSTQDLFLPFFSNVTWFHAIHVSGTNGTKRFDNPVLPFNDGVYFASTEKSNIIRGWIFGTTLDSKTQSLLIVNNATNVVIKVCEFQFCNDPFLGVYYHKNNKSWMESEFRVYSSANNCTFEYVSQPFLMDLEGKQGNFKNLREFVFKNIDGYFKIYSKHTPINLVRDLPQGFSALEPLVDLPIGINITRFQTLLALHRSYLTPGDSSSGWTAGAAAYYVGYLQPRTFLLKYNENGTITDAVDCALDPLSETKCTLKSFTVEKGIYQTSNFRVQPTESIVRFPNITNLCPFGEVFNATRFASVYAWNRKRISNCVADYSVLYNSASFSTFKCYGVSPTKLNDLCFTNVYADSFVIRGDEVRQIAPGQTGKIADYNYKLPDDFTGCVIAWNSNNLDSKVGGNYNYLYRLFRKSNLKPFERDISTEIYQAGSTPCNGVEGFNCYFPLQSYGFQPTNGVGYQPYRVVVLSFELLHAPATVCGPKKSTNLVKNKCVNFNFNGLTGTGVLTESNKKFLPFQQFGRDIADTTDAVRDPQTLEILDITPCSFGGVSVITPGTNTSNQVAVLYQDVNCTEVPVAIHADQLTPTWRVYSTGSNVFQTRAGCLIGAEHVNNSYECDIPIGAGICASYQTQTNSPRRARSVASQSIIAYTMSLGAENSVAYSNNSIAIPTNFTISVTTEILPVSMTKTSVDCTMYICGDSTECSNLLLQYGSFCTQLNRALTGIAVEQDKNTQQVFAQVKQIYKTPPIKDFGGFNFSQILPDPSKPSKRSFIEDLLFNKVTLADAGFIKQYGDCLGDIAARDLICAQKFNGLTVLPPLLTDEMIAQYTSALLAGTITSGWWFGAGAALQIPFAMQMAYRFNGIGVTQNVLYENQKLIANQFNSAIGKIQDSLSSTASALGKLQDVVNQNAQALNTLVKQLSSNFGAISSVLNDILSRLDPPEAEVQIDRLITGRLQSLQTYVTQQLIRAAEIRWSANLAATKMSECVLGQSKRVDFCGKGYHLMSFPQSAPHGVVFLHVTYVPAQEKNFTTAPAICHDGKAHFPREGVFVSNGTHWFVTQRNFYEPQIITTDNTFVSGNCDVVIGIVNNTVYDPLQPELDSFKEELDKYFKNHTSPDVDLGDISGINASVVNIQKEIDRLNEVAKNLNESLIDLQELGKYEQYIKGGSGYIPEAPRDGQAYVRKDGEWVLLSTFL

SEQ ID NO: 5796 - protein, 1241 aa, Artificial Sequence
  SARS-CoV-2/France/HF1805/2020__EPI_ISL_414628 spike protein (1-1211)(K986P_V987P_T887W_A1020W) Foldon construct
MFVFLVLLPLVSSQCVNLTTRTQLPPAYTNSFTRGVYYPDKVFRSSVLHSTQDLFLPFFSNVTWFHAIHVSGTNGTKRFDNPVLPFNDGVYFASTEKSNIIRGWIFGTTLDSKTQSLLIVNNATNVVIKVCEFQFCNDPFLGVYYHKNNKSWMESEFRVYSSANNCTFEYVSQPFLMDLEGKQGNFKNLREFVFKNIDGYFKIYSKHTPINLVRDLPQGFSALEPLVDLPIGINITRFQTLLALHRSYLTPGDSSSGWTAGAAAYYVGYLQPRTFLLKYNENGTITDAVDCALDPLSETKCTLKSFTVEKGIYQTSNFRVQPTESIVRFPNITNLCPFGEVFNATRFASVYAWNRKRISNCVADYSVLYNSASFSTFKCYGVSPTKLNDLCFTNVYADSFVIRGDEVRQIAPGQTGKIADYNYKLPDDFTGCVIAWNSNNLDSKVGGNYNYLYRLFRKSNLKPFERDISTEIYQAGSTPCNGVEGFNCYFPLQSYGFQPTNGVGYQPYRVVVLSFELLHAPATVCGPKKSTNLVKNKCVNFNFNGLTGTGVLTESNKKFLPFQQFGRDIADTTDAVRDPQTLEILDITPCSFGGVSVITPGTNTSNQVAVLYQGVNCTEVPVAIHADQLTPTWRVYSTGSNVFQTRAGCLIGAEHVNNSYECDIPIGAGICASYQTQTNSPRRARSVASQSIIAYTMSLGAENSVAYSNNSIAIPTNFTISVTTEILPVSMTKTSVDCTMYICGDSTECSNLLLQYGSFCTQLNRALTGIAVEQDKNTQEVFAQVKQIYKTPPIKDFGGFNFSQILPDPSKPSKRSFIEDLLFNKVTLADAGFIKQYGDCLGDIAARDLICAQKFNGLTVLPPLLTDEMIAQYTSALLAGTITSGWWFGAGAALQIPFAMQMAYRFNGIGVTQNVLYENQKLIANQFNSAIGKIQDSLSSTASALGKLQDVVNQNAQALNTLVKQLSSNFGAISSVLNDILSRLDPPEAEVQIDRLITGRLQSLQTYVTQQLIRAAEIRWSANLAATKMSECVLGQSKRVDFCGKGYHLMSFPQSAPHGVVFLHVTYVPAQEKNFTTAPAICHDGKAHFPREGVFVSNGTHWFVTQRNFYEPQIITTDNTFVSGNCDVVIGVVNNTVYDPLQPELDSFKEELDKYFKNHTSPDVDLGDISGINASVVNIQKEIDRLNEVAKNLNESLIDLQELGKYEQYIKGGSGYIPEAPRDGQAYVRKDGEWVLLSTFL

SEQ ID NO: 5797 - protein, 1241 aa, Artificial Sequence
  SARS-CoV-2/Netherlands/ZuidHolland_9/2020__EPI_ISL_414445 spike protein (1-1211)(K986P_V987P_T887W_A1020W) Foldon construct
MFVFLVLLPLVSSQCVNLTTRTQLPPAYTNSFTRGVYYPDKVFRSSVLHSTQDLFLPFFSNVTWFHAIHVSGTNGTKRFDNPVLPFNDGVYFASTEKSNIIRGWIFGTTLDSKTQSLLIVNNATNVVIKVCEFQFCNDPFLGVYYHKNNKSWMESEFRVYSSANNCTFEYVSQPFLMDLEGKQGNFKNLREFVFKNIDGYFKIYSKHTPINLVRDLPQGFSALEPLVDLPIGINITRFQTLLALHRSYLTPGDSSSGWTAGAAAYYVGYLQPRTFLLKYNENGTITDAVDCALDPLSETKCTLKSFTVEKGIYQTSNFRVQPTESIVRFPNITNLCPFGEVFNATRFASVYAWNRKRISNCVADYSVLYNSASFSTFKCYGVSPTKLNDLCFTNVYADSFVIRGDEVRQIAPGQTGKIADYNYKLPDDFTGCVIAWNSNNLDSKVGGNYNYLYRLFRKSNLKPFERDISTEIYQAGSTPCNGVEGFNCYFPLQSYGFQPTNGVGYQPYRVVVLSFELLHAPATVCGPKKSTNLVKNKCVNFNFNGLTGTGVLTESNKKFLPFQQFGRDIADTTDAVRDPQTLEILDITPCSFGGVSVITPGTNTSNQVAVLYQGVNCTEVPVAIHADQLTPTWRVYSTGSNVFQTRAGCLIGAEHVNNSYECDIPIGAGICASYQTQTNSPRRARSVASQSIIAYTMSLGAENSVAYSNNSIAIPTNFTISVTTEILPVSMTKTSVDCTMYICGDSTECSNLLLQYGSFCTQLNRALTGIAVEQDKNTQEVFAQVKQIYKTPPIKDFGGFNFSQILPDPSKPSKRSFIEDLLFNKVTLADAGFIKQYGDCLGDIAARDLICVQKFNGLTVLPPLLTDEMIAQYTSALLAGTITSGWWFGAGAALQIPFAMQMAYRFNGIGVTQNVLYENQKLIANQFNSAIGKIQDSLSSTASALGKLQDVVNQNAQALNTLVKQLSSNFGAISSVLNDILSRLDPPEAEVQIDRLITGRLQSLQTYVTQQLIRAAEIRWSANLAATKMSECVLGQSKRVDFCGKGYHLMSFPQSAPHGVVFLHVTYVPAQEKNFTTAPAICHDGKAHFPREGVFVSNGTHWFVTQRNFYEPQIITTDNTFVSGNCDVVIGIVNNTVYDPLQPELDSFKEELDKYFKNHTSPDVDLGDISGINASVVNIQKEIDRLNEVAKNLNESLIDLQELGKYEQYIKGGSGYIPEAPRDGQAYVRKDGEWVLLSTFL

SEQ ID NO: 5798 - protein, 1241 aa, Artificial Sequence
  SARS-CoV-2/Finland/FIN03032020A/2020__EPI_ISL_413602 spike protein (1-1211)(K986P_V987P_T887W_A1020W) Foldon construct
MFVFLVLLPLVSSQCVNLTTRTQLPPAYTNSFTRGVYYPDKVFRSSVLHSTQDLFLPFFSNVTWFHAIHVSGTNGTKRFDNPVLPFNDGVYFASTEKSNIIRGWIFGTTLDSKTQSLLIVNNATNVVIKVCEFQFCNDPFLGVYYHKNNKSWMESEFRVYSSANNCTFEYVSQPFLMDLEGKQGNFKNLREFVFKNIDGYFKIYSKHTPINLVRDLPQGFSALEPLVDLPIGINITRFQTLLALHRSYLTPGDSSSGWTAGAAAYYVGYLQPRTFLLKYNENGTITDAVDCALDPLSETKCTLKSFTVEKGIYQTSNFRVQPTESIVRFPNITNLCPFGEVFNATRFASVYAWNRKRISNCVADYSVLYNSASFSTFKCYGVSPTKLNDLCFTNVYADSFVIRGDEVRQIAPGQTGKIADYNYKLPDDFTGCVISWNSNNLDSKVGGNYNYLYRLFRKSNLKPFERDISTEIYQAGSTPCNGVEGFNCYFPLQSYGFQPTNGVGYQPYRVVVLSFELLHAPATVCGPKKSTNLVKNKCVNFNFNGLTGTGVLTESNKKFLPFQQFGRDIADTTDAVRDPQTLEILDITPCSFGGVSVITPGTNTSNQVAVLYQGVNCTEVPVAIHADQLTPTWRVYSTGSNVFQTRAGCLIGAEHVNNSYECDIPIGAGICASYQTQTNSPRRARSVASQSIIAYTMSLGAENSVAYSNNSIAIPTNFTISVTTEILPVSMTKTSVDCTMYICGDSTECSNLLLQYGSFCTQLNRALTGIAVEQDKNTQEVFAQVKQIYKTPPIKDFGGFNFSQILPDPSKPSKRSFIEDLLFNKVTLADAGFIKQYGDCLGDIAARDLICAQKFNGLTVLPPLLTDEMIAQYTSALLAGTITSGWWFGAGAALQIPFAMQMAYRFNGIGVTQNVLYENQKLIANQFNSAIGKIQDSLSSTASALGKLQDVVNQNAQALNTLVKQLSSNFGAISSVLNDILSRLDPPEAEVQIDRLITGRLQSLQTYVTQQLIRAAEIRWSANLAATKMSECVLGQSKRVDFCGKGYHLMSFPQSAPHGVVFLHVTYVPAQEKNFTTAPAICHDGKAHFPREGVFVSNGTHWFVTQRNFYEPQIITTDNTFVSGNCDVVIGIVNNTVYDPLQPELDSFKEELDKYFKNHTSPDVDLGDISGINASVVNIQKEIDRLNEVAKNLNESLIDLQELGKYEQYIKGGSGYIPEAPRDGQAYVRKDGEWVLLSTFL

SEQ ID NO: 5799 - protein, 1241 aa, Artificial Sequence
  SARS-CoV-2/France/GE1977/2020__EPI_ISL_414632 spike protein (1-1211)(K986P_V987P_T887W_A1020W) Foldon construct
MFVFLVLLPLVSSQCVNLTTRTQLPPAYTNSFTRGVYYPDKVFRSSVLHSTQDLFLPFFSNVTWFHAIHVSGTNGTKRFDNPVLPFNDGVYFASTEKSNIIRGWIFGTTLDSKTQSLLIVNNATNVVIKVCEFQFCNDPFLGVYYHKNNKSWMESEFRVYSSANNCTFEYVSQPFLMDLEGKQGNFKNLREFVFKNIDGYFKIYSKHTPINLVRDLPQGFSALEPLVDLPIGINITRFQTLLALHRSYLTPGDSSSGWTAGAAAYYVGYLQPRTFLLKYNENGTITDAVDCALDPLSETKCTLKSFTVEKGIYQTSNFRVQPTESIVRFPNITNLCPFGEVFNATRFASVYAWNRKRISNCVADYSVLYNSASFSTFKCYGVSPTKLNDLCFTNVYADSFVIRGDEVRQIAPGQTGKIADYNYKLPDDFTGCVIAWNSNNLDSKVGGNYNYLYRLFRKSNLKPFERDISTEIYQAGSTPCNGVEGFNCYFPLQSYGFQPTNGVGYQPYRVVVLSFELLHAPATVCGPKKSTNLVKNKCVNFNFNGLTGTGVLTESNKKFLPFQQFGRDIADTTDAVRDPQTLEILDITPCSFGGVSVITPGTNTSNQVAVLYQGVNCTEVPVAIHADQLTPTWRVYSTGSNVFQTRAGCLIGAEHVNNSYECDIPIGAGICASYQTQTNSPRRARSVASQSIIAYTMSLGAENSVAYSNNSIAIPTNFTISVTTEILPVSMTKTSVDCTMYICGDSTECSNLLLQYGSFCTQLNRALTGIAVEQDKNTQEVFAQVKQIYKTPPIKDFGGFNFSQILPDPSKPSKRSFIEDLLFNKVTLADAGFIKQYGDCLGDIAARDLICAQKFNGLTVLPPLLTDEMIAQYTSALLAGTITSGWWFGAGAALQIPFAMQMAYRFNGIGVTQNVLYENQKLIANQFNSAIGKIQDSLFSTASALGKLQDVVNQNAQALNTLVKQLSSNFGAISSVLNDILSRLDPPEAEVQIDRLITGRLQSLQTYVTQQLIRAAEIRWSANLAATKMSECVLGQSKRVDFCGKGYHLMSFPQSAPHGVVFLHVTYVPAQEKNFTTAPAICHDGKAHFPREGVFVSNGTHWFVTQRNFYEPQIITTDNTFVSGNCDVVIGIVNNTVYDPLQPELDSFKEELDKYFKNHTSPDVDLGDISGINASVVNIQKEIDRLNEVAKNLNESLIDLQELGKYEQYIKGGSGYIPEAPRDGQAYVRKDGEWVLLSTFL

SEQ ID NO: 5800 - protein, 1241 aa, Artificial Sequence
  SARS-CoV-2/Finland/FIN-313/2020__EPI_ISL_414641 spike protein (1-1211)(K986P_V987P_T887W_A1020W) Foldon construct
MFVFLVLLPLVSSQCVNLTTRTQLPPAYTNSFTRGVYYPDKVFRSSVLHSTQDLFLPFFSNVTWFHAIHVSGTNGTKRFDNPVLPFNDGVYFASTEKSNIIRGWIFGTTLDSKTQSLLIVNNATNVVIKVCEFQFCNDPFLGVYYHKNNKSWMESEFRVYSSANNCTFEYVSQPFLMDLEGKQGNFKNLREFVFKNIDGYFKIYSKHTPINLVRDLPQGFSALEPLVDLPIGINITRFKTLLALHRSYLTPGDSSSGWTAGAAAYYVGYLQPRTFLLKYNENGTITDAVDCALDPLSETKCTLKSFTVEKGIYQTSNFRVQPTESIVRFPNITNLCPFGEVFNATRFASVYAWNRKRISNCVADYSVLYNSASFSTFKCYGVSPTKLNDLCFTNVYADSFVIRGDEVRQIAPGQTGKIADYNYKLPDDFTGCVIAWNSNNLDSKVGGNYNYLYRLFRKSNLKPFERDISTEIYQAGSTPCNGVEGFNCYFPLQSYGFQPTNGVGYQPYRVVVLSFELLHAPATVCGPKKSTNLVKNKCVNFNFNGLTGTGVLTESNKKFLPFQQFGRDIADTTDAVRDPQTLEILDITPCSFGGVSVITPGTNTSNQVAVLYQGVNCTEVPVAIHADQLTPTWRVYSTGSNVFQTRAGCLIGAEHVNNSYECDIPIGAGICASYQTQTNSPRRARSVASQSIIAYTMSLGAENSVAYSNNSIAIPTNFTISVTTEILPVSMTKTSVDCTMYICGDSTECSNLLLQYGSFCTQLNRALTGIAVEQDKNTQEVFAQVKQIYKTPPIKDFGGFNFSQILPDPSKPSKRSFIEDLLFNKVTLADAGFIKQYGDCLGDIAARDLICAQKFNGLTVLPPLLTDEMIAQYTSALLAGTITSGWWFGAGAALQIPFAMQMAYRFNGIGVTQNVLYENQKLIANQFNSAIGKIQDSLSSTASALGKLQDVVNQNAQALNTLVKQLSSNFGAISSVLNDILSRLDPPEAEVQIDRLITGRLQSLQTYVTQQLIRAAEIRWSANLAATKMSECVLGQSKRVDFCGKGYHLMSFPQSAPHGVVFLHVTYVPAQEKNFTTAPAICHDGKAHFPREGVFVSNGTHWFVTQRNFYEPQIITTDNTFVSGNCDVVIGIVNNTVYDPLQPELDSFKEELDKYFKNHTSPDVDLGDISGINASVVNIQKEIDRLNEVAKNLNESLIDLQELGKYEQYIKGGSGYIPEAPRDGQAYVRKDGEWVLLSTFL

SEQ ID NO: 5801 - protein, 1241 aa, Artificial Sequence
  SARS-CoV-2/Netherlands/ZuidHolland_2/2020__EPI_ISL_414556 spike protein (1-1211)(K986P_V987P_T887W_A1020W) Foldon construct
MFVFLVLLPLVSSQCVNLTTRTQLPPAYTNSFTRGVYYPDKVFRSSVLHSTQDLFLPFFSNVTWFHAIHVSGTNGTKRFDNPVLPFNDGVYFASTEKSNIIRGWIFGTTLDSKTQSLLIVNNATNVVIKVCEFQFCNDPFLGVYYHKNNKSWMESEFRVYSSANNCTFEYVSQPFLMDLEGKQGNFKNLREFVFKNIDGYFKIYSKHTPINLVRDLPQGFSALEPLVDLPIGINITRFQTLLALHRSYLTPGDSSSGWTAGAAAYYVGYLQPRTFLLKYNENGTITDAVDCALDPLSETKCTLKSFTVEKGIYQTSNFRVQPTESIVRFPNITNLCPFGEVFNATRFASVYAWNRKRISNCVADYSVLYNSASFSTFKCYGVSPTKLNDLCFTNVYADSFVIRGDEVRQIAPGQTGKIADYNYKLPDDFTGCVIAWNSNNLDSKVGGNYNYLYRLFRKSNLKPFERDISTEIYQAGSTPCNGVEGFNCYFPLQSYGFQPTNGVGYQPYRVVVLSFELLHAPATVCGPKKSTNLVKNKCVNFNFNGLTGTGVLTESNKKFLPFQQFGRDIADTTDAVRDPQTLEILDITPCSFGGVSVITPGTNTSNQVAVLYQGVNCTEVPVAIHADQLTPTWRVYSTGSNVFQTRAGCLIGAEHVNNSYECDIPIGAGICASYQTQTNSPRRARSVASQSIIAYTMSLGAENSVAYSNNSIAIPTNFTISVTTEILPVSMTKTSVDCTMYICGDSTECSNLLLQYGSFCTQLNRALTGIALEQDKNTQEVFAQVKQIYKTPPIKDFGGFNFSQILPDPSKPSKRSFIEDLLFNKVTLADAGFIKQYGDCLGDIAARDLICAQKFNGLTVLPPLLTDEMIAQYTSALLAGTITSGWWFGAGAALQIPFAMQMAYRFNGIGVTQNVLYENQKLIANQFNSAIGKIQDSLSSTASALGKLQDVVNQNAQALNTLVKQLSSNFGAISSVLNDILSRLDPPEAEVQIDRLITGRLQSLQTYVTQQLIRAAEIRWSANLAATKMSECVLGQSKRVDFCGKGYHLMSFPQSAPHGVVFLHVTYVPAQEKNFTTAPAICHDGKAHFPREGVFVSNGTHWFVTQRNFYEPQIITTDNTFVSGNCDVVIGIVNNTVYDPLQPELDSFKEELDKYFKNHTSPDVDLGDISGINASVVNIQKEIDRLNEVAKNLNESLIDLQELGKYEQYIKGGSGYIPEAPRDGQAYVRKDGEWVLLSTFL

SEQ ID NO: 5802 - protein, 1241 aa, Artificial Sequence
  SARS-CoV-2/USA/WA-UW31/2020__EPI_ISL_414618 spike protein (1-1211)(K986P_V987P_T887W_A1020W) Foldon construct
MFVFLVLLPLVSSQCVNLTTRTQLPPAYTNSFTRGVYYPDKVFRSSVLHSTQDLFLPFFSNVTWFHAIHVSGTNGTKRFDNPVLPFNDGVYFASTEKSNIIRGWIFGTTLDSKTQSLLIVNNATNVVIKVCEFQFCNDPFLGVYYHKNNKSWMESEFRVYSSANNCTFEYVSQPFLMDLEGKQGNFKNLREFVFKNIDGYFKIYSKHTPINLVRDLPQGFSALEPLVDLPIGINITRFQTLLALHRSYLTPGDSSSGWTAGAAAYYVGYLQPRTFLLKYNENGTITDAVDCALDPLSETKCTLKSFTVEKGIYQTSNFRVQPTESIVRFPNITNLCPFGEVFNATRFASVYAWNRKRISNCVADYSVLYNSASFSTFKCYGVSPTKLNDLCFTNVYADSFVIRGDEVRQIAPGQTGKIADYNYKLPDDFTGCVIAWNSNNLDSKVGGNYNYLYRLFRKSNLKPFERDISTEIYQAGSTPCNGAEGFNCYFPLQSYGFQPTNGVGYQPYRVVVLSFELLHAPATVCGPKKSTNLVKNKCVNFNFNGLTGTGVLTESNKKFLPFQQFGRDIADTTDAVRDPQTLEILDITPCSFGGVSVITPGTNTSNQVAVLYQDVNCTEVPVAIHADQLTPTWRVYSTGSNVFQTRAGCLIGAEHVNNSYECDIPIGAGICASYQTQTNSPRRARSVASQSIIAYTMSLGAENSVAYSNNSIAIPTNFTISVTTEILPVSMTKTSVDCTMYICGDSTECSNLLLQYGSFCTQLNRALTGIAVEQDKNTQEVFAQVKQIYKTPPIKDFGGFNFSQILPDPSKPSKRSFIEDLLFNKVTLADAGFIKQYGDCLGDIAARDLICAQKFNGLTVLPPLLTDEMIAQYTSALLAGTITSGWWFGAGAALQIPFAMQMAYRFNGIGVTQNVLYENQKLIANQFNSAIGKIQDSLSSTASALGKLQDVVNQNAQALNTLVKQLSSNFGAISSVLNDILSRLDPPEAEVQIDRLITGRLQSLQTYVTQQLIRAAEIRWSANLAATKMSECVLGQSKRVDFCGKGYHLMSFPQSAPHGVVFLHVTYVPAQEKNFTTAPAICHDGKAHFPREGVFVSNGTHWFVTQRNFYEPQIITTDNTFVSGNCDVVIGIVNNTVYDPLQPELDSFKEELDKYFKNHTSPDVDLGDISGINASVVNIQKEIDRLNEVAKNLNESLIDLQELGKYEQYIKGGSGYIPEAPRDGQAYVRKDGEWVLLSTFL

SEQ ID NO: 5803 - protein, 1241 aa, Artificial Sequence
  SARS-CoV-2/South Korea/SNU01/2020__EPI_ISL_411929 spike protein (1-1211)(K986P_V987P_T887W_A1020W) Foldon construct
MFVFLVLLPLVSSQCVNLTTRTQLPPAYTNSFTRGVYYPDKVFRSSVLHSTQDLFLPFFSNVTWFHAIHVSGTNGTKRFDNPVLPFNDGVYFASTEKSNIIRGWIFGTTLDSKTQSLLIVNNATNVVIKVCEFQFCNDPFLGVYYHKNNKSWMESEFRVYSSANNCTFEYVSQPFLMDLEGKQGNFKNLREFVFKNIDGYFKIYSKHTPINLVRDLPQGFWALEPLVDLPIGINITRFQTLLALHRSYLTPGDSSSGWTAGAAAYYVGYLQPRTFLLKYNENGTITDAVDCALDPLSETKCTLKSFTVEKGIYQTSNFRVQPTESIVRFPNITNLCPFGEVFNATRFASVYAWNRKRISNCVADYSVLYNSASFSTFKCYGVSPTKLNDLCFTNVYADSFVIRGDEVRQIAPGQTGKIADYNYKLPDDFTGCVIAWNSNNLDSKVGGNYNYLYRLFRKSNLKPFERDISTEIYQAGSTPCNGVEGFNCYFPLQSYGFQPTNGVGYQPYRVVVLSFELLHAPATVCGPKKSTNLVKNKCVNFNFNGLTGTGVLTESNKKFLPFQQFGRDIADTTDAVRDPQTLEILDITPCSFGGVSVITPGTNTSNQVAVLYQDVNCTEVPVAIHADQLTPTWRVYSTGSNVFQTRAGCLIGAEHVNNSYECDIPIGAGICASYQTQTNSPRRARSVASQSIIAYTMSLGAENSVAYSNNSIAIPTNFTISVTTEILPVSMTKTSVDCTMYICGDSTECSNLLLQYGSFCTQLNRALTGIAVEQDKNTQEVFAQVKQIYKTPPIKDFGGFNFSQILPDPSKPSKRSFIEDLLFNKVTLADAGFIKQYGDCLGDIAARDLICAQKFNGLTVLPPLLTDEMIAQYTSALLAGTITSGWWFGAGAALQIPFAMQMAYRFNGIGVTQNVLYENQKLIANQFNSAIGKIQDSLSSTASALGKLQDVVNQNAQALNTLVKQLSSNFGAISSVLNDILSRLDPPEAEVQIDRLITGRLQSLQTYVTQQLIRAAEIRWSANLAATKMSECVLGQSKRVDFCGKGYHLMSFPQSAPHGVVFLHVTYVPAQEKNFTTAPAICHDGKAHFPREGVFVSNGTHWFVTQRNFYEPQIITTDNTFVSGNCDVVIGIVNNTVYDPLQPELDSFKEELDKYFKNHTSPDVDLGDISGINASVVNIQKEIDRLNEVAKNLNESLIDLQELGKYEQYIKGGSGYIPEAPRDGQAYVRKDGEWVLLSTFL

SEQ ID NO: 5804 - protein, 1241 aa, Artificial Sequence
  SARS-CoV-2/China/WF0004/2020__EPI_ISL_413694 spike protein (1-1211)(K986P_V987P_T887W_A1020W) Foldon construct
MFVFLVLLPLVSSQCVNLTTRTQLPPAYTNSFTRGVYYPDKVFRSSVLHSTQDLFLPFFSNVTWFHAIHVSGTNGTKRFDNPVLPFNDGVYFASTEKSNIIRGWIFGTTLDSKTQSLLIVNNATNVVIKVCEFQFCNDPFLGVYYHKNNKSWTESEFRVYSSANNCTFEYVSQPFLMDLEGKQGNFKNLREFVFKNIDGYFKIYSKHTPINLVRDLPQGFSALEPLVDLPIGINITRFQTLLALHRSYLTPGDSSSGWTAGAAAYYVGYLQPRTFLLKYNENGTITDAVDCALDPLSETKCTLKSFTVEKGIYQTSNFRVQPTESIVRFPNITNLCPFGEVFNATRFASVYAWNRKRISNCVADYSVLYNSASFSTFKCYGVSPTKLNDLCFTNVYADSFVIRGDEVRQIAPGQTGKIADYNYKLPDDFTGCVIAWNSNNLDSKVGGNYNYLYRLFRKSNLKPFERDISTEIYQAGSTPCNGVEGFNCYFPLQSYGFQPTNGVGYQPYRVVVLSFELLHAPATVCGPKKSTNLVKNKCVNFNFNGLTGTGVLTESNKKFLPFQQFGRDIADTTDAVRDPQTLEILDITPCSFGGVSVITPGTNTSNQVAVLYQDVNCTEVPVAIHADQLTPTWRVYSTGSNVFQTRAGCLIGAEHVNNSYECDIPIGAGICASYQTQTNSPRRARSVASQSIIAYTMSLGAENSVAYSNNSIAIPTNFTISVTTEILPVSMTKTSVDCTMYICGDSTECSNLLLQYGSFCTQLNRALTGIAVEQDKNTQEVFAQVKQIYKTPPIKDFGGFNFSQILPDPSKPSKRSFIEDLLFNKVTLADAGFIKQYGDCLGDIAARDLICAQKFNGLTVLPPLLTDEMIAQYTSALLAGTITSGWWFGAGAALQIPFAMQMAYRFNGIGVTQNVLYENQKLIANQFNSAIGKIQDSLSSTASALGKLQDVVNQNAQALNTLVKQLSSNFGAISSVLNDILSRLDPPEAEVQIDRLITGRLQSLQTYVTQQLIRAAEIRWSANLAATKMSECVLGQSKRFDFCGKGYHLMSFPQSAPHGVVFLHVTYVPAQEKNFTTAPAICHDGKAHFPREGVFVSNGTHWFVTQRNFYEPQIITTDNTFVSGNCDVVIGIVNNTVYDPLQPELDSFKEELDKYFKNHTSPDVDLGDISGINASVVNIQKEIDRLNEVAKNLNESLIDLQELGKYEQYIKGGSGYIPEAPRDGQAYVRKDGEWVLLSTFL

SEQ ID NO: 5805 - protein, 1241 aa, Artificial Sequence
  SARS-CoV-2/China/WF0028/2020__EPI_ISL_413791 spike protein (1-1211)(K986P_V987P_T887W_A1020W) Foldon construct
MFVFLVLLPLVSSQCVNLTTRTQLPPAYTNSFTRGVYYPDKVFRSSVLHSTQDLFLPFFSNVTWFHAIHVSGTNGTKRFDNPVLPFNDGVYFASTEKSNIIRGWIFGTTLDSKTQSLLIVNNATNVVIKVCEFQFCNDPFLGVYYHKNNKSWMESEFRVYSSANNCTFEYVSQPFLMDLEGKQGNFKNLREFVFKNIDGYFKIYSKHTPINLVRDLPQGFSALEPLVDLPIGINITRFQTLLALHRSYLTPGDSSSGWTAGAAAYYVGYLQPRTFLLKYNENGTITDAVDCALDPLSETKCTLKSFTVEKGIYQTSNFRVQPTESIVRFPNITNLCPFGEVFNATRFASVYAWNRKRISNCVADYSVLYNSASFSTFKCYGVSPTKLNDLCFTNVYADSFVIRGDEVRQIAPGQTGKIADYNYKLPDDFTGCVIAWNSNNLDSKVGGNYNYLYRLFRKSNLKPFERDISTEIYQAGSTPCNGVEGFNCYFPLQSYGFQPTNGVGYQPYRVVVLSFELLHAPATVCGPKKSTNLVKNKCVNFNFNGLTGTGVLTESNKKFLPFQQFGRDIADTTDAVRDPQTLEILDITPCSFGGVSVITPGTNTSNQVAVLYQDVNCTEVPVAIHADQLTPTWRVYSTGSNVFQTRAGCLIGAEHVNNSYECDIPIGAGICASYQTQTNSPRRARSVASQSIIAYTMSLGAENSVAYSNNSIAIPTNFTISVTTEILPVSMTKTSVDCTMYICGDSTECSNLLLQYGSFCTQLNRALTGIAVEQDKNTQEVFAQVKQIYKTPPIKDFGGFNFSQILPDPSKPSKRSFIEDLLFNKVTLADAGFIKQYGDCLGDIAARDLICAQKFNGLTVLPPLLTDEMIAQYTSALLAGTITSGWWFGAGAALQIPFAMQMAYRFNGIGVTQNVLYENQKLIANQFNSAIGKIQDSLSSTASALGKLQDVVNQNAQALNTLVKQLSSNFGAISSVLNDILSRLDPPEAEVQIDRLITGRLQSLQTYVTQQLIRAAEIRWSANLAATKMSECVLGQSKRVDFCGKGYHLMSFPQSAPHGVVFLHVTYVPAQEKNFTTAPAICHDGKAHFPREGVFVSNGTHWFVTQRNFYEPQIITTDNTFVSGNCDVVIGIVNNTVYDPLQPELESFKEELDKYFKNHTSPDVDLGDISGINASVVNIQKEIDRLNEVAKNLNESLIDLQELGKYEQYIKGGSGYIPEAPRDGQAYVRKDGEWVLLSTFL

SEQ ID NO: 5806 - protein, 1241 aa, Artificial Sequence
  SARS-CoV-2/2019-nCoV/USA-CruiseA-18/2020__MT159716.1 spike protein (1-1211)(K986P_V987P_T887W_A1020W) Foldon construct
MFVFLVLLPLVSSQCVNLTTRTQLPPAYTNSFTRGVYYPDKVFRSSVLHSTQDLFLPFFSNVTWFHAIHVSGTNGTKRFDNPVLPFNDGVYFASTEKSNIIRGWIFGTTLDSKTQSLLIVNNATNVVIKVCEFQFCNDPFLGVYYHKNNKSWMESELRVYSSANNCTFEYVSQPFLMDLEGKQGNFKNLREFVFKNIDGYFKIYSKHTPINLVRDLPQGFSALEPLVDLPIGINITRFQTLLALHRSYLTPGDSSSGWTAGAAAYYVGYLQPRTFLLKYNENGTITDAVDCALDPLSETKCTLKSFTVEKGIYQTSNFRVQPTESIVRFPNITNLCPFGEVFNATRFASVYAWNRKRISNCVADYSVLYNSASFSTFKCYGVSPTKLNDLCFTNVYADSFVIRGDEVRQIAPGQTGKIADYNYKLPDDFTGCVIAWNSNNLDSKVGGNYNYLYRLFRKSNLKPFERDISTEIYQAGSTPCNGVEGFNCYFPLQSYGFQPTNGVGYQPYRVVVLSFELLHAPATVCGPKKSTNLVKNKCVNFNFNGLTGTGVLTESNKKFLPFQQFGRDIADTTDAVRDPQTLEILDITPCSFGGVSVITPGTNTSNQVAVLYQDVNCTEVPVAIHADQLTPTWRVYSTGSNVFQTRAGCLIGAEHVNNSYECDIPIGAGICASYQTQTNSPRRARSVASQSIIAYTMSLGAENSVAYSNNSIAIPTNFTISVTTEILPVSMTKTSVDCTMYICGDSTECSNLLLQYGSFCTQLNRALTGIAVEQDKNTQEVFAQVKQIYKTPPIKDFGGFNFSQILPDPSKPSKRSFIEDLLFNKVTLADAGFIKQYGDCLGDIAARDLICAQKFNGLTVLPPLLTDEMIAQYTSALLAGTITSGWWFGAGAALQIPFAMQMAYRFNGIGVTQNVLYENQKLIANQFNSAIGKIQDSLSSTASALGKLQDVVNQNAQALNTLVKQLSSNFGAISSVLNDILSRLDPPEAEVQIDRLITGRLQSLQTYVTQQLIRAAEIRWSANLAATKMSECVLGQSKRVDFCGKGYHLMSFPQSAPHGVVFLHVTYVPAQEKNFTTAPAICHDGKAHFPREGVFVSNGTHWFVTQRNFYEPQIITTDNTFVSGNCDVVIGIVNNTVYDPLQPELDSFKEELDKYFKNHTSPDVDLGDISGINASVVNIQKEIDRLNEVAKNLNESLIDLQELGKYEQYIKGGSGYIPEAPRDGQAYVRKDGEWVLLSTFL

SEQ ID NO: 5807 - protein, 1241 aa, Artificial Sequence
  SARS-CoV-2/SARS-CoV-2/Yunnan-01/human/2020/CHN__MT049951.1 spike protein (1-1211)(K986P_V987P_T887W_A1020W) Foldon construct
MFVFLVLLPLVSSQCVNLTTRTQLPPANTNSFTRGVYYPDKVFRSSVLHSTQDLFLPFFSNVTWFHAIHVSGTNGTKRFDNPVLPFNDGVYFASTEKSNIIRGWIFGTTLDSKTQSLLIVNNATNVVIKVCEFQFCNDPFLGVYYHKNNKSWMESEFRVYSSANNCTFEYVSQPFLMDLEGKQGNFKNLREFVFKNIDGYFKIYSKHTPINLVRDLPQGFSALEPLVDLPIGINITRFQTLLALHRSYLTPGDSSSGWTAGAAAYYVGYLQPRTFLLKYNENGTITDAVDCALDPLSETKCTLKSFTVEKGIYQTSNFRVQPTESIVRFPNITNLCPFGEVFNATRFASVYAWNRKRISNCVADYSVLYNSASFSTFKCYGVSPTKLNDLCFTNVYADSFVIRGDEVRQIAPGQTGKIADYNYKLPDDFTGCVIAWNSNNLDSKVGGNYNYLYRLFRKSNLKPFERDISTEIYQAGSTPCNGVEGFNCYFPLQSYGFQPTNGVGYQPYRVVVLSFELLHAPATVCGPKKSTNLVKNKCVNFNFNGLTGTGVLTESNKKFLPFQQFGRDIADTTDAVRDPQTLEILDITPCSFGGVSVITPGTNTSNQVAVLYQDVNCTEVPVAIHADQLTPTWRVYSTGSNVFQTRAGCLIGAEHVNNSYECDIPIGAGICASYQTQTNSPRRARSVASQSIIAYTMSLGAENSVAYSNNSIAIPTNFTISVTTEILPVSMTKTSVDCTMYICGDSTECSNLLLQYGSFCTQLNRALTGIAVEQDKNTQEVFAQVKQIYKTPPIKDFGGFNFSQILPDPSKPSKRSFIEDLLFNKVTLADAGFIKQYGDCLGDIAARDLICAQKFNGLTVLPPLLTDEMIAQYTSALLAGTITSGWWFGAGAALQIPFAMQMAYRFNGIGVTQNVLYENQKLIANQFNSAIGKIQDSLSSTASALGKLQDVVNQNAQALNTLVKQLSSNFGAISSVLNDILSRLDPPEAEVQIDRLITGRLQSLQTYVTQQLIRAAEIRWSANLAATKMSECVLGQSKRVDFCGKGYHLMSFPQSAPHGVVFLHVTYVPAQEKNFTTAPAICHDGKAHFPREGVFVSNGTHWFVTQRNFYEPQIITTDNTFVSGNCDVVIGIVNNTVYDPLQPELDSFKEELDKYFKNHTSPDVDLGDISGINASVVNIQKEIDRLNEVAKNLNESLIDLQELGKYEQYIKGGSGYIPEAPRDGQAYVRKDGEWVLLSTFL

SEQ ID NO: 5808 - protein, 1241 aa, Artificial Sequence
  SARS-CoV-2/USA/WA-UW292/2020__EPI_ISL_418077 spike protein (1-1211)(K986P_V987P_T887W_A1020W) Foldon construct
MFVFLVLLPLVSSQCVNLTTRTQLPPAYTNSFTRGVYYPDKVFRSSVLHSTQDLFLPFFSNVTWFHAIHVSGTNGTKRFDNPVLPFNDGVYFASTEKSNIIRGWIFGTTLDSKTQSLLIVNNATNVVIKVCEFQFCNDPFLGVYYHKNNKSWMESEFRVYSSANNCTFEYVSQPFLMDLEGKQGNFKNLREFVFKNIDGYFKIYSKHTPINLVRDLPQGFSALEPLVDLPIGINITRFQTLLALHRSYLTPGDSSSGWTAGAAAYYVGYLQPRTFLLKYNENGTITDAVDCALDPLSETKCTLKSFTVEKGIYQTSNFRVQPTESIVRFPNITNLCPFGEVFNATRFASVYAWNRKRISNCVADYSVLYNSASFSTFKCYGVSPTKLNDLCFTNVYADSFVIRGDEVRQIAPGQTGKIADYNYKLPDDFTGCVIAWNSNNLDSKVGGNYNYLYRLFRKSNLKPFERDISTEIYQASSTPCNGVEGFNCYFPLQSYGFQPTNGVGYQPYRVVVLSFELLHAPATVCGPKKSTNLVKNKCVNFNFNGLTGTGVLTESNKKFLPFQQFGRDIADTTDAVRDPQTLEILDITPCSFGGVSVITPGTNTSNQVAVLYQDVNCTEVPVAIHADQLTPTWRVYSTGSNVFQTRAGCLIGAEHVNNSYECDIPIGAGICASYQTQTNSPRRARSVASQSIIAYTMSLGAENSVAYSNNSIAIPTNFTISVTTEILPVSMTKTSVDCTMYICGDSTECSNLLLQYGSFCTQLNRALTGIAVEQDKNTQEVFAQVKQIYKTPPIKDFGGFNFSQILPDPSKPSKRSFIEDLLFNKVTLADAGFIKQYGDCLGDIAARDLICAQKFNGLTVLPPLLTDEMIAQYTSALLAGTITSGWWFGAGAALQIPFAMQMAYRFNGIGVTQNVLYENQKLIANQFNSAIGKIQDSLSSTASALGKLQDVVNQNAQALNTLVKQLSSNFGAISSVLNDILSRLDPPEAEVQIDRLITGRLQSLQTYVTQQLIRAAEIRWSANLAATKMSECVLGQSKRVDFCGKGYHLMSFPQSAPHGVVFLHVTYVPAQEKNFTTAPAICHDGKAHFPREGVFVSNGTHWFVTQRNFYEPQIITTDNTFVSGNCDVVIGIVNNTVYDPLQPELDSFKEELDKYFKNHTSPDVDLGDISGINASVVNIQKEIDRLNEVAKNLNESLIDLQELGKYEQYIKGGSGYIPEAPRDGQAYVRKDGEWVLLSTFL

SEQ ID NO: 5809 - protein, 1241 aa, Artificial Sequence
  SARS-CoV-2/Iceland/192/2020__EPI_ISL_417819 spike protein (1-1211)(K986P_V987P_T887W_A1020W) Foldon construct
MFVFFVLLPLVSSQCVNLTTRTQLPPAYTNSFTRGVYYPDKVFRSSVLHSTQDLFLPFFSNVTWFHAIHVSGTNGTKRFDNPVLPFNDGVYFASTEKSNIIRGWIFGTTLDSKTQSLLIVNNATNVVIKVCEFQFCNDPFLGVYYHKNNKSWMESEFRVYSSANNCTFEYVSQPFLMDLEGKQGNFKNLREFVFKNIDGYFKIYSKHTPINLVRDLPQGFSALEPLVDLPIGINITRFQTLLALHRSYLTPGDSSSGWTAGAAAYYVGYLQPRTFLLKYNENGTITDAVDCALDPLSETKCTLKSFTVEKGIYQTSNFRVQPTESIVRFPNITNLCPFGEVFNATRFASVYAWNRKRISNCVADYSVLYNSASFSTFKCYGVSPTKLNDLCFTNVYADSFVIRGDEVRQIAPGQTGKIADYNYKLPDDFTGCVIAWNSNNLDSKVGGNYNYLYRLFRKSNLKPFERDISTEIYQAGSTPCNGVEGFNCYFPLQSYGFQPTNGVGYQPYRVVVLSFELLHAPATVCGPKKSTNLVKNKCVNFNFNGLTGTGVLTESNKKFLPFQQFGRDIADTTDAVRDPQTLEILDITPCSFGGVSVITPGTNTSNQVAVLYQGVNCTEVPVAIHADQLTPTWRVYSTGSNVFQTRAGCLIGAEHVNNSYECDIPIGAGICASYQTQTNSPRRARSVASQSIIAYTMSLGAENSVAYSNNSIAIPTNFTISVTTEILPVSMTKTSVDCTMYICGDSTECSNLLLQYGSFCTQLNRALTGIAVEQDKNTQEVFAQVKQIYKTPPIKDFGGFNFSQILPDPSKPSKRSFIEDLLFNKVTLADAGFIKQYGDCLGDIAARDLICAQKFNGLTVLPPLLTDEMIAQYTSALLAGTITSGWWFGAGAALQIPFAMQMAYRFNGIGVTQNVLYENQKLIANQFNSAIGKIQDSLSSTASALGKLQDVVNQNAQALNTLVKQLSSNFGAISSVLNDILSRLDPPEAEVQIDRLITGRLQSLQTYVTQQLIRAAEIRWSANLAATKMSECVLGQSKRVDFCGKGYHLMSFPQSAPHGVVFLHVTYVPAQEKNFTTAPAICHDGKAHFPREGVFVSNGTHWFVTQRNFYEPQIITTDNTFVSGNCDVVIGIVNNTVYDPLQPELDSFKEELDKYFKNHTSPDVDLGDISGINASVVNIQKEIDRLNEVAKNLNESLIDLQELGKYEQYIKGGSGYIPEAPRDGQAYVRKDGEWVLLSTFL

SEQ ID NO: 5810 - protein, 1241 aa, Artificial Sequence
  SARS-CoV-2/Belgium/ULG-6939/2020__EPI_ISL_417020 spike protein (1-1211)(K986P_V987P_T887W_A1020W) Foldon construct
MFVFLVLLPLVSSQCVNLTTRTQLPPAYTNSFTRGVYYPDKVFRSSVLHSTQDLFLPFFSNVTWFHAIHVSGTNGTKRFDNPVLPFNDGVYFASTEKSNIIRGWIFGTTLDSKTQSLLIVNNATNVVIKVCEFQFCNDPFLGVYYHKNNKSWMESEFRVYSSANNCTFEYVSQPFLMDLEGKQGNFKNLREFVFKNIDGYFKIYSKHTPINLVRDLPQGFSALEPLVDLPIGINITRFQTLLALHRSYLTPGDSSSGWTAGAAAYYVGYLQPRTFLLKYNENGTITDAVDCALDPLSETKCTLKSFTVEKGIYQTSNFRVQPTESIVRFPNITNLCPFGEVFNATRFASVYAWNRKRISNCVADYSVLYNSASFSTFKCYGVSPTKLNDLCFTNVYADSFVIRGDEVRQIAPGQTGKIADYNYKLPDDFTGCVIAWNSNNLDSKVGGNYNYLYRLFRKSNLKPFERDISTEIYQAGSTPCNGVEGFNCYFPLQSYGFQPTNGVGYQPYRVVVLSFELLHAPATVCGPKKSTNLVKNKCVNFNFNGLTGTGVLTESNKKFLPFQQFGRDIADTTDAVRDPQTLEILDITPCSFGGVSVITPGTNTSNQVAVLYQGVNCTEVPVAIHADQLTPTWRVYSTGSNVFQTRAGCLIGAEHVNNSYECDIPIGAGICASYQTQTNSPRRARSVASQSIIAYTMSLGAENSVVYSNNSIAIPTNFTISVTTEILPVSMTKTSVDCTMYICGDSTECSNLLLQYGSFCTQLNRALTGIAVEQDKNTQEVFAQVKQIYKTPPIKDFGGFNFSQILPDPSKPSKRSFIEDLLFNKVTLADAGFIKQYGDCLGDIAARDLICAQKFNGLTVLPPLLTDEMIAQYTSALLAGTITSGWWFGAGAALQIPFAMQMAYRFNGIGVTQNVLYENQKLIANQFNSAIGKIQDSLSSTASALGKLQDVVNQNAQALNTLVKQLSSNFGAISSVLNDILSRLDPPEAEVQIDRLITGRLQSLQTYVTQQLIRAAEIRWSANLAATKMSECVLGQSKRVDFCGKGYHLMSFPQSAPHGVVFLHVTYVPAQEKNFTTAPAICHDGKAHFPREGVFVSNGTHWFVTQRNFYEPQIITTDNTFVSGNCDVVIGIVNNTVYDPLQPELDSFKEELDKYFKNHTSPDVDLGDISGINASVVNIQKEIDRLNEVAKNLNESLIDLQELGKYEQYIKGGSGYIPEAPRDGQAYVRKDGEWVLLSTFL

SEQ ID NO: 5811 - protein, 1241 aa, Artificial Sequence
  SARS-CoV-2/France/HF2496/2020__EPI_ISL_418231 spike protein (1-1211)(K986P_V987P_T887W_A1020W) Foldon construct
MFVFLVLLPLVSSQCVNLTTRTQLPPAYTNSFTRGVYYPDKVFRSSVLHSTQDLFLPFFSNVTWFHAIHVSGTNGTKRFDNPVLPFNDGVYFASTEKSNIIRGWIFGTTLDSKTQSLLIVNNATNVVIKVCEFQFCNDPFLGVYYHKNNKSWMESEFRVYSSANNCTFEYVSQPFLMDLEGKQGNFKNLREFVFKNIDGYFKIYSKHTPINLVRDLPQGFSALEPLVDLPIGINITRFQTLLALHRSYLTPGDSSSGWTAGAAAYYVGYLQPRTFLLKYNENGTITDAVDCALDPLSETKCTLKSFTVEKGIYQTSNFRVQPTESIVRFPNITNLCPFGEVFNATRFASVYAWNRKRISNCVADYSVLYNSASFSTFKCYGVSPTKLNDLCFTNVYADSFVIRGDEVRQIAPGQTGKIADYNYKLPDDFTGCVIAWNSNNLDSKVGGNYNYLYRLFRKSNLKPFERDISTEIYQAGSTPCNGVEGFNCYFPLQSYGFQPTNGVGYQPYRVVVLSFELLHAPATVCGPKKSTNLVKNKCVNFNFNGLTGTGVLTESNKKFLPFQQFGRDIADTTDAVRDPQTLEILDITPCSFGGVSVITPGTNTSNQVAVLYQGVNCTEVPVAIHADQLTPTWRVYSTGSNVFQTRAGCLIGAEHVNNSYECDIPIGAGICASYQTQTNSPRRARSVASQSIIAYTMSLGAENSVAYSNNSIAIPTNFTISVTTEILPVSMTKTSVDCTMYICGDSTECSNLLLQYGSFCTQLNRALTGIAVEQDKNTQEVFAQVKQIYKTPPIKDFGGFNFSQILPDPSKPSKRSFIEDLLFNKVTLADAGFIKQYGDCLGDIVARDLICAQKFNGLTVLPPLLTDEMIAQYTSALLAGTITSGWWFGAGAALQIPFAMQMAYRFNGIGVTQNVLYENQKLIANQFNSAIGKIQDSLSSTASALGKLQDVVNQNAQALNTLVKQLSSNFGAISSVLNDILSRLDPPEAEVQIDRLITGRLQSLQTYVTQQLIRAAEIRWSANLAATKMSECVLGQSKRVDFCGKGYHLMSFPQSAPHGVVFLHVTYVPAQEKNFTTAPAICHDGKAHFPREGVFVSNGTHWFVTQRNFYEPQIITTDNTFVSGNCDVVIGIVNNTVYDPLQPELDSFKEELDKYFKNHTSPDVDLGDISGINASVVNIQKEIDRLNEVAKNLNESLIDLQELGKYEQYIKGGSGYIPEAPRDGQAYVRKDGEWVLLSTFL

SEQ ID NO: 5812 - protein, 1241 aa, Artificial Sequence
  SARS-CoV-2/USA/WA-UW291/2020__EPI_ISL_418076 spike protein (1-1211)(K986P_V987P_T887W_A1020W) Foldon construct
MFVFLVLLPLVSSQCVNLTTRTQLPPAYTNSFTRGVYYPDKVFRSSVLHSTQDLFLPFFSNVTWFHAIHVSGTNGTKRFDNPVLPFNDGVYFASTEKSNIIRGWIFGTTLDSKTQSLLIVNNATNVVIKVCEFQFCNDPFLGVYYHKNNKSWMESEFRVYSSANNCTFEYVSQPFLMDLEGKQGNFKNLREFVFKNIDGYFKIYSKHTPINLVRDLPQGFSALEPLVDLPIGINITRFQTLLALHRSYLTPGDSSSGWTAGAAAYYVGYLQPRTFLLKYNENGTITDAVDCALDPLSETKCTLKSFTVEKGIYQTSNFRVQPTESIVRFPNITNLCPFGEVFNATRFASVYAWNRKRISNCVADYSVLYNSASFSTFKCYGVSPTKLNDLCFTNVYADSFVIRGDEVRQIAPGQTGKIADYNYKLPDDFTGCVIAWNSNNLDSKVGGNYNYLYRLFRKSNLKPFERDISTEIYQAGSTPCNGVEGFNCYFPLQSYGFQPTNGVGYQPYRVVVLSFELLHAPATVCGPKKSTNLVKNKCVNFNFNGLTGTGVLTESNKKFLPFQQFGRDIADTTDAVRDPQTLEILDITPCSFGGVSVITPGTNTSNQVAVLYQGVNCTEVPVAIHADQLTPTWRVYSTGSNVFQTRAGCLIGAEHVNNSYECDIPIGAGICASYQTQTNSPRRARSVASQSIIAYTMSLGAENSVAYSNNSIAIPTNFTISVTTEILPVSMTKTSVDCTMYICGDSTECSNLLLQYGSFCTQLNRALTGIAVEQDKNTQEVFAQVKQIYKTPPIKDFGGFNFSQILPDPSKPSKRSFIEDLLFNKVTLADAGFIKQYGDCLGDIAARDLICAQKFNGLTVLPPLLTDEMIAQYTSALLAGTITSGWWFGAGAALQIPFAMQMAYRFNGIGVTQNVLYENQKLIANQFNSAIGKIQYSLSSTASALGKLQDVVNQNAQALNTLVKQLSSNFGAISSVLNDILSRLDPPEAEVQIDRLITGRLQSLQTYVTQQLIRAAEIRWSANLAATKMSECVLGQSKRVDFCGKGYHLMSFPQSAPHGVVFLHVTYVPAQEKNFTTAPAICHDGKAHFPREGVFVSNGTHWFVTQRNFYEPQIITTDNTFVSGNCDVVIGIVNNTVYDPLQPELDSFKEELDKYFKNHTSPDVDLGDISGINASVVNIQKEIDRLNEVAKNLNESLIDLQELGKYEQYIKGGSGYIPEAPRDGQAYVRKDGEWVLLSTFL

SEQ ID NO: 5813 - protein, 1241 aa, Artificial Sequence; identical to SEQ ID NO: 5776
  SARS-CoV-2/Portugal/PT0034/2020__EPI_ISL_418019 spike protein (1-1211)(K986P_V987P_T887W_A1020W) Foldon construct

SEQ ID NO: 5814 - protein, 1241 aa, Artificial Sequence
  SARS-CoV-2/Iceland/202/2020__EPI_ISL_417750 spike protein (1-1211)(K986P_V987P_T887W_A1020W) Foldon construct
MFVFLVLLPLVSSQCVNLTTRTQLPPAYTNSFTRGVYYPDKVFRSSVLHSTQDLFLPFFSNVTWFHAIHVSGTNGTKRFDNPVLPFNDGVYFASTEKSNIIRGWIFGTTLDSKTQSLLIVNNATNVVIKVCEFQFCNDPFLGVYYHKNNKSWMESEFRVYSSANNCTFEYVSQPFLMDLEGKQGNFKNLREFVFKNIDGYFKIYSKHTPINLVRDLPQGFSALEPLVDLPIGINITRFQTLLALHRSYLTPGDSSSGWTAGAAAYYVGYLQPRTFLLKYNENGTITDAVDCALDPLSETKCTLKSFTVEKGIYQTSNFRVQPTESIVRFPNITNLCPFGEVFNATRFASVYAWNRKRISNCVADYSVLYNSASFSTFKCYGVSPTKLNDLCFTNVYADSFVIRGDEVRQIAPGQTGKIADYNYKLPDDFTGCVIAWNSNNLDSKVGGNYNYLYRLFRKSNLKPFERDISTEIYQAGSTPCNGVEGFNCYFPLQSYGFQPTNGVGYQPYRVVVLSFELLHAPATVCGPKKSTNLVKNKCVNFNFNGLTGTGVLTESNKKFLPFQQFGRDIADTTDAVRDPQTLEILDITPCSFGGVSVITPGTNTSNQVAVLYQDVNCTEVPVAIHADQLTPTWRVYSTGSNVFQTRAGCLIGAEHVNNSYECDIPIGAGICASYQTQTNSPRRARSVASQSIIAYTMSLGAENSVAYSNNSIAIPTNFTISVTTEILPVSMTKTSVDCTMYICGDSTECSNLLLQYGSFCTQLNRALTGIAVEQDKNTQEVFAQVKQIYKTPPIKDFGGFNFSQILPDPSKPSKRSFIEDLLFNKVTLADAGFIKQYGDCLGDIAARDLICAQKFNGLTVLPPLLTDEMIAQYTSALLAGTITSGWWFGAGAALQIPFAMQMAYRFNGIGVTQNVLYENQKLIANQFNSAIGKIQDSLSSTASALGKLQDVVNQNAQALNTLVKQLSSNFGAISSVLNDILSRLDPPEAEVQIDRLITGRLQSLQTYVTQQLIRAAEIRWSANLAATKMSECVLGQSKRVDFCGKGYHLMSFPQSAPHGVVFLHVTYVPAQEKNFTTAPAICHDGKAHFPREGVFVSNGTHWFVTQRNFYEPQIITTDNTFVSGNCDVVIGIVNNTVYDPLQPELDSFKEELDKYFKNHTSPDVDLGDIPGINASVVNIQKEIDRLNEVAKNLNESLIDLQELGKYEQYIKGGSGYIPEAPRDGQAYVRKDGEWVLLSTFL

SEQ ID NO: 5815 - protein, 1241 aa, Artificial Sequence
  SARS-CoV-2/USA/WA-UW261/2020__EPI_ISL_418046 spike protein (1-1211)(K986P_V987P_T887W_A1020W) Foldon construct
MFVFLVLLPLVSSQCVNLTTRTQLPPAYTNSFTRGVYYPDKVFRSSVLHSTQDLFLPFFSNVTWFHAIHVSGTNGTKRFDNPVLPFNDGVYFASTEKSNIIRGWIFGTTLDSKTQSLLIVNNATNVVIKVCEFQFCNDPFLGVYYHKNNKSWMESEFRVYSSANNCTFEYVSQPFLMDLEGKQGNFKNLREFVFKNIDGYFKIYSKHTPINLVRDLPQGFSALEPLVDLPIGINITRFQTLLALHRSYLTPGDSSSGWTAGAAAYYVGYLQPRTFLLKYNENGTITDAVDCALDPLSETKCTLKSFTVEKGIYQTSNFRVQPTESIVRFPNITNLCPFGEVFNATRFTSVYAWNRKRISNCVADYSVLYNSASFSTFKCYGVSPTKLNDLCFTNVYADSFVIRGDEVRQIAPGQTGKIADYNYKLPDDFTGCVIAWNSNNLDSKVGGNYNYLYRLFRKSNLKPFERDISTEIYQAGSTPCNGVEGFNCYFPLQSYGFQPTNGVGYQPYRVVVLSFELLHAPATVCGPKKSTNLVKNKCVNFNFNGLTGTGVLTESNKKFLPFQQFGRDIADTTDAVRDPQTLEILDITPCSFGGVSVITPGTNTSNQVAVLYQDVNCTEVPVAIHADQLTPTWRVYSTGSNVFQTRAGCLIGAEHVNNSYECDIPIGAGICASYQTQTNSPRRARSVASQSIIAYTMSLGAENSVAYSNNSIAIPTNFTISVTTEILPVSMTKTSVDCTMYICGDSTECSNLLLQYGSFCTQLNRALTGIAVEQDKNTQEVFAQVKQIYKTPPIKDFGGFNFSQILPDPSKPSKRSFIEDLLFNKVTLADAGFIKQYGDCLGDIAARDLICAQKFNGLTVLPPLLTDEMIAQYTSALLAGTITSGWWFGAGAALQIPFAMQMAYRFNGIGVTQNVLYENQKLIANQFNSAIGKIQDSLSSTASALGKLQDVVNQNAQALNTLVKQLSSNFGAISSVLNDILSRLDPPEAEVQIDRLITGRLQSLQTYVTQQLIRAAEIRWSANLAATKMSECVLGQSKRVDFCGKGYHLMSFPQSAPHGVVFLHVTYVPAQEKNFTTAPAICHDGKAHFPREGVFVSNGTHWFVTQRNFYEPQIITTDNTFVSGNCDVVIGIVNNTVYDPLQPELDSFKEELDKYFKNHTSPDVDLGDISGINASVVNIQKEIDRLNEVAKNLNESLIDLQELGKYEQYIKGGSGYIPEAPRDGQAYVRKDGEWVLLSTFL

SEQ ID NO: 5816 - protein, 1241 aa, Artificial Sequence
  SARS-CoV-2/Portugal/PT0035/2020__EPI_ISL_418020 spike protein (1-1211)(K986P_V987P_T887W_A1020W) Foldon construct
MFVFLVLLPLVSSQCVNLTTRTQLPPAYTNSFTRGVYYPDKVFRSSVLHSTQDLFLPFFSNVTWFHAIHVSGTNGTKRFDNPVLPFNDGVYFASTEKSNIIRGWIFGTTLDSKTQSLLIVNNATNVVIKVCEFQFCNDPFLGVYYHKNNKSWMESEFRVYSSANNCTFEYVSQPFLMDLEGKQGNFKNLREFVFKNIDGYFKIYSKHTPINLVRDLPQGFSALEPLVDLPIGINITRFQTLLALHRSYLTPGDSSSGWTAGAAAYYVGYLQPRTFLLKYNENGTITDAVDCALDPLSETKCTLKSFTVEKGIYQTSNFRVQPTESIVRFPNITNLCPFGEVFNATRFASVYAWNRKRISNCVADYSVLYNSASFSTFKCYGVSPTKLNDLCFTNVYADSFVIRGDEVRQIAPGQTGKIADYNYKLPDDFTGCVIAWNSNNLDSKVGGNYNYLYRLFRKSNLKPFERDISTEIYQAGSTPCNGVEGFNCYFPLQSYGFQPTNGVGYQPYRVVVLSFELLHAPATVCGPKKSTNLVKNKCVNFNFNGLTGTGVLTESNKKFLPFQQFGRDIADTTDAVRDPQTLEILDITPCSFGGVSVITPGTNTSNQVAVLYQDVNCTEVPVAIHADQLTPTWRVYSTGSNVFQTRAGCLIGAEHVNNSYECDIPIGAGICASYQTQTNSPRRARSVASQSIIAYTMSLGAENSVAYSNNSIAIPTNFTISVTTEILPVSMTKTSVDCTMYICGDSTECSNLLLQYGSFCTQLNRALTGIAVEQDKNTQEVFAQVKQIYKTPPIKDFGGFNFSQILPDPSKPSKRSFIEDLLFNKVTLADAGFIKQYGDCLGDISARDLICAQKFNGLTVLPPLLTDEMIAQYTSALLAGTITSGWWFGAGAALQIPFAMQMAYRFNGIGVTQNVLYENQKLIANQFNSAIGKIQDSLSSTASALGKLQDVVNQNAQALNTLVKQLSSNFGAISSVLNDILSRLDPPEAEVQIDRLITGRLQSLQTYVTQQLIRAAEIRWSANLAATKMSECVLGQSKRVDFCGKGYHLMSFPQSAPHGVVFLHVTYVPAQEKNFTTAPAICHDGKAHFPREGVFVSNGTHWFVTQRNFYEPQIITTDNTFVSGNCDVVIGIVNNTVYDPLQPELDSFKEELDKYFKNHTSPDVDLGDISGINASVVNIQKEIDRLNEVAKNLNESLIDLQELGKYEQYIKGGSGYIPEAPRDGQAYVRKDGEWVLLSTFL

SEQ ID NO: 5817 - protein, 1241 aa, Artificial Sequence
  SARS-CoV-2/USA/NY-NYUMC7/2020__EPI_ISL_418192 spike protein (1-1211)(K986P_V987P_T887W_A1020W) Foldon construct
MFVFLVLLPLVSSQCVNLTTRTQLPPAYTNSFTRGVYYPDKVFRSSVLHSTQDLFLPFFSNVTWFHAIHVSGTNGTKRFDNPVLPFNDGVYFASTEKSNIIRGWIFGTTLDSKTQSLLIVNNATNVVIKVCEFQFCNDPFLGVYHHKNNKSWMESEFRVYSSANNCTFEYVSQPFLMDLEGKQGNFKNLREFVFKNIDGYFKIYSKHTPINLVRDLPQGFSALEPLVDLPIGINITRFQTLLALHRSYLTPGDSSSGWTAGAAAYYVGYLQPRTFLLKYNENGTITDAVDCALDPLSETKCTLKSFTVEKGIYQTSNFRVQPTESIVRFPNITNLCPFGEVFNATRFASVYAWNRKRISNCVADYSVLYNSASFSTFKCYGVSPTKLNDLCFTNVYADSFVIRGDEVRQIAPGQTGKIADYNYKLPDDFTGCVIAWNSNNLDSKVGGNYNYLYRLFRKSNLKPFERDISTEIYQAGSTPCNGVEGFNCYFPLQSYGFQPTNGVGYQPYRVVVLSFELLHAPATVCGPKKSTNLVKNKCVNFNFNGLTGTGVLTESNKKFLPFQQFGRDIADTTDAVRDPQTLEILDITPCSFGGVSVITPGTNTSNQVAVLYQGVNCTEVPVAIHADQLTPTWRVYSTGSNVFQTRAGCLIGAEHVNNSYECDIPIGAGICASYQTQTNSPRRARSVASQSIIAYTMSLGAENSVAYSNNSIAIPTNFTISVTTEILPVSMTKTSVDCTMYICGDSTECSNLLLQYGSFCTQLNRALTGIAVEQDKNTQEVFAQVKQIYKTPPIKDFGGFNFSQILPDPSKPSKRSFIEDLLFNKVTLADAGFIKQYGDCLGDIAARDLICAQKFNGLTVLPPLLTDEMIAQYTSALLAGTITSGWWFGAGAALQIPFAMQMAYRFNGIGVTQNVLYENQKLIANQFNSAIGKIQDSLSSTASALGKLQDVVNQNAQALNTLVKQLSSNFGAISSVLNDILSRLDPPEAEVQIDRLITGRLQSLQTYVTQQLIRAAEIRWSANLAATKMSECVLGQSKRVDFCGKGYHLMSFPQSAPHGVVFLHVTYVPAQEKNFTTAPAICHDGKAHFPREGVFVSNGTHWFVTQRNFYEPQIITTDNTFVSGNCDVVIGIVNNTVYDPLQPELDSFKEELDKYFKNHTSPDVDLGDISGINASVVNIQKEIDRLNEVAKNLNESLIDLQELGKYEQYIKGGSGYIPEAPRDGQAYVRKDGEWVLLSTFL

SEQ ID NO: 5818 - protein, 1241 aa, Artificial Sequence
  SARS-CoV-2/Iceland/189/2020__EPI_ISL_417709 spike protein (1-1211)(K986P_V987P_T887W_A1020W) Foldon construct
MFVFLVLLPLVSSQCVNLTTRTQLPPAYTNSFTRGVYYPDKVFRSSVLHSTQDLFLPFFSNVTWFHAIHVSGTNGTKRFDNPVLPFNDGVYFASTEKSNIIRGWIFGTTLDSKTQSLLIVNNATNVVIKVCEFQFCNDPFLGVYYHKNNKSWMESEFRVYSSANNCTFEYVSQPFLMDLEGKQGNFKNLREFVFKNIDGYFKIYSKHTPINLVRDLPQGFSALEPLVDLPIGINITRFQTLLALHRSYLTPGDSSSGWTAGAAAYYVGYLQPRTFLLKYNENGTITDAVDCALDPLSETKCTLKSFTVEKGIYQTSNFRVQPTESIVRFPNITNLCPFGEVFNATRFASVYAWNRKRISNCVADYSVLYNSASFSTFKCYGVSPTKLNDLCFTNVYADSFVIRGDEVRQIAPGQTGKIADYNYKLPDDFTGCVIAWNSNNLDSKVGGNYNYLYRLFRKSNLKPFERDISTEIYQAGSTPCNGVEGFNCYFPLQSYGFQPTNGVGYQPYRVVVLSFELLHAPATVCGPKKSTNLVKNKCVNFNFNGLTGTGVLTESNKKFLPFQQFGRDIADTTDAVRDPQTLEILDITPCSFGGVSVITPGTNTSNQVAVLYQGVNCTEVPVAIHADQLTPTWRVYSTGSNVFQTRAGCLIGAEHVNNSYECDIPIGAGICASYQTQTNSPRRARSVASQSIIAYTMSLGAENSVAYSNNSIAIPTNFTISVTTEILPVSMTKTSVDCTMYICGDSTECSNLLLQYGSFCTQLNRALTGIAVEQDKNTQEVFAQVKQIYKTPPIKDFGGFNFSQILPDPSKPSKRSFIEDLLFNKVTLADAGFTKQYGDCLGDIAARDLICAQKFNGLTVLPPLLTDEMIAQYTSALLAGTITSGWWFGAGAALQIPFAMQMAYRFNGIGVTQNVLYENQKLIANQFNSAIGKIQDSLSSTASALGKLQDVVNQNAQALNTLVKQLSSNFGAISSVLNDILSRLDPPEAEVQIDRLITGRLQSLQTYVTQQLIRAAEIRWSANLAATKMSECVLGQSKRVDFCGKGYHLMSFPQSAPHGVVFLHVTYVPAQEKNFTTAPAICHDGKAHFPREGVFVSNGTHWFVTQRNFYEPQIITTDNTFVSGNCDVVIGIVNNTVYDPLQPELDSFKEELDKYFKNHTSPDVDLGDISGINASVVNIQKEIDRLNEVAKNLNESLIDLQELGKYEQYIKGGSGYIPEAPRDGQAYVRKDGEWVLLSTFL

SEQ ID NO: 5819 - protein, 1241 aa, Artificial Sequence
  SARS-CoV-2/Australia/NSW56/2020__EPI_ISL_417408 spike protein (1-1211)(K986P_V987P_T887W_A1020W) Foldon construct
MFVFLVLLPLVSSQCVNLTTRTQLPPAYTNSFTRGVYYPDKVFRSSVLHSTQDLFLPFFSNVTWFHAIHVSGTNGTKRFDNPVLPFNDGVYFASTEKSNIIRGWIFGTTLDSKTQSLLIVNNATNVVIKVCEFQFCNDPFLGVYYHKNNKSWMESEFRVYSSANNCTFEYVSQPFLMDLEGKQGNFKNLREFVFKNIDGYFKIYSKHTPINLVRDLPQGFSALEPLVDLPIGINITRFQTLLALHRSYLTPGDSSSGWTAGAAAYYVGYLQPRTFLLKYNENGTITDAVDCALDPLSETKCTLKSFTVEKGIYQTSNFRVQPTESIVRFPNITNLCPFGEVFNATRFASVYAWNRKRISNCVADYSVLYNSASFSTFKCYGVSPTKLNDLCFTNVYADSFVIRGDEVRQIAPGQTGKIADYNYKLPDDFTGCVIAWNSNNLDSKVGGNYNYLYRLFRKSNLKPFERDISTEIYQAGSTPCNGVEGFNCYFPLQSYGFQPTNGVGYQPYRVVVLSFELLHAPATVCGPKKSTNLVKNKCVNFNFNGLTGTGVLTESNKKFLPFQQFGRDIADTTDAVRDPQTLEILDITPCSFGGVSVITPGTNTSNQVAVLYQDVNCTEVPVAIHADQLTPTWRVYSTGSNVFQTRAGCLIGAEHVNNSYECDIPIGAGICASYQTQTNSPRRARSVASQSIIAYTMSLGAENSVAYSNNSIAIPTNFTISVTTEILPVSMTKTSVDCTMYICGDSTECSNLLLQYGSFCTQLNRALTGIAVEQDKNTQEVFAQVKQIYKTPPIKDFGGFNFSQILPDSSKPSKRSFIEDLLFNKVTLADAGFIKQYGDCLGDIAARDLICAQKFNGLTVLPPLLTDEMIAQYTSALLAGTITSGWWFGAGAALQIPFAMQMAYRFNGIGVTQNVLYENQKLIANQFNSAIGKIQDSLSSTASALGKLQDVVNQNAQALNTLVKQLSSNFGAISSVLNDILSRLDPPEAEVQIDRLITGRLQSLQTYVTQQLIRAAEIRWSANLAATKMSECVLGQSKRVDFCGKGYHLMSFPQSAPHGVVFLHVTYVPAQEKNFTTAPAICHDGKAHFPREGVFVSNGTHWFVTQRNFYEPQIITTDNTFVSGNCDVVIGIVNNTVYDPLQPELDSFKEELDKYFKNHTSPDVDLGDISGINASVVNIQKEIDRLNEVAKNLNESLIDLQELGKYEQYIKGGSGYIPEAPRDGQAYVRKDGEWVLLSTFL

SEQ ID NO: 5820 - protein, 1241 aa, Artificial Sequence
  SARS-CoV-2/Iceland/280/2020__EPI_ISL_417608 spike protein (1-1211)(K986P_V987P_T887W_A1020W) Foldon construct
MFVFLVLLPLVSSQCVNLTTRTQLPPAYTNSFTRGVYYPDKVFRSSVLHSTQDLFLPFFSNVTWFHAIHVSGTNGTKRFDNPVLPFNDGVYFASTEKSNIIRGWIFGTTLDSKTQSLLIVNNATNVVIKVCEFQFCNDPFLGVYYHKNNKSWMESEFRVYSSANNCTFEYVSQPFLMDLEGKQGNFKNLREFVFKNIDGYFKIYSKHTPINLVRDLPQGFSALEPLVDLPIGINITRFQTLLALHRSYLTPGDSSSGWTAGAAAYYVGYLQPRTFLLKYNENGTITDAVDCALDPLSETKCTLKSFTVEKGIYQTSNFRVQPTESIVRFPNITNLCPFGEVFNATRFASVYAWNRKRISNCVADYSVLYNSASFSTFKCYGVSPTKLNDLCFTNVYADSFVIRGDEVRQIAPGQTGKIADYNYKLPDDFTGCVIAWNSNNLDSKVGGNYNYLYRLFRKSNLKPFERDISTEIYQAGSTPCNGVEGFNCYFPLQSYGFQPTNGVGYQPYRVVVLSFELLHAPATVCGPKKSTNLVKNKCVNFNFNGLTGTGVLTESNKKFLPFQQFGRDIADTTDAVRDPQTLEILDITPCSFGGVSVITPGTNTSNQVAVLYQGVNCTEVPVAIHADQLTPTWRVYSTGSNVFQTRAGCLIGAEHVNNSYECDIPIGAGICASYHTQTNSPRRARSVASQSIIAYTMSLGAENSVAYSNNSIAIPTNFTISVTTEILPVSMTKTSVDCTMYICGDSTECSNLLLQYGSFCTQLNRALTGIAVEQDKNTQEVFAQVKQIYKTPPIKDFGGFNFSQILPDPSKPSKRSFIEDLLFNKVTLADAGFIKQYGDCLGDIAARDLICAQKFNGLTVLPPLLTDEMIAQYTSALLAGTITSGWWFGAGAALQIPFAMQMAYRFNGIGVTQNVLYENQKLIANQFNSAIGKIQDSLSSTASALGKLQDVVNQNAQALNTLVKQLSSNFGAISSVLNDILSRLDPPEAEVQIDRLITGRLQSLQTYVTQQLIRAAEIRWSANLAATKMSECVLGQSKRVDFCGKGYHLMSFPQSAPHGVVFLHVTYVPAQEKNFTTAPAICHDGKAHFPREGVFVSNGTHWFVTQRNFYEPQIITTDNTFVSGNCDVVIGIVNNTVYDPLQPELDSFKEELDKYFKNHTSPDVDLGDISGINASVVNIQKEIDRLNEVAKNLNESLIDLQELGKYEQYIKGGSGYIPEAPRDGQAYVRKDGEWVLLSTFL

SEQ ID NO: 5821 - protein, 1241 aa, Artificial Sequence; identical to SEQ ID NO: 5776
  SARS-CoV-2/Iceland/247/2020__EPI_ISL_417575 spike protein (1-1211)(K986P_V987P_T887W_A1020W) Foldon construct

SEQ ID NO: 5822 - protein, 1241 aa, Artificial Sequence
  SARS-CoV-2/Iceland/238/2020__EPI_ISL_417566 spike protein (1-1211)(K986P_V987P_T887W_A1020W) Foldon construct
MFVFLVLLPLVSSQCVNLTTRTQLPPAYTNSFTRGVYYPDKVFRSSVLHSTQDLFLPFFSNVTWFHAIHVSGTNGTKRFDNPVLPFNDGVYFASTEKSNIIRGWIFGTTLDSKTQSLLIVNNATNVVIKVCEFQFCNDPFLGVYYHKNNKSWMESEFRVYSSANNCTFEYVSQPFLMDLEGKQGNFKNLREFVFKNIDGYFKIYSKHTPINLVRDLPQGFSALEPLVDLPIGINITRFQTLLALHRSYLTPGDSSSGWTAGAAAYYVGYLQPRTFLLKYNENGTITDAVDCALDPLSETKCTLKSFTVEKGIYQTSNFRVQPTESIVRFPNITNLCPFGEVFNATRFASVYAWNRKRISNCVADYSVLYNSASFSTFKCYGVSPTKLNDLCFTNVYADSFVIRGDEVRQIAPGQTGKIADYNYKLPDDFTGCVIAWNSNNLDSKVGGNYNYLYRLFRKSNLKPFERDISTEIYQAGSTPCNGVEGFNCYFPLQSYGFQPTNGVGYQPYRVVVLSFELLHAPATVCGPKKSTNLVKNKCVNFNFNGLTGTGVLTESNKKFLPFQQFGRDIADTTDAVRDPQTLEILDITPCSFGGVSVITPGTNTSNQVAVLYQGVNCTEVPVAIHADQLTPTWRVYSTGSNVFQTRAGCLIGAEHVNNSYECDIPIGAGICASYQTQTNSPRRARSVASQSIIAYTMSLGAENSVAYSNNSIAIPTNFTISVTTEILPVSMTKTSVDCTMYICGDSTECSNLLLQYGSFCTQLNRALTGIAVEQDKNTQEVFAQVKQIYKTPPIKDFGGFNFSQILPDPSKPSKRSFIEDLLFNKVTLADVGFIKQYGDCLGDIAARDLICAQKFNGLTVLPPLLTDEMIAQYTSALLAGTITSGWWFGAGAALQIPFAMQMAYRFNGIGVTQNVLYENQKLIANQFNSAIGKIQDSLSSTASALGKLQDVVNQNAQALNTLVKQLSSNFGAISSVLNDILSRLDPPEAEVQIDRLITGRLQSLQTYVTQQLIRAAEIRWSANLAATKMSECVLGQSKRVDFCGKGYHLMSFPQSAPHGVVFLHVTYVPAQEKNFTTAPAICHDGKAHFPREGVFVSNGTHWFVTQRNFYEPQIITTDNTFVSGNCDVVIGIVNNTVYDPLQPELDSFKEELDKYFKNHTSPDVDLGDISGINASVVNIQKEIDRLNEVAKNLNESLIDLQELGKYEQYIKGGSGYIPEAPRDGQAYVRKDGEWVLLSTFL

SEQ ID NO: 5823 - protein, 1241 aa, Artificial Sequence
  SARS-CoV-2/Greece/16/2020__EPI_ISL_418265 spike protein (1-1211)(K986P_V987P_T887W_A1020W) Foldon construct
MFVFLVLLPLVSSQCVNLTTRTQLPPAYTNSFTRGVYYPDKVFRSSVLHSTQDLFLPFFSNVTWFHAIHVSGTNGTKRFDNPVLPFNDGVYFASTEKSNIIRGWIFGTTLDSKTQSLLIVNNATNVVIKVCEFQFCNDPFLGVYYHKNNKSWMESEFRVYSSANNCTFEYVSQPFLMDLEGKQGNFKNLREFVFKNVDGYFKIYSKHTPINLVRDLPQGFSALEPLVDLPIGINITRFQTLLALHRSYLTPGDSSSGWTAGAAAYYVGYLQPRTFLLKYNENGTITDAVDCALDPLSETKCTLKSFTVEKGIYQTSNFRVQPTESIVRFPNITNLCPFGEVFNATRFASVYAWNRKRISNCVADYSVLYNSASFSTFKCYGVSPTKLNDLCFTNVYADSFVIRGDEVRQIAPGQTGKIADYNYKLPDDFTGCVIAWNSNNLDSKVGGNYNYLYRLFRKSNLKPFERDISTEIYQAGSTPCNGVEGFNCYFPLQSYGFQPTNGVGYQPYRVVVLSFELLHAPATVCGPKKSTNLVKNKCVNFNFNGLTGTGVLTESNKKFLPFQQFGRDIADTTDAVRDPQTLEILDITPCSFGGVSVITPGTNTSNQVAVLYQDVNCTEVPVAIHADQLTPTWRVYSTGSNVFQTRAGCLIGAEHVNNSYECDIPIGAGICASYQTQTNSPRRARSVASQSIIAYTMSLGAENSVAYSNNSIAIPTNFTISVTTEILPVSMTKTSVDCTMYICGDSTECSNLLLQYGSFCTQLNRALTGIAVEQDKNTQEVFAQVKQIYKTPPIKDFGGFNFSQILPDPSKPSKRSFIEDLLFNKVTLADAGFIKQYGDCLGDIAARDLICAQKFNGLTVLPPLLTDEMIAQYTSALLAGTITSGWWFGAGAALQIPFAMQMAYRFNGIGVTQNVLYENQKLIANQFNSAIGKIQDSLSSTASALGKLQDVVNQNAQALNTLVKQLSSNFGAISSVLNDILSRLDPPEAEVQIDRLITGRLQSLQTYVTQQLIRAAEIRWSANLAATKMSECVLGQSKRVDFCGKGYHLMSFPQSAPHGVVFLHVTYVPAQEKNFTTAPAICHDGKAHFPREGVFVSNGTHWFVTQRNFYEPQIITTDNTFVSGNCDVVIGIVNNTVYDPLQPELDSFKEELDKYFKNHTSPDVDLGDISGINASVVNIQKEIDRLNEVAKNLNESLIDLQELGKYEQYIKGGSGYIPEAPRDGQAYVRKDGEWVLLSTFL

SEQ ID NO: 5824 - protein, 1241 aa, Artificial Sequence
  SARS-CoV-2/Iceland/319/2020__EPI_ISL_417648 spike protein (1-1211)(K986P_V987P_T887W_A1020W) Foldon construct
MFVFLVLLPLVSSQCVNLTTRTQLPPAYTNSFTRGVYYPDKVFRSSVLHSTQDLFLPFFSNVTWFHAIHVSGTNGTKRFDNPVLPFNDGVYFASTEKSNIIRGWIFGTTLDSKTQSLLIVNNATNVVIKVCEFQFCNDPFLGVYYHKNNKSWMESEFRVYSSANNCTFEYVSQPFLIDLEGKQGNFKNLREFVFKNIDGYFKIYSKHTPINLVRDLPQGFSALEPLVDLPIGINITRFQTLLALHRSYLTPGDSSSGWTAGAAAYYVGYLQPRTFLLKYNENGTITDAVDCALDPLSETKCTLKSFTVEKGIYQTSNFRVQPTESIVRFPNITNLCPFGEVFNATRFASVYAWNRKRISNCVADYSVLYNSASFSTFKCYGVSPTKLNDLCFTNVYADSFVIRGDEVRQIAPGQTGKIADYNYKLPDDFTGCVIAWNSNNLDSKVGGNYNYLYRLFRKSNLKPFERDISTEIYQAGSTPCNGVEGFNCYFPLQSYGFQPTNGVGYQPYRVVVLSFELLHAPATVCGPKKSTNLVKNKCVNFNFNGLTGTGVLTESNKKFLPFQQFGRDIADTTDAVRDPQTLEILDITPCSFGGVSVITPGTNTSNQVAVLYQGVNCTEVPVAIHADQLTPTWRVYSTGSNVFQTRAGCLIGAEHVNNSYECDIPIGAGICASYQTQTNSPRRARSVASQSIIAYTMSLGAENSVAYSNNSIAIPTNFTISVTTEILPVSMTKTSVDCTMYICGDSTECSNLLLQYGSFCTQLNRALTGIAVEQDKNTQEVFAQVKQIYKTPPIKDFGGFNFSQILPDPSKPSKRSFIEDLLFNKVTLADAGFIKQYGDCLGDIAARDLICAQKFNGLTVLPPLLTDEMIAQYTSALLAGTITSGWWFGAGAALQIPFAMQMAYRFNGIGVTQNVLYENQKLIANQFNSAIGKIQDSLSSTASALGKLQDVVNQNAQALNTLVKQLSSNFGAISSVLNDILSRLDPPEAEVQIDRLITGRLQSLQTYVTQQLIRAAEIRWSANLAATKMSECVLGQSKRVDFCGKGYHLMSFPQSAPHGVVFLHVTYVPAQEKNFTTAPAICHDGKAHFPREGVFVSNGTHWFVTQRNFYEPQIITTDNTFVSGNCDVVIGIVNNTVYDPLQPELDSFKEELDKYFKNHTSPDVDLGDISGINASVVNIQKEIDRLNEVAKNLNESLIDLQELGKYEQYIKGGSGYIPEAPRDGQAYVRKDGEWVLLSTFL

SEQ ID NO: 5825 - protein, 1241 aa, Artificial Sequence
  SARS-CoV-2/Congo/94/2020__EPI_ISL_417947 spike protein (1-1211)(K986P_V987P_T887W_A1020W) Foldon construct
MFVFLVLLPLVSSQCVNLTTRTQLPPAYTNSFTRGVYYPDKVFRSSVLHSTQDLFLPFFSNVTWFHAIHVSGTNGTKRFDNPVLPFNDGVYFASTEKSNIIRGWIFGTTLDSKTQSLLIVNNATNVVIKVCEFQFCNDPFLGVYYHKNNKSWMESEFRVYSSANNCTFEYVSQPFLMDLEGKQGNFKNLREFVFKNIDGYFKIYSKHTPINLVRDLPQGFSALEPLVDLPIGINITRFQTLLALHRSYLTPGDSSSGWTAGAAAYYVGYLQPRTFLLKYNENGTITDAVDCALDPLSETKCTLKSFTVEKGIYQTSNFRVQPTESIVRFPNITNLCPFGEVFNATRFASVYAWNRKRISNCVADYSVLYNSASFSTFKCYGVSPTKLNDLCFTNVYADSFVIRGDEVRQIAPGQTGKIADYNYKLPDDFTGCVIAWNSNNLDSKVGGNYNYLYRLFRKSNLKPFERDISTEIYQAGSTPCNGVEGFNCYFPLQSYGFQPTNGVGYQPYRVVVLSFELLHAPATVCGPKKSTNLVKNKCVNFNFNGLTGTGVLTESNKKFLPFQQFGRDIADTTDAVRDPQTLEILDITPCSFGGVSVITPGTNTSNQVAVLYQGVNCTEVPVAIHADQLTPTWRVYSTGSNVFQTRAGCLIGAEHVNNSYECDIPIGAGICASYQTQTNSPRRARSVASQSIIAYTMSLGAENSVAYSNNSIAIPTNFTISVTTEILPVSMTKTSVDCTMYICGDSTECSNLLLQYGSFCTQLNRALTGIAVEQDKNTQEVFAQVKQIYKTPPIKDFGGFNFSQILPDPSKPSKRSFIEDILFNKVTLADAGFIKQYGDCLGDIAARDLICAQKFNGLTVLPPLLTDEMIAQYTSALLAGTITSGWWFGAGAALQIPFAMQMAYRFNGIGVTQNVLYENQKLIANQFNSAIGKIQDSLSSTASALGKLQDVVNQNAQALNTLVKQLSSNFGAISSVLNDILSRLDPPEAEVQIDRLITGRLQSLQTYVTQQLIRAAEIRWSANLAATKMSECVLGQSKRVDFCGKGYHLMSFPQSAPHGVVFLHVTYVPAQEKNFTTAPAICHDGKAHFPREGVFVSNGTHWFVTQRNFYEPQIITTDNTFVSGNCDVVIGIVNNTVYDPLQPELDSFKEELDKYFKNHTSPDVDLGDISGINASVVNIQKEIDRLNEVAKNLNESLIDLQELGKYEQYIKGGSGYIPEAPRDGQAYVRKDGEWVLLSTFL

SEQ ID NO: 5826 - protein, 1241 aa, Artificial Sequence
  SARS-CoV-2/Congo/158/2020__EPI_ISL_417950 spike protein (1-1211)(K986P_V987P_T887W_A1020W) Foldon construct
MFVFLVLLPLVSSQCVNLTTRTQLPPAYTNSFTRGVYYPDKVFRSSVLHSTQDLFLPFFSNVTWFHAIHVSGTNGTKRFDNPVLPFNDGVYFASTEKSNIIRGWIFGTTLDSKTQSLLIVNNATNVVIKVCEFQFCNDPFLGVYYHKNNKSWMESEFRVYSSANNCTFEYVSQPFLMDLEGKQGNFKNLREFVFKNIDGYFKIYSKHTPINLVRDLPQGFSALEPLVDLPIGINITRFQTLLALHRSYLTPGDSSSGWTAGAAAYYVGYLQPRTFLLKYNENGTITDAVDCALDPLSETKCTLKSFTVEKGIYQTSNFRVQPTESIVRFPNITNLCPFGEVFNATRFASVYAWNRKRISNCVADYSVLYNSASFSTFKCYGVSPTKLNDLCFTNVYADSFVIRGDEVRQIAPGQTGKIADYNYKLPDDFTGCVIAWNSNNLDSKVGGNYNYLYRLFRKSNLKPFERDISTEIYQAGSTPCNGVEGFNCYFPLQSYGFQPTNGVGYQPYRVVVLSFELLHAPATVCGPKKSTNLVKNKCVNFNFNGLTGTGVLTESNKKFLPFQQFGRDIADTTDAVRDPQTLEILDITPCSFGGVSVITPGTNTSNQVAVLYQDVNCTEVPVAIHADQLTPTWRVYSTGSNVFQTRAGCLIGAEHVNNSYECDIPIGAGICASYQTQTNSPRRARSVASQSIIAYTMSLGAENSVAYSNNSIAIPTNFTISVTTEILPVSMTKTSVDCTMYICGDSTECSNLLLQYGSFCTQLNRALTGIAVEQDKNTQEVFAQVKQIYKTPPIKDFGGFNFSQILPDPSKPSKRSFIEDLLFNKVTLADAGFIKQYGDCLGDIAARDLICAQKFNGLTVLPPLLTDEMIAQYTSALLAGTITSGWWFGAGAALQIPFAMQMAYRFNGIGVTQNVLYENQKLIANQFNSAIGKIQDSLSSTASALGKLQDVVNQNAQALNTLVKQLSSNFGAISSVLNDILSRLDPPEAEVQIDRLITGRLQSLQTYVTQQLIRAAEIRWSANLAATKMSECVLGQSKRVDFCGKGYHLMSFPQSAPHGVVFLHVTYVPAQEKNFTTAPAICHDGKAHFPREGVFVSNGTHWFVTQRNFYEPQIITTDNTFLSGNCDVVIGIVNNTVYDPLQPELDSFKEELDKYFKNHTSPDVDLGDISGINASVVNIQKEIDRLNEVAKNLNESLIDLQELGKYEQYIKGGSGYIPEAPRDGQAYVRKDGEWVLLSTFL

SEQ ID NO: 5827 - protein, 1241 aa, Artificial Sequence
  SARS-CoV-2/USA/UT-00034/2020__EPI_ISL_417977 spike protein (1-1211)(K986P_V987P_T887W_A1020W) Foldon construct
MFVFLVLLPLVSSQCVNLTTRTQLPPAYTNSFTRGVYYPDKVFRSSVLHSTQDLFLPFFSNVTWFHAIHVSGTNGTKRFDNPVLPFNDGVYFASTEKSNIIRGWIFGTTLDSKTQSLLIVNNATNVVIKVCEFQFCNDPFLGVYYYKNNKSWMESEFRVYSSANNCTFEYVSQPFLMDLEGKQGNFKNLREFVFKNIDGYFKIYSKHTPINLVRDLPQGFSALEPLVDLPIGINITRFQTLLALHRSYLTPGDSSSGWTAGAAAYYVGYLQPRTFLLKYNENGTITDAVDCALDPLSETKCTLKSFTVEKGIYQTSNFRVQPTESIVRFPNITNLCPFGEVFNATRFASVYAWNRKRISNCVADYSVLYNSASFSTFKCYGVSPTKLNDLCFTNVYADSFVIRGDEVRQIAPGQTGKIADYNYKLPDDFTGCVIAWNSNNLDSKVGGNYNYLYRLFRKSNLKPFERDISTEIYQAGSTPCNGVEGFNCYFPLQSYGFQPTNGVGYQPYRVVVLSFELLHAPATVCGPKKSTNLVKNKCVNFNFNGLTGTGVLTESNKKFLPFQQFGRDIADTTDAVRDPQTLEILDITPCSFGGVSVITPGTNTSNQVAVLYQGVNCTEVPVAIHADQLTPTWRVYSTGSNVFQTRAGCLIGAEHVNNSYECDIPIGAGICASYQTQTNSPRRARSVASQSIIAYTMSLGAENSVAYSNNSIAIPTNFTISVTTEILPVSMTKTSVDCTMYICGDSTECSNLLLQYGSFCTQLNRALTGIAVEQDKNTQEVFAQVKQIYKTPPIKDFGGFNFSQILPDPSKPSKRSFIEDLLFNKVTLADAGFIKQYGDCLGDIAARDLICAQKFNGLTVLPPLLTDEMIAQYTSALLAGTITSGWWFGAGAALQIPFAMQMAYRFNGIGVTQNVLYENQKLIANQFNSAIGKIQDSLSSTASALGKLQDVVNQNAQALNTLVKQLSSNFGAISSVLNDILSRLDPPEAEVQIDRLITGRLQSLQTYVTQQLIRAAEIRWSANLAATKMSECVLGQSKRVDFCGKGYHLMSFPQSAPHGVVFLHVTYVPAQEKNFTTAPAICHDGKAHFPREGVFVSNGTHWFVTQRNFYEPQIITTDNTFVSGNCDVVIGIVNNTVYDPLQPELDSFKEELDKYFKNHTSPDVDLGDISGINASVVNIQKEIDRLNEVAKNLNESLIDLQELGKYEQYIKGGSGYIPEAPRDGQAYVRKDGEWVLLSTFL

SEQ ID NO: 5828 - protein, 1241 aa, Artificial Sequence
  SARS-CoV-2/USA/UT-00033/2020__EPI_ISL_417976 spike protein (1-1211)(K986P_V987P_T887W_A1020W) Foldon construct
MFVFLVLLPLVSSQCVNLTTRTQLPPAYTNSFTRGVYYPDKVFRSSVLHSTQDLFLPFFSNVTWFHAIHVSGTNGTKRFDNPVLPFNDGVYFASTEKSNIIRGWIFGTTLDSKTQSLLIVNNATNVVIKVCEFQFCNDPFLGVYYHKNNKSWMESEFRVYSSANNCTFEYVSQPFLMDLEGKQGNFKNLREFVFKNIDGYFKIYSKHTPINLVRDLPQGFSALEPLVDLPIGINITRFQTLLALHRSYLTPGDSSSGLTAGAAAYYVGYLQPRTFLLKYNENGTITDAVDCALDPLSETKCTLKSFTVEKGIYQTSNFRVQPTESIVRFPNITNLCPFGEVFNATRFASVYAWNRKRISNCVADYSVLYNSASFSTFKCYGVSPTKLNDLCFTNVYADSFVIRGDEVRQIAPGQTGKIADYNYKLPDDFTGCVIAWNSNNLDSKVGGNYNYLYRLFRKSNLKPFERDISTEIYQAGSTPCNGVEGFNCYFPLQSYGFQPTNGVGYQPYRVVVLSFELLHAPATVCGPKKSTNLVKNKCVNFNFNGLTGTGVLTESNKKFLPFQQFGRDIADTTDAVRDPQTLEILDITPCSFGGVSVITPGTNTSNQVAVLYQGVNCTEVPVAIHADQLTPTWRVYSTGSNVFQTRAGCLIGAEHVNNSYECDIPIGAGICASYQTQTNSPRRARSVASQSIIAYTMSLGAENSVAYSNNSIAIPTNFTISVTTEILPVSMTKTSVDCTMYICGDSTECSNLLLQYGSFCTQLNRALTGIAVEQDKNTQEVFAQVKQIYKTPPIKDFGGFNFSQILPDPSKPSKRSFIEDLLFNKVTLADAGFIKQYGDCLGDIAARDLICAQKFNGLTVLPPLLTDEMIAQYTSALLAGTITSGWWFGAGAALQIPFAMQMAYRFNGIGVTQNVLYENQKLIANQFNSAIGKIQDSLSSTASALGKLQDVVNQNAQALNTLVKQLSSNFGAISSVLNDILSRLDPPEAEVQIDRLITGRLQSLQTYVTQQLIRAAEIRWSANLAATKMSECVLGQSKRVDFCGKGYHLMSFPQSAPHGVVFLHVTYVPAQEKNFTTAPAICHDGKAHFPREGVFVSNGTHWFVTQRNFYEPQIITTDNTFVSGNCDVVIGIVNNTVYDPLQPELDSFKEELDKYFKNHTSPDVDLGDISGINASVVNIQKEIDRLNEVAKNLNESLIDLQELGKYEQYIKGGSGYIPEAPRDGQAYVRKDGEWVLLSTFL

SEQ ID NO: 5829 - protein, 1241 aa, Artificial Sequence
  SARS-CoV-2/USA/WI-13/2020__EPI_ISL_417516 spike protein (1-1211)(K986P_V987P_T887W_A1020W) Foldon construct
MFVFLVLLPLVSSQCVNLTTRTQLPPAYTNSFTRGVYYPDKVFRSSVLHSTQDLFLPFFSNVTWFHAIHVSGTNGTKRFDNPVLPFNDGVYFASTEKSNIIRGWIFGTTLDSKTQSLLIVNNATNVVIKVCEFQFCNDPFLGVYYHKNNKSWMESEFRVYSSANNCTFEYVSQPFLMDLEGKQGNFKNLREFVFKNIDGYFKIYSKHTPINLVRDLPQGFSALEPLVDLPIGINITRFQTLLALHRSYLTPGDSSSGWTAGAAAYYVGYLQPRTFLLKYNENGTITDAVDCALDPLSETKCTLKSFTVEKGIYQTSNFRVLPTESIVRFPNITNLCPFGEVFNATRFASVYAWNRKRISNCVADYSVLYNSASFSTFKCYGVSPTKLNDLCFTNVYADSFVIRGDEVRQIAPGQTGKIADYNYKLPDDFTGCVIAWNSNNLDSKVGGNYNYLYRLFRKSNLKPFERDISTEIYQAGSTPCNGVEGFNCYFPLQSYGFQPTNGVGYQPYRVVVLSFELLHAPATVCGPKKSTNLVKNKCVNFNFNGLTGTGVLTESNKKFLPFQQFGRDIADTTDAVRDPQTLEILDITPCSFGGVSVITPGTNTSNQVAVLYQGVNCTEVPVAIHADQLTPTWRVYSTGSNVFQTRAGCLIGAEHVNNSYECDIPIGAGICASYQTQTNSPRRARSVASQSIIAYTMSLGAENSVAYSNNSIAIPTNFTISVTTEILPVSMTKTSVDCTMYICGDSTECSNLLLQYGSFCTQLNRALTGIAVEQDKNTQEVFAQVKQIYKTPPIKDFGGFNFSQILPDPSKPSKRSFIEDLLFNKVTLADAGFIKQYGDCLGDIAARDLICAQKFNGLTVLPPLLTDEMIAQYTSALLAGTITSGWWFGAGAALQIPFAMQMAYRFNGIGVTQNVLYENQKLIANQFNSAIGKIQDSLSSTASALGKLQDVVNQNAQALNTLVKQLSSNFGAISSVLNDILSRLDPPEAEVQIDRLITGRLQSLQTYVTQQLIRAAEIRWSANLAATKMSECVLGQSKRVDFCGKGYHLMSFPQSAPHGVVFLHVTYVPAQEKNFTTAPAICHDGKAHFPREGVFVSNGTHWFVTQRNFYEPQIITTDNTFVSGNCDVVIGIVNNTVYDPLQPELDSFKEELDKYFKNHTSPDVDLGDISGINASVVNIQKEIDRLNEVAKNLNESLIDLQELGKYEQYIKGGSGYIPEAPRDGQAYVRKDGEWVLLSTFL

SEQ ID NO: 5830 - protein, 1240 aa, Artificial Sequence
  SARS-CoV-2/India/1-27/2020__EPI_ISL_413522 spike protein (1-1210)(K985P_V986P_T886W_A1019W) Foldon construct
MFVFLVLLPLVSSQCVNLTTRTQLPPAYTNSFTRGVYYPDKVFRSSVLHSTQDLFLPFFSNVTWFHAIHVSGTNGTKRFDNPVLPFNDGVYFASTEKSNIIRGWIFGTTLDSKTQSLLIVNNATNVVIKVCEFQFCNDPFLGVYHKNNKSWMESEFRVYSSANNCTFEYVSQPFLMDLEGKQGNFKNLREFVFKNIDGYFKIYSKHTPINLVRDLPQGFSALEPLVDLPIGINITRFQTLLALHRSYLTPGDSSSGWTAGAAAYYVGYLQPRTFLLKYNENGTITDAVDCALDPLSETKCTLKSFTVEKGIYQTSNFRVQPTESIVRFPNITNLCPFGEVFNATRFASVYAWNRKRISNCVADYSVLYNSASFSTFKCYGVSPTKLNDLCFTNVYADSFVIRGDEVIQIAPGQTGKIADYNYKLPDDFTGCVIAWNSNNLDSKVGGNYNYLYRLFRKSNLKPFERDISTEIYQAGSTPCNGVEGFNCYFPLQSYGFQPTNGVGYQPYRVVVLSFELLHAPATVCGPKKSTNLVKNKCVNFNFNGLTGTGVLTESNKKFLPFQQFGRDIADTTDAVRDPQTLEILDITPCSFGGVSVITPGTNTSNQVAVLYQDVNCTEVPVAIHADQLTPTWRVYSTGSNVFQTRAGCLIGAEHVNNSYECDIPIGAGICASYQTQTNSPRRARSVASQSIIAYTMSLGAENSVAYSNNSIAIPTNFTISVTTEILPVSMTKTSVDCTMYICGDSTECSNLLLQYGSFCTQLNRALTGIAVEQDKNTQEVFAQVKQIYKTPPIKDFGGFNFSQILPDPSKPSKRSFIEDLLFNKVTLADAGFIKQYGDCLGDIAARDLICAQKFNGLTVLPPLLTDEMIAQYTSALLAGTITSGWWFGAGAALQIPFAMQMAYRFNGIGVTQNVLYENQKLIANQFNSAIGKIQDSLSSTASALGKLQDVVNQNAQALNTLVKQLSSNFGAISSVLNDILSRLDPPEAEVQIDRLITGRLQSLQTYVTQQLIRAAEIRWSANLAATKMSECVLGQSKRVDFCGKGYHLMSFPQSAPHGVVFLHVTYVPAQEKNFTTAPAICHDGKAHFPREGVFVSNGTHWFVTQRNFYEPQIITTDNTFVSGNCDVVIGIVNNTVYDPLQPELDSFKEELDKYFKNHTSPDVDLGDISGINASVVNIQKEIDRLNEVAKNLNESLIDLQELGKYEQYIKGGSGYIPEAPRDGQAYVRKDGEWVLLSTFL

SEQ ID NO: 5831 - protein, 1235 aa, Artificial Sequence
  SARS-CoV-2/pangolin/Guangxi/P4L/2017__EPI_ISL_410538 spike protein (1-1205)(K980P_V981P_T881W_A1014W) Foldon construct
MFVFLFVLPLVSSQCVNLTTRTGIPPGYTNSSTRGVYYPDKVFRSSILHLTQDLFLPFFSNVTWFNTINYQGGFKKFDNPVLPFNDGVYFASTEKSNIIRGWIFGTTLDARTQSLLIVNNATNVVIKVCEFQFCTDPFLGVYYHNNNKTWVENEFRVYSSANNCTFEYISQPFLMDLEGKQGNFKNLREFVFKNVDGYFKIYSKHTPIDLVRDLPRGFAALEPLVDLPIGINITRFQTLLALHRSYLTPGNLESGWTTGAAAYYVGYLQQRTFLLSYNQNGTITDAVDCSLDPLSETKCTLKSLTVEKGIYQTSNFRVQPTISIVRFPNITNLCPFGEVFNASKFASVYAWNRKRISNCVADYSVLYNSTSFSTFKCYGVSPTKLNDLCFTNVYADSFVVKGDEVRQIAPGQTGVIADYNYKLPDDFTGCVIAWNSVKQDALTGGNYGYLYRLFRKSKLKPFERDISTEIYQAGSTPCNGQVGLNCYYPLERYGFHPTTGVNYQPFRVVVLSFELLNGPATVCGPKLSTTLVKDKCVNFNFNGLTGTGVLTTSKKQFLPFQQFGRDISDTTDAVRDPQTLEILDITPCSFGGVSVITPGTNTSNQVAVLYQDVNCTEVPMAIHAEQLTPAWRVYSAGANVFQTRAGCLVGAEHVNNSYECDIPVGAGICASYHSMSSLRSVNQRSIIAYTMSLGAENSVAYSNNSIAIPTNFTISVTTEILPVSMTKTSVDCTMYICGDSIECSNLLLQYGSFCTQLNRALTGIAVEQDKNTQEVFAQVKQIYKTPPIKDFGGFNFSQILPDPSKPSKRSFIEDLLFNKVTLADAGFIKQYGDCLGDIAARDLICAQKFNGLTVLPPLLTDEMIAQYTSALLAGTITSGWWFGAGAALQIPFAMQMAYRFNGIGVTQNVLYENQKLIANQFNSAIGKIQDSLSSTASALGKLQDVVNQNAQALNTLVKQLSSNFGAISSVLNDILSRLDPPEAEVQIDRLITGRLQSLQTYVTQQLIRAAEIRWSANLAATKMSECVLGQSKRVDFCGKGYHLMSFPQSAPHGVVFLHVTYVPAQEKNFTTAPAICHEGKAHFPREGVFVSNGTHWFITQRNFYEPQIITTDNTFVSGSCDVVIGIVNNTVYDPLQPELDSFKEELDKYFKNHTSPDVDLGDISGINASVVNIQKEIDRLNEVAKNLNESPIDLQELGKYEQYIKGGSGYIPEAPRDGQAYVRKDGEWVLLSTFL

SEQ ID NO: 5832 - protein, 1235 aa, Artificial Sequence
  SARS-CoV-2/pangolin/Guangxi/P5L/2017__EPI_ISL_410540 spike protein (1-1205)(K980P_V981P_T881W_A1014W) Foldon construct
MFVFLFVLPLVSSQCVNLTTRTGIPPGYTNSSTRGVYYPDKVFRSSILHLTQDLFLPFFSNVTWFNTINYQGGFKKFDNPVLPFNDGVYFASTEKSNIIRGWIFGTTLDARTQSLLIVNNATNVVIKVCEFQFCTDPFLGVYYHNNNKTWVENEFRVYSSANNCTFEYISQPFLMDLEGKQGNFKNLREFVFKNVDGYFKIYSKHTPIDLVRDLPRGFAALEPLVDLPIGINITRFQTLLALHRSYLTPGKLESGWTTGAAAYYVGYLQQRTFLLSYNQNGTITDAVDCSLDPLSETKCTLKSLTVEKGIYQTSNFRVQPTISIVRFPNITNLCPFGEVFNASKFASVYAWNRKRISNCVADYSVLYNSTSFSTFKCYGVSPTKLNDLCFTNVYADSFVVKGDEVRQIAPGQTGVIADYNYKLPDDFTGCVIAWNSVKQDALTGGNYGYLYRLFRKSKLKPFERDISTEIYQAGSTPCNGQVGLNCYYPLERYGFHPTTGVNYQPFRVVVLSFELLNGPATVCGPKLSTTLVKDKCVNFNFNGLTGTGVLTTSKKQFLPFQQFGRDISDTTDAVRDPQTLEILDITPCSFGGVSVITPGTNTSNQVAVLYQDVNCTEVPMAIHAEQLTPAWRVYSAGANVFQTRAGCLVGAEHVNNSYECDIPVGAGICASYHSMSSFRSVNQRSIIAYTMSLGAENSVAYSNNSIAIPTNFTISVTTEILPVSMTKTSVDCTMYICGDSIECSNLLLQYGSFCTQLNRALTGIAVEQDKNTQEVFAQVKQIYKTPPIKDFGGFNFSQILPDPSKPSKRSFIEDLLFNKVTLADAGFIKQYGDCLGDIAARDLICAQKFNGLTVLPPLLTDEMIAQYTSALLAGTITSGWWFGAGAALQIPFAMQMAYRFNGIGVTQNVLYENQKLIANQFNSAIGKIQDSLSSTASALGKLQDVVNQNAQALNTLVKQLSSNFGAISSVLNDILSRLDPPEAEVQIDRLITGRLQSLQTYVTQQLIRAAEIRWSANLAATKMSECVLGQSKRVDFCGKGYHLMSFPQSAPHGVVFLHVTYVPAQEKNFTTAPAICHEGKAHFPREGVFVSNGTHWFITQRNFYEPQIITTDNTFVSGSCDVVIGIVNNTVYDPLQPELDSFKEELDKYFKNHTSPDVDLGDISGINASVVNIQKEIDRLNEVAKNLNESLIDLQELGKYEQYIKGGSGYIPEAPRDGQAYVRKDGEWVLLSTFL

SEQ ID NO: 5833 - protein, 1235 aa, Artificial Sequence
  SARS-CoV-2/pangolin/Guangxi/P5E/2017__EPI_ISL_410541 spike protein (1-1205)(K980P_V981P_T881W_A1014W) Foldon construct
MFVFLFVLPLVSSQCVNLTTRTGIPPGYTNSSTRGVYYPDKVFRSSILHLTQDLFLPFFSNVTWFNTITYQGGSKKFDNPVLPFNDGVYFASTEKSNIIRGWIFGTTLDARTQSLLIVNNATNVVIKVCEFQFCTDPFLGVYYHNNNKTWVENEFRVYSSANNCTFEYISQPFLMDLEGKQGNFKNLREFVFKNVDGYFKIYSKHTPIDLVRDLPRGFAALEPLVDLPIGINITRFQTLLALHRSYLTPGKLESGWTTGAAAYYVGYLQQRTFLLSYNQNGTITDAVDCSLDPLSETKCTLKSLTVEKGIYQTSNFRVQPTISIVRFPNITNLCPFGEVFNASKFASVYAWNRKRISNCVADYSVLYNSTSFSTFKCYGVSPTKLNDLCFTNVYADSFVVKGDEVRQIAPGQTGVIADYNYKLPDDFTGCVIAWNSVKQDALTGDNYGYLYRLFRKSKLKPFERDISTEIYQAGSTPCNGQVGLNCYYPLERYGFHPTTGVNYQPFRVVVLSFELLNGPATVCGPKLSTTLVKDKCVNFNFNGLTGTGVLTTSKKQFLPFQQFGRDISDTTDAVRDPQTLEILDITPCSFGGVSVITPGTNTSNQVAVLYQDVNCTEVPMAIHAEQLTPAWRVYSAGANVFQTRAGCLVGAEHVNNSYECDIPVGAGICASYHSMSSFRSVNQRSIIAYTMSLGAENSVAYSNNSIAIPTNFTISVTTEILPVSMTKTSVDCTMYICGDSIECSNLLLQYGSFCTQLNRALTGIAVEQDKNTQEVFAQVKQIYKTPPIKDFGGFNFSQILPDPSKPSKRSFIEDLLFNKVTLADAGFIKQYGDCLGDIAARDLICAQKFNGLTVLPPLLTDEMIAQYTSALLAGTITSGWWFGAGAALQIPFAMQMAYRFNGIGVTQNVLYENQKLIANQFNSAIGKIQDSLSSTASALGKLQDVVNQNAQALNTLVKQLSSNFGAISSVLNDILSRLDPPEAEVQIDRLITGRLQSLQTYVTQQLIRAAEIRWSANLAATKMSECVLGQSKRVDFCGKGYHLMSFPQSAPHGVVFLHVTYVPAQEKNFTTAPAICHEGKAHFPREGVFVSNGTHWFITQRNFYEPQIITTDNTFVSGSCDVVIGIVNNTVYDPLQPELDSFKEELDKYFKNHTSPDVDLGDISGINASVVNIQKEIDRLNEVAKNLNESLIDLQELGKYEQYIKGGSGYIPEAPRDGQAYVRKDGEWVLLSTFL

SEQ ID NO: 5834 - protein, 1233 aa, Artificial Sequence
  SARS-CoV-2/pangolin/Guangxi/P1E/2017__EPI_ISL_410539 spike protein (1-1203)(K978P_V979P_T879W_A1012W) Foldon construct
MFVFLFVLPLVSSQCVNLTTRTGIQPGYTNSSTRGVYYPDKVFRSSILHLTQDLFLPFFSNVTWFNTINYQGGFKKFDNPVLPFNDGVYFASTEKSNIIRGWIFGTTLDARTQSLLIVNNATNVVIKVCEFQFCTDPFLGVYYHNNNKTWVENEFRVYSSANNCTFEYISQPFLMDLEGKQGNFKNLREFVFKNVDGYFKIYSKHTPIDLVRDLPRGFAALEPLVDLPIGINITRFQTLLALHRSYLTPGKLESGWTTGAAAYYVGYLQQRTFLLSYNQNGTITDAVDCSLDPLSETKCTLKSLTVEKGIYQTSNFRVQPTISIVRFPNITNLCPFGEVFNASKFASVYAWNRKRISNCVADYSVLYNSTSFSTFKCYGVSPTKLNDLCFTNVYADSFVVKGDEVRQIAPGQTGVIADYNYKLPDDFTGCVIAWNSVKQDALTGGNYLYRLFRKSKLKPFERDISTEIYQAGSTPCNGQVGLNCYYPLERYGFHPTTGVNYQPFRVVVLSFELLNGPATVCGPKLSTTLVKDKCVNFNFNGLTGTGVLTTSKKQFLPFQQFGRDISDTTDAVRDPQTLEILDITPCSFGGVSVITPGTNTSNQVAVLYQDVNCTEVPMAIHAEQLTPAWRVYSAGANVFQTRAGCLVGAEHVNNSYECDIPVGAGICASYHSMSSLRSVNQRSIIAYTMSLGAENSVAYSNNSIAIPTNFTISVTTEILPVSMTKTSVDCTMYICGDSIECSNLLLQYGSFCTQLNRALTGIAVEQDKNTQEVFAQVKQIYKTPPIKDFGGFNFSQILPDPSKPSKRSFIEDLLFNKVTLADAGFIKQYGDCLGDIAARDLICAQKFNGLTVLPPLLTDEMIAQYTSALLAGTITSGWWFGAGAALQIPFAMQMAYRFNGIGVTQNVLYENQKLIANQFNSAIGKIQDSLSSTASALGKLQDVVNQNAQALNTLVKQLSSNFGAISSVLNDILSRLDPPEAEVQIDRLITGRLQSLQTYVTQQLIRAAEIRWSANLAATKMSECVLGQSKRVDFCGKGYHLMSFPQSAPHGVVFLHVTYVPAQEKNFTTAPAICHEGKAHFPREGVFVSNGTHWFITQRNFYEPQIITTDNTFVSGSCDVVIGIVNNTVYDPLQPELDSFKEELDKYFKNHTSPDVDLGDISGINASVVNIQKEIDRLNEVAKNLNESLIDLQELGKYEQYIKGGSGYIPEAPRDGQAYVRKDGEWVLLSTFL

SEQ ID NO: 5835 - protein, 1241 aa, Artificial Sequence
  SARS-CoV-2/Wuhan/WIV05/2019__EPI_ISL_402128 spike protein (1-1211)(K986P_V987P_P1069F) Foldon construct
MFVFLVLLPLVSSQCVNLTTRTQLPPAYTNSFTRGVYYPDKVFRSSVLHSTQDLFLPFFSNVTWFHAIHVSGTNGTKRFDNPVLPFNDGVYFASTEKSNIIRGWIFGTTLDSKTQSLLIVNNATNVVIKVCEFQFCNDPFLGVYYHKNNKSWMESEFRVYSSANNCTFEYVSQPFLMDLEGKQGNFKNLREFVFKNIDGYFKIYSKHTPINLVRDLPQGFSALEPLVDLPIGINITRFQTLLALHRSYLTPGDSSSGWTAGAAAYYVGYLQPRTFLLKYNENGTITDAVDCALDPLSETKCTLKSFTVEKGIYQTSNFRVQPTESIVRFPNITNLCPFGEVFNATRFASVYAWNRKRISNCVADYSVLYNSASFSTFKCYGVSPTKLNDLCFTNVYADSFVIRGDEVRQIAPGQTGKIADYNYKLPDDFTGCVIAWNSNNLDSKVGGNYNYLYRLFRKSNLKPFERDISTEIYQAGSTPCNGVEGFNCYFPLQSYGFQPTNGVGYQPYRVVVLSFELLHAPATVCGPKKSTNLVKNKCVNFNFNGLTGTGVLTESNKKFLPFQQFGRDIADTTDAVRDPQTLEILDITPCSFGGVSVITPGTNTSNQVAVLYQDVNCTEVPVAIHADQLTPTWRVYSTGSNVFQTRAGCLIGAEHVNNSYECDIPIGAGICASYQTQTNSPRRARSVASQSIIAYTMSLGAENSVAYSNNSIAIPTNFTISVTTEILPVSMTKTSVDCTMYICGDSTECSNLLLQYGSFCTQLNRALTGIAVEQDKNTQEVFAQVKQIYKTPPIKDFGGFNFSQILPDPSKPSKRSFIEDLLFNKVTLADAGFIKQYGDCLGDIAARDLICAQKFNGLTVLPPLLTDEMIAQYTSALLAGTITSGWTFGAGAALQIPFAMQMAYRFNGIGVTQNVLYENQKLIANQFNSAIGKIQDSLSSTASALGKLQDVVNQNAQALNTLVKQLSSNFGAISSVLNDILSRLDPPEAEVQIDRLITGRLQSLQTYVTQQLIRAAEIRASANLAATKMSECVLGQSKRVDFCGKGYHLMSFPQSAPHGVVFLHVTYVFAQEKNFTTAPAICHDGKAHFPREGVFVSNGTHWFVTQRNFYEPQIITTDNTFVSGNCDVVIGIVNNTVYDPLQPELDSFKEELDKYFKNHTSPDVDLGDISGINASVVNIQKEIDRLNEVAKNLNESLIDLQELGKYEQYIKGGSGYIPEAPRDGQAYVRKDGEWVLLSTFL

SEQ ID NO: 5836 - protein, 1237 aa, Artificial Sequence
  SARS-CoV-2/bat/Yunnan/RaTG13/2013__EPI_ISL_402131 spike protein (1-1207)(K982P_V983P_P1065F) Foldon construct
MFVFLVLLPLVSSQCVNLTTRTQLPPAYTNSSTRGVYYPDKVFRSSVLHLTQDLFLPFFSNVTWFHAIHVSGTNGIKRFDNPVLPFNDGVYFASTEKSNIIRGWIFGTTLDSKTQSLLIVNNATNVVIKVCEFQFCNDPFLGVYYHKNNKSWMESEFRVYSSANNCTFEYVSQPFLMDLEGKQGNFKNLREFVFKNIDGYFKIYSKHTPINLVRDLPPGFSALEPLVDLPIGINITRFQTLLALHRSYLTPGDSSSGWTAGAAAYYVGYLQPRTFLLKYNENGTITDAVDCALDPLSETKCTLKSFTVEKGIYQTSNFRVQPTDSIVRFPNITNLCPFGEVFNATTFASVYAWNRKRISNCVADYSVLYNSTSFSTFKCYGVSPTKLNDLCFTNVYADSFVITGDEVRQIAPGQTGKIADYNYKLPDDFTGCVIAWNSKHIDAKEGGNFNYLYRLFRKANLKPFERDISTEIYQAGSKPCNGQTGLNCYYPLYRYGFYPTDGVGHQPYRVVVLSFELLNAPATVCGPKKSTNLVKNKCVNFNFNGLTGTGVLTESNKKFLPFQQFGRDIADTTDAVRDPQTLEILDITPCSFGGVSVITPGTNASNQVAVLYQDVNCTEVPVAIHADQLTPTWRVYSTGSNVFQTRAGCLIGAEHVNNSYECDIPIGAGICASYQTQTNSRSVASQSIIAYTMSLGAENSVAYSNNSIAIPTNFTISVTTEILPVSMTKTSVDCTMYICGDSTECSNLLLQYGSFCTQLNRALTGIAVEQDKNTQEVFAQVKQIYKTPPIKDFGGFNFSQILPDPSKPSKRSFIEDLLFNKVTLADAGFIKQYGDCLGDIAARDLICAQKFNGLTVLPPLLTDEMIAQYTSALLAGTITSGWTFGAGAALQIPFAMQMAYRFNGIGVTQNVLYENQKLIANQFNSAIGKIQDSLSSTASALGKLQDVVNQNAQALNTLVKQLSSNFGAISSVLNDILSRLDPPEAEVQIDRLITGRLQSLQTYVTQQLIRAAEIRASANLAATKMSECVLGQSKRVDFCGKGYHLMSFPQSAPHGVVFLHVTYVFAQEKNFTTAPAICHDGKAHFPREGVFVSNGTHWFVTQRNFYEPQIITTDNTFVSGSCDVVIGIVNNTVYDPLQPELDSFKEELDKYFKNHTSPDVDLGDISGINASVVNIQKEIDRLNEVAKNLNESLIDLQELGKYEQYIKGGSGYIPEAPRDGQAYVRKDGEWVLLSTFL

SEQ ID NO: 5837 - protein, 1241 aa, Artificial Sequence
  SARS-CoV-2/Wuhan/HBCDC-HB-01/2019__EPI_ISL_402132 spike protein (1-1211)(K986P_V987P_P1069F) Foldon construct
MFVFLVLLPLVSSQCVNLTTRTQLPPAYTNSITRGVYYPDKVFRSSVLHSTQDLFLPFFSNVTWFHAIHVSGTNGTKRFDNPVLPFNDGVYFASTEKSNIIRGWIFGTTLDSKTQSLLIVNNATNVVIKVCEFQFCNDPFLGVYYHKNNKSWMESEFRVYSSANNCTFEYVSQPFLMDLEGKQGNFKNLREFVFKNIDGYFKIYSKHTPINLVRDLPQGFSALEPLVDLPIGINITRFQTLLALHRSYLTPGDSSSGWTAGAAAYYVGYLQPRTFLLKYNENGTITDAVDCALDPLSETKCTLKSFTVEKGIYQTSNFRVQPTESIVRFPNITNLCPFGEVFNATRFASVYAWNRKRISNCVADYSVLYNSASFSTFKCYGVSPTKLNDLCFTNVYADSFVIRGDEVRQIAPGQTGKIADYNYKLPDDFTGCVIAWNSNNLDSKVGGNYNYLYRLFRKSNLKPFERDISTEIYQAGSTPCNGVEGFNCYFPLQSYGFQPTNGVGYQPYRVVVLSFELLHAPATVCGPKKSTNLVKNKCVNFNFNGLTGTGVLTESNKKFLPFQQFGRDIADTTDAVRDPQTLEILDITPCSFGGVSVITPGTNTSNQVAVLYQDVNCTEVPVAIHADQLTPTWRVYSTGSNVFQTRAGCLIGAEHVNNSYECDIPIGAGICASYQTQTNSPRRARSVASQSIIAYTMSLGAENSVAYSNNSIAIPTNFTISVTTEILPVSMTKTSVDCTMYICGDSTECSNLLLQYGSFCTQLNRALTGIAVEQDKNTQEVFAQVKQIYKTPPIKDFGGFNFSQILPDPSKPSKRSFIEDLLFNKVTLADAGFIKQYGDCLGDIAARDLICAQKFNGLTVLPPLLTDEMIAQYTSALLAGTITSGWTFGAGAALQIPFAMQMAYRFNGIGVTQNVLYENQKLIANQFNSAIGKIQDSLSSTASALGKLQDVVNQNAQALNTLVKQLSSNFGAISSVLNDILSRLDPPEAEVQIDRLITGRLQSLQTYVTQQLIRAAEIRASANLAATKMSECVLGQSKRVDFCGKGYHLMSFPQSAPHGVVFLHVTYVFAQEKNFTTAPAICHDGKAHFPREGVFVSNGTHWFVTQRNFYEPQIITTDNTFVSGNCDVVIGIVNNTVYDPLQPELDSFKEELDKYFKNHTSPDVDLGDISGINASVVNIQKEIDRLNEVAKNLNESLIDLQELGKYEQYIKGGSGYIPEAPRDGQAYVRKDGEWVLLSTFL

SEQ ID NO: 5838 - protein, 1241 aa, Artificial Sequence
  SARS-CoV-2/Guangdong/20SF028/2020__EPI_ISL_403936 spike protein (1-1211)(K986P_V987P_P1069F) Foldon construct
MFVFLVLLPLVSSQCVNLTTRTQLPPAYTNSFTRGVYYPDKVFRSSVLYSTQDLFLPFFSNVTWFHAIHVSGTNGTKRFDNPVLPFNDGVYFASTEKSNIIRGWIFGTTLDSKTQSLLIVNNATNVVIKVCEFQFCNDPFLGVYYHKNNKSWMESEFRVYSSANNCTFEYVSQPFLMDLEGKQGNFKNLREFVFKNIDGYFKIYSKHTPINLVRDLPQGFSALEPLVDLPIGINITRFQTLLALHRSYLTPGDSSSGWTAGAAAYYVGYLQPRTFLLKYNENGTITDAVDCALDPLSETKCTLKSFTVEKGIYQTSNFRVQPTESIVRFPNITNLCPFGEVFNATRFASVYAWNRKRISNCVADYSVLYNSASFSTFKCYGVSPTKLNDLCFTNVYADSFVIRGDEVRQIAPGQTGKIADYNYKLPDDFTGCVIAWNSNNLDSKVGGNYNYLYRLFRKSNLKPFERDISTEIYQAGSTPCNGVEGFNCYFPLQSYGFQPTNGVGYQPYRVVVLSFELLHAPATVCGPKKSTNLVKNKCVNFNFNGLTGTGVLTESNKKFLPFQQFGRDIADTTDAVRDPQTLEILDITPCSFGGVSVITPGTNTSNQVAVLYQDVNCTEVPVAIHADQLTPTWRVYSTGSNVFQTRAGCLIGAEHVNNSYECDIPIGAGICASYQTQTNSPRRARSVASQSIIAYTMSLGAENSVAYSNNSIAIPTNFTISVTTEILPVSMTKTSVDCTMYICGDSTECSNLLLQYGSFCTQLNRALTGIAVEQDKNTQEVFAQVKQIYKTPPIKDFGGFNFSQILPDPSKPSKRSFIEDLLFNKVTLADAGFIKQYGDCLGDIAARDLICAQKFNGLTVLPPLLTDEMIAQYTSALLAGTITSGWTFGAGAALQIPFAMQMAYRFNGIGVTQNVLYENQKLIANQFNSAIGKIQDSLSSTASALGKLQDVVNQNAQALNTLVKQLSSNFGAISSVLNDILSRLDPPEAEVQIDRLITGRLQSLQTYVTQQLIRAAEIRASANLAATKMSECVLGQSKRVDFCGKGYHLMSFPQSAPHGVVFLHVTYVFAQEKNFTTAPAICHDGKAHFPREGVFVSNGTHWFVTQRNFYEPQIITTDNTFVSGNCDVVIGIVNNTVYDPLQPELDSFKEELDKYFKNHTSPDVDLGDISGINASVVNIQKEIDRLNEVAKNLNESLIDLQELGKYEQYIKGGSGYIPEAPRDGQAYVRKDGEWVLLSTFL

SEQ ID NO: 5839 - protein, 1241 aa, Artificial Sequence
  SARS-CoV-2/Shenzhen/SZTH-001/2020__EPI_ISL_406592 spike protein (1-1211)(K986P_V987P_P1069F) Foldon construct
MFVFLVLLPLVSSQCVNLTTRTQLPPAYTNSFTRGVYYPDKVFRSSVLHSTQDLFLPFFSNVTWFHAIHVSGTNGTKRFDNPVLPFNDGVYFASTEKSNIIRGWIFGTTLDSKTQSLLIVNNATNVVIKVCEFQFCNDPFLGVYYHKNNKSWMESEFRVYSSANNCTFEYVSQPFLMDLEGKQGNFKNLREFVFKNIDGYFKIYSKHTPINLVRDLPQGFSALEPLVDLPIGINITRFQTLLALHRSYLTPGDSSSGWTAGAAAYYVGYLQPRTFLLKYNENGTITDAVDCALDPLSETKCTLKSFTVEKGIYQTSNFRVQPTESIVRFPNITNLCPFGEVFNATRFASVYAWNRKRISNCVADYSVLYNSASFSTFKCYGVSPTKLNDLCFTNVYADSFVIRGDEVRQIAPGQTGKIADYNYKLPDDFTGCVIAWNSNNLDSKVGGNYNYLYRLFRKSNLKPFERDISTEIYQAGSTPCNGVEGFNCYFPLQSYGFQPTNGVGYQPYRVVVLSFELLHAPATVCGPKKSTNLVKNKCVNFNFNGLTGTGVLTESNKKFLPFQQFGRDIADTTDAVRDPQTLEILDITPCSFGGVSVITPGTNTSNQVAVLYQDVNCTEVPVAIHADQLTPTWRVYSTGSNVFQTRAGCLIGAEHVNNSYECDIPIGAGICASYQTQTNSPRRARSVASQSIIAYTMSLGAENSVAYSNNSIAIPTNFTISVTTEILPVSMTKTSVDCTMYICGDSTECSNLLLQYGSFCTQLNRALTGIAVEQDKNTQEVFAQVKQIYKTPPIKDFGGFNFSQILPDPSKPSKRSFIEDLLFNKVTLADAGFIKQYGDCLGDIAARDLICAQKFNGLTVLPPLLTDEMIAQYTSALLAGTITSGWTFGAGAALQIPFAMQMAYRFNGIGVTQNVLYENQKLIANQFNSAIGKIQDSLSSTASALGKLQDVVNQNAQALNTLVKQLSSNFGAISSVLNDILSRLDPPEAEVQIDRLITGRLQSLQTYVTQQLIRAAEIRASANLAATKMSECVLGQSKRVDFCGKGYHLMSFPQSAPHGVVFLHVTYVFAQEKNFTTAPAICHDGKAHFPREGVFVSNGTHWFVTQRNFYEPQIITTDNTFVSGNCDVLIGIVNNTVYDPLQPELDSFKEELDKYFKNHTSPDVDLGDISGINASVVNIQKEIDRLNEVAKNLNESLIDLQELGKYEQYIKGGSGYIPEAPRDGQAYVRKDGEWVLLSTFL

SEQ ID NO: 5840 - protein, 1241 aa, Artificial Sequence
  SARS-CoV-2/Shenzhen/SZTH-004/2020__EPI_ISL_406595 spike protein (1-1211)(K986P_V987P_P1069F) Foldon construct
MFVFLVLLPLVSSQCVNLTTRTQLPPAYTNSFTRGVYYPDKVFRSSVLHSTQDLFLPFFSNVTWFHAIHVSGTNGTKRFDNPVLPFNDGVYFASTEKSNIIRGWIFGTTLDSKTQSLLIVNNATNVVIKVCEFQFCNDPFLGVYYHKNNKSWMESEFRVYSSANNCTFEYVSQPFLMDLEGKQGNFKNLREFVFKNIDGYFKIYSKHTPINLVRDLPQGFSALEPLVDLPIGINITRFQTLLALHRSYLTPGDSSSGWTAGAAAYYVGYLQPRTFLLKYNENGTITDAVDCALDPLSETKCTLKSFTVEKGIYQTSNFRVQPTESIVRFPNITNLCPFGEVFNATRFASVYAWDRKRISNCVAYYSVLYNSASFSTFKCYGVSPTKLNDLCFTNVYADSFVIRGDEVRQIAPGQTGKIADYNYKLPDDFTGCVIAWNSNNLDSKVGGNYNYLYRLFRKSNLKPFERDISTEIYQAGSTPCNGVEGFNCYFPLQSYGFQPTNGVGYQPYRVVVLSFELLHAPATVCGPKKSTNLVKNKCVNFNFNGLTGTGVLTESNKKFLPFQQFGRDIADTTDAVRDPQTLEILDITPCSFGGVSVITPGTNTSNQVAVLYQDVNCTEVPVAIHADQLTPTWRVYSTGSNVFQTRAGCLIGAEHVNNSYECDIPIGAGICASYQTQTNSPRRARSVASQSIIAYTMSLGAENSVAYSNNSIAIPTNFTISVTTEILPVSMTKTSVDCTMYICGDSTECSNLLLQYGSFCTQLNRALTGIAVEQDKNTQEVFAQVKQIYKTPPIKDFGGFNFSQILPDPSKPSKRSFIEDLLFNKVTLADAGFIKQYGDCLGDIAARDLICAQKFNGLTVLPPLLTDEMIAQYTSALLAGTITSGWTFGAGAALQIPFAMQMAYRFNGIGVTQNVLYENQKLIANQFNSAIGKIQDSLSSTASALGKLQDVVNQNAQALNTLVKQLSSNFGAISSVLNDILSRLDPPEAEVQIDRLITGRLQSLQTYVTQQLIRAAEIRASANLAATKMSECVLGQSKRVDFCGKGYHLMSFPQSAPHGVVFLHVTYVFAQEKNFTTAPAICHDGKAHFPREGVFVSNGTHWFVTQRNFYEPQIITTDNTFVSGNCDVVIGIVNNTVYDPLQPELDSFKEELDKYFKNHTSPDVDLGDISGINASVVNIQKEIDRLNEVAKNLNESLIDLQELGKYEQYIKGGSGYIPEAPRDGQAYVRKDGEWVLLSTFL

SEQ ID NO: 5841 - protein, 1241 aa, Artificial Sequence
  SARS-CoV-2/France/IDF0372/2020__EPI_ISL_406596 spike protein (1-1211)(K986P_V987P_P1069F) Foldon construct
MFVFLVLLPLVSSQCVNLTTRTQLPPAYTNSFTRGVYYPDKVFRSSVLHSTQDLFLPFFSNVTWFHAIHVSGTNGTKRFDNPVLPFNDGVYFASTEKSNIIRGWIFGTTLDSKTQSLLIVNNATNVVIKVCEFQFCNDPFLGVYYHKNNKSWMESEFRVYSSANNCTFEYVSQPFLMDLEGKQGNFKNLREFVFKNIDGYFKIYSKHTPINLVRDLPQGFSALEPLVDLPIGINITRFQTLLALHRSYLTPGDSSSGWTAGAAAYYVGYLQPRTFLLKYNENGTITDAVDCALDPLSETKCTLKSFTVEKGIYQTSNFRVQPTESIVRFPNITNLCPFGEVFNATRFASVYAWNRKRISNCVADYSFLYNSASFSTFKCYGVSPTKLNDLCFTNVYADSFVIRGDEVRQIAPGQTGKIADYNYKLPDDFTGCVIAWNSNNLDSKVGGNYNYLYRLFRKSNLKPFERDISTEIYQAGSTPCNGVEGFNCYFPLQSYGFQPTNGVGYQPYRVVVLSFELLHAPATVCGPKKSTNLVKNKCVNFNFNGLTGTGVLTESNKKFLPFQQFGRDIADTTDAVRDPQTLEILDITPCSFGGVSVITPGTNTSNQVAVLYQDVNCTEVPVAIHADQLTPTWRVYSTGSNVFQTRAGCLIGAEHVNNSYECDIPIGAGICASYQTQTNSPRRARSVASQSIIAYTMSLGAENSVAYSNNSIAIPTNFTISVTTEILPVSMTKTSVDCTMYICGDSTECSNLLLQYGSFCTQLNRALTGIAVEQDKNTQEVFAQVKQIYKTPPIKDFGGFNFSQILPDPSKPSKRSFIEDLLFNKVTLADAGFIKQYGDCLGDIAARDLICAQKFNGLTVLPPLLTDEMIAQYTSALLAGTITSGWTFGAGAALQIPFAMQMAYRFNGIGVTQNVLYENQKLIANQFNSAIGKIQDSLSSTASALGKLQDVVNQNAQALNTLVKQLSSNFGAISSVLNDILSRLDPPEAEVQIDRLITGRLQSLQTYVTQQLIRAAEIRASANLAATKMSECVLGQSKRVDFCGKGYHLMSFPQSAPHGVVFLHVTYVFAQEKNFTTAPAICHDGKAHFPREGVFVSNGTHWFVTQRNFYEPQIITTDNTFVSGNCDVVIGIVNNTVYDPLQPELDSFKEELDKYFKNHTSPDVDLGDISGINASVVNIQKEIDRLNEVAKNLNESLIDLQELGKYEQYIKGGSGYIPEAPRDGQAYVRKDGEWVLLSTFL

SEQ ID NO: 5842 - protein, 1241 aa, Artificial Sequence
  SARS-CoV-2/Australia/VIC01/2020__EPI_ISL_406844 spike protein (1-1211)(K986P_V987P_P1069F) Foldon construct
MFVFLVLLPLVSSQCVNLTTRTQLPPAYTNSFTRGVYYPDKVFRSSVLHSTQDLFLPFFSNVTWFHAIHVSGTNGTKRFDNPVLPFNDGVYFASTEKSNIIRGWIFGTTLDSKTQSLLIVNNATNVVIKVCEFQFCNDPFLGVYYHKNNKSWMESEFRVYSSANNCTFEYVSQPFLMDLEGKQGNFKNLREFVFKNIDGYFKIYSKHTPINLVRDLPQGFSALEPLVDLPIGINITRFQTLLALHRRYLTPGDSSSGWTAGAAAYYVGYLQPRTFLLKYNENGTITDAVDCALDPLSETKCTLKSFTVEKGIYQTSNFRVQPTESIVRFPNITNLCPFGEVFNATRFASVYAWNRKRISNCVADYSVLYNSASFSTFKCYGVSPTKLNDLCFTNVYADSFVIRGDEVRQIAPGQTGKIADYNYKLPDDFTGCVIAWNSNNLDSKVGGNYNYLYRLFRKSNLKPFERDISTEIYQAGSTPCNGVEGFNCYFPLQSYGFQPTNGVGYQPYRVVVLSFELLHAPATVCGPKKSTNLVKNKCVNFNFNGLTGTGVLTESNKKFLPFQQFGRDIADTTDAVRDPQTLEILDITPCSFGGVSVITPGTNTSNQVAVLYQDVNCTEVPVAIHADQLTPTWRVYSTGSNVFQTRAGCLIGAEHVNNSYECDIPIGAGICASYQTQTNSPRRARSVASQSIIAYTMSLGAENSVAYSNNSIAIPTNFTISVTTEILPVSMTKTSVDCTMYICGDSTECSNLLLQYGSFCTQLNRALTGIAVEQDKNTQEVFAQVKQIYKTPPIKDFGGFNFSQILPDPSKPSKRSFIEDLLFNKVTLADAGFIKQYGDCLGDIAARDLICAQKFNGLTVLPPLLTDEMIAQYTSALLAGTITSGWTFGAGAALQIPFAMQMAYRFNGIGVTQNVLYENQKLIANQFNSAIGKIQDSLSSTASALGKLQDVVNQNAQALNTLVKQLSSNFGAISSVLNDILSRLDPPEAEVQIDRLITGRLQSLQTYVTQQLIRAAEIRASANLAATKMSECVLGQSKRVDFCGKGYHLMSFPQSAPHGVVFLHVTYVFAQEKNFTTAPAICHDGKAHFPREGVFVSNGTHWFVTQRNFYEPQIITTDNTFVSGNCDVVIGIVNNTVYDPLQPELDSFKEELDKYFKNHTSPDVDLGDISGINASVVNIQKEIDRLNEVAKNLNESLIDLQELGKYEQYIKGGSGYIPEAPRDGQAYVRKDGEWVLLSTFL

SEQ ID NO: 5843 - protein, 1241 aa, Artificial Sequence
  SARS-CoV-2/Germany/BavPat1/2020__EPI_ISL_406862 spike protein (1-1211)(K986P_V987P_P1069F) Foldon construct
MFVFLVLLPLVSSQCVNLTTRTQLPPAYTNSFTRGVYYPDKVFRSSVLHSTQDLFLPFFSNVTWFHAIHVSGTNGTKRFDNPVLPFNDGVYFASTEKSNIIRGWIFGTTLDSKTQSLLIVNNATNVVIKVCEFQFCNDPFLGVYYHKNNKSWMESEFRVYSSANNCTFEYVSQPFLMDLEGKQGNFKNLREFVFKNIDGYFKIYSKHTPINLVRDLPQGFSALEPLVDLPIGINITRFQTLLALHRSYLTPGDSSSGWTAGAAAYYVGYLQPRTFLLKYNENGTITDAVDCALDPLSETKCTLKSFTVEKGIYQTSNFRVQPTESIVRFPNITNLCPFGEVFNATRFASVYAWNRKRISNCVADYSVLYNSASFSTFKCYGVSPTKLNDLCFTNVYADSFVIRGDEVRQIAPGQTGKIADYNYKLPDDFTGCVIAWNSNNLDSKVGGNYNYLYRLFRKSNLKPFERDISTEIYQAGSTPCNGVEGFNCYFPLQSYGFQPTNGVGYQPYRVVVLSFELLHAPATVCGPKKSTNLVKNKCVNFNFNGLTGTGVLTESNKKFLPFQQFGRDIADTTDAVRDPQTLEILDITPCSFGGVSVITPGTNTSNQVAVLYQGVNCTEVPVAIHADQLTPTWRVYSTGSNVFQTRAGCLIGAEHVNNSYECDIPIGAGICASYQTQTNSPRRARSVASQSIIAYTMSLGAENSVAYSNNSIAIPTNFTISVTTEILPVSMTKTSVDCTMYICGDSTECSNLLLQYGSFCTQLNRALTGIAVEQDKNTQEVFAQVKQIYKTPPIKDFGGFNFSQILPDPSKPSKRSFIEDLLFNKVTLADAGFIKQYGDCLGDIAARDLICAQKFNGLTVLPPLLTDEMIAQYTSALLAGTITSGWTFGAGAALQIPFAMQMAYRFNGIGVTQNVLYENQKLIANQFNSAIGKIQDSLSSTASALGKLQDVVNQNAQALNTLVKQLSSNFGAISSVLNDILSRLDPPEAEVQIDRLITGRLQSLQTYVTQQLIRAAEIRASANLAATKMSECVLGQSKRVDFCGKGYHLMSFPQSAPHGVVFLHVTYVFAQEKNFTTAPAICHDGKAHFPREGVFVSNGTHWFVTQRNFYEPQIITTDNTFVSGNCDVVIGIVNNTVYDPLQPELDSFKEELDKYFKNHTSPDVDLGDISGINASVVNIQKEIDRLNEVAKNLNESLIDLQELGKYEQYIKGGSGYIPEAPRDGQAYVRKDGEWVLLSTFL

SEQ ID NO: 5844 - protein, 1241 aa, Artificial Sequence
  SARS-CoV-2/Wuhan/HBCDC-HB-02/2020__EPI_ISL_412978 spike protein (1-1211)(K986P_V987P_P1069F) Foldon construct
MFVFLVLLPLVSSQCVNLTTRTQLPPAYTNSFTRGVYYPDKVFRSSVLHSTQDLFLPFFSNVTWFHAIHVSGTNGTKRFDNPVLPFNDGVYFASTEKSNIIRGWIFGTTLDSKTQSLLIVNNATNVVIKVCEFQFCNDPFLGVYYHKNNKSWMESEFRVYSSANNCTFEYVSQPFLMDLEGKQGNFKNLREFVFKNIDGYFKIYSKHTPINLVRDLPQGFSALEPLVDLPIGINITRFQTLLALHRSYLTPGDSSSGWTAGAAAYYVGYLQPRTFLLKYNENGTITDAVDCALDPLSETKCTLKSFTVEKGIYQTSNFRVQPTESIVRFPNITNLCPFGEVFNATRFASVYAWNRKRISNCVADYSVLYNSASFSTFKCYGVSPTKLNDLCFTNVYADSFVIRGDEVRQIAPGQTGKIADYNYKLPDDFTGCVIAWNSNNLDSKVGGNYNYLYRLFRKSNLKPFERDISTEIYQAGSTPCNGVEGFNCYFPLQSYGFQPTNGVGYQPYRVVVLSFELLHAPATVCGPKKSTNLVKNKCVNFNFNGLTGTGVLTESNKKFLPFQQFGRDIADTTDAVRDPQTLEILDITPCSFGGVSVITPGTNTSNQVAVLYQDVNCTEVPVAIHADQLTPTWRVYSTGSNVFQTRAGCLIGAEHVNNSYECDIPIGAGICASYQTQTNSPRRARSVASQSIIAYTMSLGAENSVAYSNNSIAIPTNFTISVTTEILPVSMTKTSVDCTMYICGDSTECSNFLLQYGSFCTQLNRALTGIAVEQDKNTQEVFAQVKQIYKTPPIKDFGGFNFSQILPDPSKPSKRSFIEDLLFNKVTLADAGFIKQYGDCLGDIAARDLICAQKFNGLTVLPPLLTDEMIAQYTSALLAGTITSGWTFGAGAALQIPFAMQMAYRFNGIGVTQNVLYENQKLIANQFNSAIGKIQDSLSSTASALGKLQDVVNQNAQALNTLVKQLSSNFGAISSVLNDILSRLDPPEAEVQIDRLITGRLQSLQTYVTQQLIRAAEIRASANLAATKMSECVLGQSKRVDFCGKGYHLMSFPQSAPHGVVFLHVTYVFAQEKNFTTAPAICHDGKAHFPREGVFVSNGTHWFVTQRNFYEPQIITTDNTFVSGNCDVVIGIVNNTVYDPLQPELDSFKEELDKYFKNHTSPDVDLGDISGINASVVNIQKEIDRLNEVAKNLNESLIDLQELGKYEQYIKGGSGYIPEAPRDGQAYVRKDGEWVLLSTFL

SEQ ID NO: 5845 - protein, 1241 aa, Artificial Sequence
  SARS-CoV-2/Australia/QLD02/2020__EPI_ISL_407896 spike protein (1-1211)(K986P_V987P_P1069F) Foldon construct
MFVFLVLLPLVSSQCVNLTTRTQLPPAYTNSFTRGVYYPDKVFRSSVLHSTQDLFLPFFSNVTWFHAIHVSGTNGTKRFDNPVLPFNDGVYFASTEKSNIIRGWIFGTTLDSKTQSLLIVNNATNVVIKVCEFQFCNDPFLGVYYHKNNKSWMESEFRVYSSANNCTFEYVSQPFLMDLEGKQGNFKNLREFVFKNIDGYFKIYSKHTPINLVRDLPQGFSALEPLVDLPIGINITRFQTLLALHRSYLTPGDSSSGWTAGAAAYYVGYLQPRTFLLKYNENGTITDAVDCALDPLSETKCTLKSFTVEKGIYQTSNFRVQPTESIVRFPNITNLCPFGEVFNATRFASVYAWNRKRISNCVADYSVLYNSASFSTFKCYGVSPTKLNDLCFTNVYADSFVIRGDEVRQIAPGQTGKIADYNYKLPDDFTGCVIAWNSNNLDSKVGGNYNYLYRLFRKSNLKPFERDISTEIYQAGSTPCNGVEGFNCYFPLQSYGFQPTNGVGYQPYRVVVLSFELLHAPATVCGPKKSTNLVKNKCVNFNFNGLTGTGVLTESNKKFLPFQQFGRDIADTTDAVRDPQTLEILDITPCSFGGVSVITPGTNTSNQVAVLYQDVNCTEVPVAIHADQLTPTWRVYSTGSNVFQTRAGCLIGAEHVNNSYECDIPIGAGICASYQTQTNSPRRARSVASQSIIAYTMSLGAENSVAYSNNSIAIPTNFTISVTTEILPVSMTKTSVDCTMYICGDSTECSNLLLQYGSFCTQLNRALTGIAVEQDKNTQEVFAQVKQIYKTPPIKDFGGFNFSQILPDPSKPSKRSFIEDLLFNKVTLADAGFIKQYGDCLGDIAARDLICAQKFNGLTVLPPLLTDEMIAQYTSALLAGTITSGWTFGAGAALQIPFAMQMAYRFNGIGVTQNVLYENQKLIANQFNSAIGKIQDSLSSTASALGKLQDVVNQNAQALNTLVKQLSSNFGAISSVLNDILSRLDPPEAEVQIDRLITGRLQSLQTYVTQQLIRAAEIRASANLAATKMSECVLGQSKRVDFCGKGYHLMSFPQSAPHGVVFLHVTYVFAQEKNFTTAPAICHDGKAHFPREGVFVSNGTHWFVTQRNFYEPQIITTDNTFVSGNCDVVIGIVNNTVYDPLQLELDSFKEELDKYFKNHTSPDVDLGDISGINASVVNIQKEIDRLNEVAKNLNESLIDLQELGKYEQYIKGGSGYIPEAPRDGQAYVRKDGEWVLLSTFL

SEQ ID NO: 5846 - protein, 1241 aa, Artificial Sequence
  SARS-CoV-2/India/1-31/2020__EPI_ISL_413523 spike protein (1-1211)(K986P_V987P_P1069F) Foldon construct
MFVFLVLLPLVSSQCVNLTTRTQLPPAYTNSFTRGVYYPDKVFRSSVLHSTQDLFLPFFSNVTWFHAIHVSGTNGTKRFDNPVLPFNDGVYFASTEKSNIIRGWIFGTTLDSKTQSLLIVNNATNVVIKVCEFQFCNDPFLGVYYHKNNKSWMESEFRVYSSANNCTFEYVSQPFLMDLEGKQGNFKNLREFVFKNIDGYFKIYSKHTPINLVRDLPQGFSALEPLVDLPIGINITRFQTLLALHRSYLTPGDSSSGWTAGAAAYYVGYLQPRTFLLKYNENGTITDAVDCALDPLSETKCTLKSFTVEKGIYQTSNFRVQPTESIVRFPNITNLCPFGEVFNATRFASVYAWNRKRISNCVADYSVLYNSASFSTFKCYGVSPTKLNDLCFTNVYADSFVIRGDEVRQIAPGQTGKIADYNYKLPDDFTGCVIAWNSNNLDSKVGGNYNYLYRLFRKSNLKPFERDISTEIYQAGSTPCNGVEGFNCYFPLQSYGFQPTNGVGYQPYRVVVLSFELLHAPATVCGPKKSTNLVKNKCVNFNFNGLTGTGVLTESNKKFLPFQQFGRDIADTTDAVRDPQTLEILDITPCSFGGVSVITPGTNTSNQVAVLYQDVNCTEVPVAIHADQLTPTWRVYSTGSNVFQTRAGCLIGAEHVNNSYECDIPIGAGICASYQTQTNSPRRARSVASQSIIAYTMSLGAENSVAYSNNSIAIPTNFTISVTTEILPVSMTKTSVDCTMYICGDSTECSNLLLQYGSFCTQLNRALTGIAVEQDKNTQEVFAQVKQIYKTPPIKDFGGFNFSQILPDPSKPSKRSFIEDLLFNKVTLADAGFIKQYGDCLGDIAARDLICAQKFNGLTVLPPLLTDEMIAQYTSALLAGTITSGWTFGAGAALQIPFAMQMAYRFNGIGVTQNVLYENQKLIANQFNSVIGKIQDSLSSTASALGKLQDVVNQNAQALNTLVKQLSSNFGAISSVLNDILSRLDPPEAEVQIDRLITGRLQSLQTYVTQQLIRAAEIRASANLAATKMSECVLGQSKRVDFCGKGYHLMSFPQSAPHGVVFLHVTYVFAQEKNFTTAPAICHDGKAHFPREGVFVSNGTHWFVTQRNFYEPQIITTDNTFVSGNCDVVIGIVNNTVYDPLQPELDSFKEELDKYFKNHTSPDVDLGDISGINASVVNIQKEIDRLNEVAKNLNESLIDLQELGKYEQYIKGGSGYIPEAPRDGQAYVRKDGEWVLLSTFL

SEQ ID NO: 5847 - protein, 1241 aa, Artificial Sequence
  SARS-CoV-2/Guangdong/GD2020087-P0008/2020__EPI_ISL_413863 spike protein (1-1211)(K986P_V987P_P1069F) Foldon construct
MFVFLVLLPLVSSQCVNLTTRTQLPPAYTNSFTRGVYYPDKVFRSSVLHSTQDLFLPFFSNVTWFHAIHVSGTNGTKRFDNPVLPFNDGVYFASTEKSNIIRGWIFGTTLDSKTQSLLIVNNATNVVIKVCEFQFCNDPFLGVYYHKNNKSWMESEFRVYSSANNCTFEYVSQPFLMDLEGKQGNFKNLREFVFKNIDGYFKIYSKHTPINLVRDLPQGFSALEPLVDLPIGINITRFQTLLALHRSYLTPGDSSSGWTAGAAAYYVGYLQPRTFLLKYNENGTITDAVDCALDPLSETKCTLKSFTVEKGIYQTSNFRVQPTESIVRFPNITNLCPFGEVFNATRFASVYAWNRKRISNCVADYSVLYNSASFSTFKCYGVSPTKLNDLCFTNVYADSFVIRGDEVREIAPGQTGKIADYNYKLPDDFTGCVIAWNSNNLDSKVGGNYNYLYRLFRKSNLKPFERDISTEIYQAGSTPCNGVEGFNCYFPLQSYGFQPTNGVGYQPYRVVVLSFELLHAPATVCGPKKSTNLVKNKCVNFNFNGLTGTGVLTESNKKFLPFQQFGRDIADTTDAVRDPQTLEILDITPCSFGGVSVITPGTNTSNQVAVLYQDVNCTEVPVAIHADQLTPTWRVYSTGSNVFQTRAGCLIGAEHVNNSYECDIPIGAGICASYQTQTNSPRRARSVASQSIIAYTMSLGAENSVAYSNNSIAIPTNFTISVTTEILPVSMTKTSVDCTMYICGDSTECSNLLLQYGSFCTQLNRALTGIAVEQDKNTQEVFAQVKQIYKTPPIKDFGGFNFSQILPDPSKPSKRSFIEDLLFNKVTLADAGFIKQYGDCLGDIAARDLICAQKFNGLTVLPPLLTDEMIAQYTSALLAGTITSGWTFGAGAALQIPFAMQMAYRFNGIGVTQNVLYENQKLIANQFNSAIGKIQDSLSSTASALGKLQDVVNQNAQALNTLVKQLSSNFGAISSVLNDILSRLDPPEAEVQIDRLITGRLQSLQTYVTQQLIRAAEIRASANLAATKMSECVLGQSKRVDFCGKGYHLMSFPQSAPHGVVFLHVTYVFAQEKNFTTAPAICHDGKAHFPREGVFVSNGTHWFVTQRNFYEPQIITTDNTFVSGNCDVVIGIVNNTVYDPLQPELDSFKEELDKYFKNHTSPDVDLGDISGINASVVNIQKEIDRLNEVAKNLNESLIDLQELGKYEQYIKGGSGYIPEAPRDGQAYVRKDGEWVLLSTFL

SEQ ID NO: 5848 - protein, 1241 aa, Artificial Sequence
  SARS-CoV-2/Sweden/01/2020__EPI_ISL_411951 spike protein (1-1211)(K986P_V987P_P1069F) Foldon construct
MFVFLVLLPLVSSQCVNLTTRTQLPPAYTNSFTRGVYYPDKVFRSSVLHSTQDLFLPFFSNVTWFHAIHVSGTNGTKRFDNPVLPFNDGVYFASTEKSNIIRGWIFGTTLDSKTQSLLIVNNATNVVIKVCEFQFCNDPFLGVYYHKNNKSWMESEFRVYSSANNCTFEYVSQPFLMDLEGKQGNFKNLREFVFKNIDGYFKIYSKHTPINLVRDLPQGFSALEPLVDLPIGINITRFQTLLALHRSYLTPGDSSSGWTAGAAAYYVGYLQPRTFLLKYNENGTITDAVDCALDPLSETKCTLKSFTVEKGIYQTSNFRVQPTESIVRFPNITNLCPFGEVFNATRFASVYAWNRKRISNCVADYSVLYNSASFSTFKCYGVSPTKLNDLCFTNVYADSFVIRGDEVRQIAPGQTGKIADYNYKLPDDFTGCVIAWNSNNLDSKVGGNYNYLYRLFRKSNLKPFERDISTEIYQAGSTPCNGVEGFNCYFPLQSYGFQPTNGVGYQPYRVVVLSFELLHAPATVCGPKKSTNLVKNKCVNFNFNGLTGTGVLTESNKKFLPFQQFGRDIADTTDAVRDPQTLEILDITPCSFGGVSVITPGTNTSNQVAVLYQDVNCTEVPVAIHADQLTPTWRVYSTGSNVFQTRAGCLIGAEHVNNSYECDIPIGAGICASYQTQTNSPRRARSVASQSIIAYTMSLGAENSVAYSNNSIAIPTNFTISVTTEILPVSMTKTSVDCTMYICGDSTECSNLLLQYGSFCTQLNRALTGIAVEQDKNTQEVFAQVKQIYKTPPIKDCGGFNFSQILPDPSKPSKRSFIEDLLFNKVTLADAGFIKQYGDCLGDIAARDLICAQKFNGLTVLPPLLTDEMIAQYTSALLAGTITSGWTFGAGAALQIPFAMQMAYRFNGIGVTQNVLYENQKLIANQFNSAIGKIQDSLSSTASALGKLQDVVNQNAQALNTLVKQLSSNFGAISSVLNDILSRLDPPEAEVQIDRLITGRLQSLQTYVTQQLIRAAEIRASANLAATKMSECVLGQSKRVDFCGKGYHLMSFPQSAPHGVVFLHVTYVFAQEKNFTTAPAICHDGKAHFPREGVFVSNGTHWFVTQRNFYEPQIITTDNTFVSGNCDVVIGIVNNTVYDPLQPELDSFKEELDKYFKNHTSPDVDLGDISGINASVVNIQKEIDRLNEVAKNLNESLIDLQELGKYEQYIKGGSGYIPEAPRDGQAYVRKDGEWVLLSTFL

SEQ ID NO: 5849 - protein, 1241 aa, Artificial Sequence
  SARS-CoV-2/Tianmen/HBCDC-HB-07/2020__EPI_ISL_412983 spike protein (1-1211)(K986P_V987P_P1069F) Foldon construct
MFVFLVLLPLVSSQCVNLTTRTQLPPAYTNSFTRGVYYPDKVFRSSVLHSTQDLFLPFFSNVTWFHAIHVSGTNGTKRFDNPVLPFNDGVYFASTEKSNIIRGWIFGTTLDSKTQSLLIVNNATNVVIKVCEFQFCNDPFLGVYYHKNNKSWMESEFRVYSSANNCTFEYVSQPFLMDLEGKQGNFKNLREFVFKNIDGYFKIYSKHTPINLVRDLPQGFSALEPLVDLPIGINITRFQTLLALHRSYLTPGDSSSGWTAGAAAYYVGYLQPRTFLLKYNENGTITDAVDCALDPLSETKCTLKSFTVEKGIYQTSNFRVQPTESIVRFPNITNLCPFGEVFNATRFASVYAWNRKRISNCVADYSVLYNSASFSTFKCYGVSPTKLNDLCFTNVYADSFVIRGDEVRQIAPGQTGKIADYNYKLPDDFTGCVIAWNSNNLDSKVGGNYNYLYRLFRKSNLKPFERDISTEIYQAGSTPCNGVEGFNCYFPLQSYGFQPTNGVGYQPYRVVVLSFELLHAPATVCGPKKSTNLVKNKCVNFNFNGLTGTGVLTESNKKFLPFQQFGRDIADTTDAVRDPQTLEILDITPCSFGGVSVITPGTNTSNQVAVLYQDLNCTEVPVAIHADQLTPTWRVYSTGSNVFQTRAGCLIGAEHVNNSYECDIPIGAGICASYQTQTNSPRRARSVASQSIIAYTMSLGAENSVAYSNNSIAIPTNFTISVTTEILPVSMTKTSVDCTMYICGDSTECSNLLLQYGSFCTQLNRALTGIAVEQDKNTQEVFAQVKQIYKTPPIKDFGGFNFSQILPDPSKPSKRSFIEDLLFNKVTLADAGFIKQYGDCLGDIAARDLICAQKFNGLTVLPPLLTDEMIAQYTSALLAGTITSGWTFGAGAALQIPFAMQMAYRFNGIGVTQNVLYENQKLIANQFNSAIGKIQDSLSSTASALGKLQDVVNQNAQALNTLVKQLSSNFGAISSVLNDILSRLDPPEAEVQIDRLITGRLQSLQTYVTQQLIRAAEIRASANLAATKMSECVLGQSKRVDFCGKGYHLMSFPQSAPHGVVFLHVTYVFAQEKNFTTAPAICHDGKAHFPREGVFVSNGTHWFVTQRNFYEPQIITTDNTFVSGNCDVVIGIVNNTVYDPLQPELDSFKEELDKYFKNHTSPDVDLGDISGINASVVNIQKEIDRLNEVAKNLNESLIDLQELGKYEQYIKGGSGYIPEAPRDGQAYVRKDGEWVLLSTFL

SEQ ID NO: 5850 - protein, 1241 aa, Artificial Sequence
  SARS-CoV-2/Hong Kong/case42_VM20002493/2020__EPI_ISL_414527 spike protein (1-1211)(K986P_V987P_P1069F) Foldon construct
MFVFLVLLPLVSSQCVNLTTRTQLPPAYTNSFTRGVYYPDKVFRSSVLHSTQDLFLPFFSNVTWFHAIHVSGTNGTKRFDNPVLPFNDGVYFASTEKSNIIRGWIFGTTLDSKTQSLLIVNNATNVVIKVCEFQFCNDPFLGVYYHKNNKSWMESEFRVYSSANNCTFEYVSQPFLMDLEGKQGNFKNLREFVFKNIDGYFKIYSKHTPINLVRDLPQGFSALEPLVDLPIGINITRFQTLLALHRSYLTPGDSSSGWTAGAAAYYVGYLQPRTFLLKYNENGTITDAVDCALDPLSETKCTLKSFTVEKGIYQTSNFRVQPTESIVRFPNITNLCPFGEVFNATRFASVYAWNRKRISNCVADYSVLYNSASFSTFKCYGVSPTKLNDLCFTNVYADSFVIRGDEVRQIAPGQTGKIADYNYKLPDDFTGCVIAWNSNNLDSKVGGNYNYLYRLFRKSNLKPFERDISTEIYQAGSTPCNGVEGFNCYFPLQSYGFQPTNGVGYQPYRVVVLSFELLHAPATVCGPKKSTNLVKNKCVNFNFNGLTGTGVLTESNKKFLPFQQFGRDIADTTDAVRDPQTLEILDITPCSFGGVSVITPGTNTSNQVAVLYQDVNCTEVPVAIHADQLTPTWRVYSTGSNVFQTRAGCLIGAEHVNNSYECDIPIGAGICASYQTQTNSPRRARSVASQSIIAYTMSLGAENSVAYSNNSIAIPTNFAISVTTEILPVSMTKTSVDCTMYICGDSTECSNLLLQYGSFCTQLNRALTGIAVEQDKNTQEVFAQVKQIYKTPPIKDFGGFNFSQILPDPSKPSKRSFIEDLLFNKVTLADAGFIKQYGDCLGDIAARDLICAQKFNGLTVLPPLLTDEMIAQYTSALLAGTITSGWTFGAGAALQIPFAMQMAYRFNGIGVTQNVLYENQKLIANQFNSAIGKIQDSLSSTASALGKLQDVVNQNAQALNTLVKQLSSNFGAISSVLNDILSRLDPPEAEVQIDRLITGRLQSLQTYVTQQLIRAAEIRASANLAATKMSECVLGQSKRVDFCGKGYHLMSFPQSAPHGVVFLHVTYVFAQEKNFTTAPAICHDGKAHFPREGVFVSNGTHWFVTQRNFYEPQIITTDNTFVSGNCDVVIGIVNNTVYDPLQPELDSFKEELDKYFKNHTSPDVDLGDISGINASVVNIQKEIDRLNEVAKNLNESLIDLQELGKYEQYIKGGSGYIPEAPRDGQAYVRKDGEWVLLSTFL

SEQ ID NO: 5851 - protein, 1241 aa, Artificial Sequence
  SARS-CoV-2/USA/CruiseA-23/2020__EPI_ISL_414482 spike protein (1-1211)(K986P_V987P_P1069F) Foldon construct
MFVFLVLLPLVSSQCVNLTTRTQLPPAYTNSFTRGVYYPDKVFRSSVLHSTQDLFLPFFSNVTWFHAIHVSGTNGTKRFDNPVLPFNDGVYFASTEKSNIIRGWIFGTTLDSKTQSLLIVNNATNVVIKVCEFQFCNDPFLGVYYHKNNKSWMESEFRVYSSANNCTFEYVSQPFLMDLEVKQGNFKNLREFVFKNIDGYFKIYSKHTPINLVRDLPQGFSALEPLVDLPIGINITRFQTLLALHRSYLTPGDSSSGWTAGAAAYYVGYLQPRTFLLKYNENGTITDAVDCALDPLSETKCTLKSFTVEKGIYQTSNFRVQPTESIVRFPNITNLCPFGEVFNATRFASVYAWNRKRISNCVADYSVLYNSASFSTFKCYGVSPTKLNDLCFTNVYADSFVIRGDEVRQIAPGQTGKIADYNYKLPDDFTGCVIAWNSNNLDSKVGGNYNYLYRLFRKSNLKPFERDISTEIYQAGSTPCNGVEGFNCYFPLQSYGFQPTNGVGYQPYRVVVLSFELLHAPATVCGPKKSTNLVKNKCVNFNFNGLTGTGVLTESNKKFLPFQQFGRDIADTTDAVRDPQTLEILDITPCSFGGVSVITPGTNTSNQVAVLYQDVNCTEVPVAIHADQLTPTWRVYSTGSNVFQTRAGCLIGAEHVNNSYECDIPIGAGICASYQTQTNSPRRARSVASQSIIAYTMSLGAENSVAYSNNSIAIPTNFTISVTTEILPVSMTKTSVDCTMYICGDSTECSNLLLQYGSFCTQLNRALTGIAVEQDKNTQEVFAQVKQIYKTPPIKDFGGFNFSQILPDPSKPSKRSFIEDLLFNKVTLADAGFIKQYGDCLGDIAARDLICAQKFNGLTVLPPLLTDEMIAQYTSALLAGTITSGWTFGAGAALQIPFAMQMAYRFNGIGVTQNVLYENQKLIANQFNSAIGKIQDSLSSTASALGKLQDVVNQNAQALNTLVKQLSSNFGAISSVLNDILSRLDPPEAEVQIDRLITGRLQSLQTYVTQQLIRAAEIRASANLAATKMSECVLGQSKRVDFCGKGYHLMSFPQSAPHGVVFLHVTYVFAQEKNFTTAPAICHDGKAHFPREGVFVSNGTHWFVTQRNFYEPQIITTDNTFVSGNCDVVIGIVNNTVYDPLQPELDSFKEELDKYFKNHTSPDVDLGDISGINASVVNIQKEIDRLNEVAKNLNESLIDLQELGKYEQYIKGGSGYIPEAPRDGQAYVRKDGEWVLLSTFL

SEQ ID NO: 5852 - protein, 1241 aa, Artificial Sequence
  SARS-CoV-2/Hong Kong/case85_VM20002868/2020__EPI_ISL_414519 spike protein (1-1211)(K986P_V987P_P1069F) Foldon construct
MFVFLVLVPLVSSQCVNLTTRTQLPPAYTNSFTRGVYYPDKVFRSSVLHSTQDLFLPFFSNVTWFHAIHVSGTNGTKRFDNPVLPFNDGVYFASTEKSNIIRGWIFGTTLDSKTQSLLIVNNATNVVIKVCEFQFCNDPFLGVYYHKNNKSWMESEFRVYSSANNCTFEYVSQPFLMDLEGKQGNFKNLREFVFKNIDGYFKIYSKHTPINLVRDLPQGFSALEPLVDLPIGINITRFQTLLALHRSYLTPGDSSSGWTAGAAAYYVGYLQPRTFLLKYNENGTITDAVDCALDPLSETKCTLKSFTVEKGIYQTSNFRVQPTESIVRFPNITNLCPFGEVFNATRFASVYAWNRKRISNCVADYSVLYNSASFSTFKCYGVSPTKLNDLCFTNVYADSFVIRGDEVRQIAPGQTGKIADYNYKLPDDFTGCVIAWNSNNLDSKVGGNYNYLYRLFRKSNLKPFERDISTEIYQAGSTPCNGVEGFNCYFPLQSYGFQPTNGVGYQPYRVVVLSFELLHAPATVCGPKKSTNLVKNKCVNFNFNGLTGTGVLTESNKKFLPFQQFGRDIADTTDAVRDPQTLEILDITPCSFGGVSVITPGTNTSNQVAVLYQDVNCTEVPVAIHADQLTPTWRVYSTGSNVFQTRAGCLIGAEHVNNSYECDIPIGAGICASYQTQTNSPRRARSVASQSIIAYTMSLGAENSVAYSNNSIAIPTNFTISVTTEILPVSMTKTSVDCTMYICGDSTECSNLLLQYGSFCTQLNRALTGIAVEQDKNTQEVFAQVKQIYKTPPIKDFGGFNFSQILPDPSKPSKRSFIEDLLFNKVTLADAGFIKQYGDCLGDIAARDLICAQKFNGLTVLPPLLTDEMIAQYTSALLAGTITSGWTFGAGAALQIPFAMQMAYRFNGIGVTQNVLYENQKLIANQFNSAIGKIQDSLSSTASALGKLQDVVNQNAQALNTLVKQLSSNFGAISSVLNDILSRLDPPEAEVQIDRLITGRLQSLQTYVTQQLIRAAEIRASANLAATKMSECVLGQSKRVDFCGKGYHLMSFPQSAPHGVVFLHVTYVFAQEKNFTTAPAICHDGKAHFPREGVFVSNGTHWFVTQRNFYEPQIITTDNTFVSGNCDVVIGIVNNTVYDPLQPELDSFKEELDKYFKNHTSPDVDLGDISGINASVVNIQKEIDRLNEVAKNLNESLIDLQELGKYEQYIKGGSGYIPEAPRDGQAYVRKDGEWVLLSTFL

SEQ ID NO: 5853 - protein, 1241 aa, Artificial Sequence; identical to SEQ ID NO: 5843
  SARS-CoV-2/England/200990660/2020__EPI_ISL_414523 spike protein (1-1211)(K986P_V987P_P1069F) Foldon construct

SEQ ID NO: 5854 - protein, 1241 aa, Artificial Sequence
  SARS-CoV-2/Australia/NSW09/2020__EPI_ISL_413595 spike protein (1-1211)(K986P_V987P_P1069F) Foldon construct
MFVFLVLLPLVSSQCVNLTTRTQLPPAYTNSFTRGVYYPDKVFRSSVLHSTQDLFLPFFSNVTWFHAIHVSGTNGTKRFDNPVLPFNDGVYFASTEKSNIIRGWIFGTTLDSKTQSLLIVNNATNVVIKVCEFQFCNDPFLGVYYHKNNKSWMESEFRVYSSANNCTFEYVSQPFLMDLEGKQGNFKNLREFVFKNIDGYFKIYSKHTPINLVRDLPQGFSALEPLVDLPIGINITRFQTLLALHRSYLTPGDSSSGWTAGAAAYYVGYLQPRTFLLKYNENGTITDAVDCALDPLSETKCTLKSFTVEKGIYQTSNFRVQPTESIVRFPNITNLCPFGEVFNATRFASVYAWNRKRISNCVADYSVLYNSASFSTFKCYGVSPTKLNDLCFTNVYADSFVIRGDEVRQIAPGQTGKIADYNYKLPDDFTGCVIAWNSNNLDSKVGGNYNYLYRLFRKSNLKPFERDISTEIYQAGSTPCNGVEGFNCYFPLQSYGFQPTNGVGYQPYRVVVLSFELLHAPATVCGPKKSTNLVKNKCVNFNFNGLTGTGVLTESNKKFLPFQQFGRDIADTTDAVRDPQTLEILDITPCSFGGVSVITPGTNTSNQVAVLYQDVNCTEVPVAIHADQLTPTWRVYSTGSNVFQTRAGCLIGAEHVNNSYECDIPIGAGICASYQTQTNSPRRARSVASQSIIAYTMSLGAENSVAYSNNSIAIPTNFTISVTTEILPVSMTKTSVDCTMYICGDSTECSNLLLQYGSFCTQLNRALTGIAVEQDKNTQEVFAQVKQIYKTPPIKDFGGFNFSQILPDPSKPSKRSFIEDLLFNKVTLADAGFIKQYGDCLGDIAARDLICAQKFNGLTVLPPLLTDEMIAQYTSALLAGTITSGWTFGAGAALQIPFAMQMAYRFNGIGVTQNVLYENQKLIANQFNSAIGKIQDSLSFTASALGKLQDVVNQNAQALNTLVKQLSSNFGAISSVLNDILSRLDPPEAEVQIDRLITGRLQSLQTYVTQQLIRAAEIRASANLAATKMSECVLGQSKRVDFCGKGYHLMSFPQSAPHGVVFLHVTYVFAQEKNFTTAPAICHDGKAHFPREGVFVSNGTHWFVTQRNFYEPQIITTDNTFVSGNCDVVIGIVNNTVYDPLQPELDSFKEELDKYFKNHTSPDVDLGDISGINASVVNIQKEIDRLNEVAKNLNESLIDLQELGKYEQYIKGGSGYIPEAPRDGQAYVRKDGEWVLLSTFL

SEQ ID NO: 5855 - protein, 1241 aa, Artificial Sequence; identical to SEQ ID NO: 5835
  SARS-CoV-2/Australia/NSW10/2020__EPI_ISL_413596 spike protein (1-1211)(K986P_V987P_P1069F) Foldon construct

SEQ ID NO: 5856 - protein, 1241 aa, Artificial Sequence
  SARS-CoV-2/Switzerland/1000477797/2020__EPI_ISL_413023 spike protein (1-1211)(K986P_V987P_P1069F) Foldon construct
MFVFLVLLPLVSSQCVNLTTRTQLPPAYTNSFTRGVYYPDKVFRSSVLHSTQDLFLPFFSNVTWFHAIHVSGTNGTKRFDNPVLPFNDGVYFASTEKSNIIRGWIFGTTLDSKTQSLLIVNNATNVVIKVCEFQFCNDPFLGVYYHKNNKSWMESEFRVYSSANNCTFEYVSQPFLMDLEGKQGNFKNLREFVFKNIDGYFNIYSKHTPINLVRDLPQGFSALEPLVDLPIGINITRFQTLLALHRSYLTPGDSSSGWTAGAAAYYVGYLQPRTFLLKYNENGTITDAVDCALDPLSETKCTLKSFTVEKGIYQTSNFRVQPTESIVRFPNITNLCPFGEVFNATRFASVYAWNRKRISNCVADYSVLYNSASFSTFKCYGVSPTKLNDLCFTNVYADSFVIRGDEVRQIAPGQTGKIADYNYKLPDDFTGCVIAWNSNNLDSKVGGNYNYLYRLFRKSNLKPFERDISTEIYQAGSTPCNGVEGFNCYFPLQSYGFQPTNGVGYQPYRVVVLSFELLHAPATVCGPKKSTNLVKNKCVNFNFNGLTGTGVLTESNKKFLPFQQFGRDIADTTDAVRDPQTLEILDITPCSFGGVSVITPGTNTSNQVAVLYQGVNCTEVPVAIHADQLTPTWRVYSTGSNVFQTRAGCLIGAEHVNNSYECDIPIGAGICASYQTQTNSPRRARSVASQSIIAYTMSLGAENSVAYSNNSIAIPTNFTISVTTEILPVSMTKTSVDCTMYICGDSTECSNLLLQYGSFCTQLNRALTGIAVEQDKNTQEVFAQVKQIYKTPPIKDFGGFNFSQILPDPSKPSKRSFIEDLLFNKVTLADAGFIKQYGDCLGDIAARDLICAQKFNGLTVLPPLLTDEMIAQYTSALLAGTITSGWTFGAGAALQIPFAMQMAYRFNGIGVTQNVLYENQKLIANQFNSAIGKIQDSLSSTASALGKLQDVVNQNAQALNTLVKQLSSNFGAISSVLNDILSRLDPPEAEVQIDRLITGRLQSLQTYVTQQLIRAAEIRASANLAATKMSECVLGQSKRVDFCGKGYHLMSFPQSAPHGVVFLHVTYVFAQEKNFTTAPAICHDGKAHFPREGVFVSNGTHWFVTQRNFYEPQIITTDNTFVSGNCDVVIGIVNNTVYDPLQPELDSFKEELDKYFKNHTSPDVDLGDISGINASVVNIQKEIDRLNEVAKNLNESLIDLQELGKYEQYIKGGSGYIPEAPRDGQAYVRKDGEWVLLSTFL

SEQ ID NO: 5857 - protein, 1241 aa, Artificial Sequence
  SARS-CoV-2/Belgium/BA-02291/2020__EPI_ISL_415159 spike protein (1-1211)(K986P_V987P_P1069F) Foldon construct
MFVFLVLLPLVSSQCVNLTTRTQLPPAYTNSFTRGVYYPDKVFRSSVLHSTQDLFLPFFSNVTWFHAIHVSGTNGTKRFDNPVLPFNDGVYFASTEKSNIIRGWIFGTTLDSKTQSLLIVNNATNVVIKVCEFQFCNDPFLGVYYHKNNKSWMESEFRVYSSANNCTFEYVSQPFLMDLEGKQGNFKNLREFVFKNIDGYFKIYSKHTPINLVRDLPQGFSALEPLVDLPIGINITRFQTLLALHRSYLTPGDSSSGWTAGAAAYYVGYLQPRTFLLKYNENGTITDAVDCALDPLSETKCTLKSFTVEKGIYQTSNFRVQPTESIVRFPNITNLCPFGEVFNATRFASVYAWNRKRISNCVADYSVLYNSASFSTFKCYGVSPTKLNDLCFTNVYADSFVIRGDEVRQIAPGQTGKIADYNYKLPDDFTGCVIAWNSNNLDSKVGGNYNYLYRLFRRSNLKPFERDISTEIYQAGSTPCNGVEGFNCYFPLQSYGFQPTNGVGYQPYRVVVLSFELLPAPATVCGPKKSTNLVKNKCVNFNFNGLTGTGVLTESNKKFLPFQQFGRDIADTTDAVRDPQTLEILDITPCSFGGVSVITPGTNTSNQVAVLYQGVNCTEVPVAIHADQLTPTWRVYSTGSNVFQTRAGCLIGAEHVNNSYECDIPIGAGICASYQTQTNSPRRARSVASQSIIAYTMSLGAENSVAYSNNSIAIPTNFTISVTTEILPVSMTKTSVDCTMYICGDSTECSNLLLQYGSFCTQLNRALTGIAVEQDKNTQEVFAQVKQIYKTPPIKDFGGFNFSQILPDPSKPSKRSFIEDLLFNKVTLADAGFIKQYGDCLGDIAARDLICAQKFNGLTVLPPLLTDEMIAQYTSALLAGTITSGWTFGAGAALQIPFAMQMAYRFNGIGVTQNVLYENQKLIANQFNSAIGKIQDSLSSAAPALGKLQDVVNQNAQALNTLVKQLSSNFGAISSVLNDILSRLDPPEAEVQIDRLITGRLQSLQTYVTQQLIRAAEIRASANLAATKMSECVLGQSKRVDFCGKGYHLMSFPQSAPHGVVFLHVTYVFAQEKNFTTAPAICHDGKAHFPREGVFVSNGTHWFVTQRNFYEPQIITTDNTFVSGNCDVVIGIVNNTVYDPLQPELDSFKEELDKYFKNHTSPDVDLGDISGINASVVNIQKEIDRLNEVAKNLNESLIDLQELGKYEQYIKGGSGYIPEAPRDGQAYVRKDGEWVLLSTFL

SEQ ID NO: 5858 - protein, 1241 aa, Artificial Sequence
  SARS-CoV-2/USA/WA8-UW5/2020__EPI_ISL_413486 spike protein (1-1211)(K986P_V987P_P1069F) Foldon construct
MFVFLVLLPLVSSQCVNLTTRTQLPPAYTNSFTRGVYYPDKVFRSSVLHSTQDLFLPFFSNVTWFHAIHVSGTNGTKRFDNPVLPFNDGVYFASTEKSNIIRGWIFGTTLDSKTQSLLIVNNATNVVIKVCEFQFCNDPFLGVYYHKNNKSWMESEFRVYSSANNCTFEYVSQPFLMDLEGKQGNFKNLREFVFKNIDGYFKIYSKHTPINLVRDLPQGFSALEPLVDLPIGINITRFQTLLALHRSYLTPGDSSSGWTAGAAAYYVGYLQPRTFLLKYNENGTITDAVDCALDPLSETKCTLKSFTVEKGIYQTSNFRVQPTESIVRFPNITNLCPFGEVFNATRFASVYAWNRKRISNCVADYSVLYNSASFSTFKCYGVSPTKLNDLCFTNVYADSFVIRGDEVRQIAPGQTGKIADYNYKLPDDFTGCVIAWNSNNLDSKVGGNYNYLYRLFRKSNLKPFERDISTEIYQAGSTPCNGVEGFNCYFPLQSYGFQPTNGVGYQPYRVVVLSFELLHAPATVCGPKKSTNLVKNKCVNFNFNGLTGTGVLTESNKKFLPFQQFGRDIADTTDAVRDPQTLEILDITPCSFGGVSVITPGTNTSNQVAVLYQDVNCTEVPVAIHADQLTPTWRVYSTGSNVFQTRAGCLIGAEYVNNSYECDIPIGAGICASYQTQTNSPRRARSVASQSIIAYTMSLGAENSVAYSNNSIAIPTNFTISVTTEILPVSMTKTSVDCTMYICGDSTECSNLLLQYGSFCTQLNRALTGIAVEQDKNTQEVFAQVKQIYKTPPIKDFGGFNFSQILPDPSKPSKRSFIEDLLFNKVTLADAGFIKQYGDCLGDIAARDLICAQKFNGLTVLPPLLTDEMIAQYTSALLAGTITSGWTFGAGAALQIPFAMQMAYRFNGIGVTQNVLYENQKLIANQFNSAIGKIQDSLSSTASALGKLQDVVNQNAQALNTLVKQLSSNFGAISSVLNDILSRLDPPEAEVQIDRLITGRLQSLQTYVTQQLIRAAEIRASANLAATKMSECVLGQSKRVDFCGKGYHLMSFPQSAPHGVVFLHVTYVFAQEKNFTTAPAICHDGKAHFPREGVFVSNGTHWFVTQRNFYEPQIITTDNTFVSGNCDVVIGIVNNTVYDPLQPELDSFKEELDKYFKNHTSPDVDLGDISGINASVVNIQKEIDRLNEVAKNLNESLIDLQELGKYEQYIKGGSGYIPEAPRDGQAYVRKDGEWVLLSTFL

SEQ ID NO: 5859 - protein, 1241 aa, Artificial Sequence
  SARS-CoV-2/England/20102000506/2020__EPI_ISL_415147 spike protein (1-1211)(K986P_V987P_P1069F) Foldon construct
MFVFLVLLPLVSSQCVNLTTRTQLPPAYTNSFTRGVYYPDKVFRSSVLHSTQDLFLPFFSNVTWFHAIHVSGTNGTKRFDNPVLPFNDGVYFASTEKSNIIRGWIFGTTLDSKTQSLLIVNNATNVVIKVCEFQFCNDPFLGVYYHKNNKSWMESEFRVYSSANNCTFEYVSQPFLMDLEGKQGNFKNLREFVFKNIDGYFKIYSKHTPINLVRDLPQGFSALEPLVDLPIGINITRFQTLLALHRSYLTPGDSSSGWTAGAAAYYVGYLQPRTFLLKYNENGTITDAVDCALDPLSETKCTLKSFTVEKGIYQTSNFRVQPTESIVRFPNITNLCPFGEVFNATRFASVYAWNRKRISNCVADYSVLYNSASFSTFKCYGVSPTKLNDLCFTNVYADSFVIRGDEVRQIAPGQTGKIADYNYKLPDDFTGCVIAWNSNNLDSKVGGNYNYLYRLFRKSNLKPFERDISTEIYQAGSTPCNGVEGFNCYFPLQSYGFQPTNGVGYQPYRVVVLSFELLHAPATVCGPKKSTNLVKNKCVNFNFNGLTGTGVLTESNKKFLPFQQFGRDIADTTDAVRDPQTLEILDITPCSFGGVSVITPGTNTSNQVAVLYQGVNCTEVPVAIHADQLTPTWRVYSTGSNVFQTRAGCLIGAEHVNNSYECDIPIGAGICASYQTQTNSPRRARSVASQSIIAYTMSLGAENSVAYSNNSIAIPTNFTISVTTEILPVSMTKTSVDCTMYICGDSTECSNLLLQYGSFCTQLNRALTGIAVEQDKNTQEVFAQVKQIYKTPPIKDFGGFNFSQILPDPSKPSKRSFIEDLLFNKVTLADAGFIKQYGYCLGDIAARDLICAQKFNGLTVLPPLLTDEMIAQYTSALLAGTITSGWTFGAGAALQIPFAMQMAYRFNGIGVTQNVLYENQKLIANQFNSAIGKIQDSLSSTASALGKLQDVVNQNAQALNTLVKQLSSNFGAISSVLNDILSRLDPPEAEVQIDRLITGRLQSLQTYVTQQLIRAAEIRASANLAATKMSECVLGQSKRVDFCGKGYHLMSFPQSAPHGVVFLHVTYVFAQEKNFTTAPAICHDGKAHFPREGVFVSNGTHWFVTQRNFYEPQIITTDNTFVSGNCDVVIGIVNNTVYDPLQPELDSFKEELDKYFKNHTSPDVDLGDISGINASVVNIQKEIDRLNEVAKNLNESLIDLQELGKYEQYIKGGSGYIPEAPRDGQAYVRKDGEWVLLSTFL

SEQ ID NO: 5860 - protein, 1241 aa, Artificial Sequence
  SARS-CoV-2/Belgium/VAG-03013/2020__EPI_ISL_415155 spike protein (1-1211)(K986P_V987P_P1069F) Foldon construct
MFVFLVLLPLVSSQCVNLTTRTQLPPAYTNSFTRGVYYPDKVFRSSVLHSTQDLFLPFFSNVTWFHAIHVSGTNGTKRFDNPVLPFNDGVYFASTEKSNIIRGWIFGTTLDSKTQSLLIVNNATNVVIKVCEFQFCNDPFLGVYYHKNNKSWMESEFRVYSSANNCTFEYVSQPFLMDLEGKQGNFKNLREFVFKNIDGYFKIYSKHTPINLVRDLPQGFSALEPLVDLPIGINITRFQTLLALHRSYLTPGDSSSGWTAGAAAYYVGYLQPRTFLLKYNENGTITDAVDCALDPLSETKCTLKSFTVEKGIYQTSNFRVQPTESIVRFPNITNLCPFGEVFNATRFASVYAWNRKRISNCVADYSVLYNSASFSTFKCYGVSPTKLNDLCFTNVYADSFVIRGDEVRQIAPGQTGKIADYNYKLPDDFTGCVIAWNSNNLDSKVGGNYNYLYRLFRKSNLKPFERDISTEIYQAGSTPCNGVEGFNCYFPLQSYGFQPTNGVGYQPYRVVVLSFELLHAPATVCGPKKSTNLVKNKCVNFNFNGLTGTGVLTESNKKFLPFQQFGRDIADTTDAVRDPQTLEILDITPCSFGGVSVITPGTNTSNQVAVLYQGVNCTEVPVAIHADQLTPTWRVYSTGSNVFQTRAGCLIGAEHVNNSYECDIPIGAGICASYQTQTNSPRRARSVASQSIIAYTMSLGAENSVAYSNNSIAIPTNFTISVTTEILPVSMTKTSVDCTMYICGDSTECSNLLLQYGSFCTQLNRALTGIAVEQDKNTQEVFAQVKQIYKTPPIKDFGGFNFSQILPDPSKPSKRSFIEDLLFNKVTLADAGFIKQYGDCLGDIAARDLICAQKFNGLTVLPPLLTDEMIAQYTSALLAGTITSGWTFGAGAALQIPFAMQMAYRFNGIGVTQNVLYENQKLIANQFNSAIGKIQDSLSSTATALGKLQDVVNQNAQALNTLVKQLSSNFGAISSVLNDILSRLDPPEAEVQIDRLITGRLQSLQTYVTQQLIRAAEIRASANLAATKMSECVLGQSKRVDFCGKGYHLMSFPQSAPHGVVFLHVTYVFAQEKNFTTAPAICHDGKAHFPREGVFVSNGTHWFVTQRNFYEPQIITTDNTFVSGNCDVVIGIVNNTVYDPLQPELDSFKEELDKYFKNHTSPDVDLGDISGINASVVNIQKEIDRLNEVAKNLNESLIDLQELGKYEQYIKGGSGYIPEAPRDGQAYVRKDGEWVLLSTFL

SEQ ID NO: 5861 - protein, 1241 aa, Artificial Sequence
  SARS-CoV-2/Belgium/BC-03016/2020__EPI_ISL_415157 spike protein (1-1211)(K986P_V987P_P1069F) Foldon construct
MFVFLVLLPLVSSQCVNLTTRTQLPPAYTNSFTRGVYYPDKVFRSSVLHSTQDLFLPFFSNVTWFHAIHVSGTNGTKRFDNPVLPFNDGVYFASTEKSNIIRGWIFGTTLDSKTQSLLIVNNATNVVIKVCEFQFCNDPFLGVYYHKNNKSWMESEFRVYSSANNCTFEYVSQPFLMDLEGKQGNFKNLREFVFKNIDGYFKIYSKHTPINLVRDLPQGFSALEPLVDLPIGINITRFQTLLALHRSYLTPGDSSSGWTAGAAAYYVGYLQPRTFLLKYNENGTITDAVDCALDPLSETKCTLKSFTVEKGIYQTSNFRVQPTESIVRFPNITNLCPFGEVFNATRFASVYAWNRKRISNCVADYSVLYNSASFSTFKCYGVSPTKLNDLCFTNVYADSFVIRGDEVRQIAPGQTGKIADYNYKLPDDFTGCVIAWNSNNLDSKVGGNYNYLYRLFRKSNLKPFERDISTEIYQAGSTPCNGVEGFNCYFPLQSYGFQPTNGVGYQPYRVVVLSFELLHAPATVCGPKKSTNLVKNKCVNFNFNGLTGTGVLTESNKKFLPFQQFGRDIADTTDAVRDPQTLEILDITPCSFGGVSVITPGTNTSNQVAVLYQGVNCTEVPVAIHADQLTPTWRVYSTGSNVFQTRAGCLIGAEHVNNSYECDIPIGAGICASYQTQTNSPRRARSVASQSIIAYTMSLGAENSVAYSNNSIAIPTNFTISVTTEILPVSMTKTSVDCTMYICGDSTECSNLLLQYGSFCTQLNRALTGIAVEQDKNTQEVFAQVKQIYKTPPIKDFGGFNFSQILPDPSKPSKRSFIEDLLFNKVTLADAGFIKQYGDCLGDIAARDLICAQKFNGLTVLPPLLTDEMIAQYTSALLAGTITSGWTFGAGAALQIPFAMQMAYRFNGIGVTQNVLYENQKLIANQFNSAIGKIQDSLSSTAPALGKLQDVVNQNAQALNTLVKQLSSNFGAISSVLNDILSRLDPPEAEVQIDRLITGRLQSLQTYVTQQLIRAAEIRASANLAATKMSECVLGQSKRVDFCGKGYHLMSFPQSAPHGVVFLHVTYVFAQEKNFTTAPAICHDGKAHFPREGVFVSNGTHWFVTQRNFYEPQIITTDNTFVSGNCDVVIGIVNNTVYDPLQPELDSFKEELDKYFKNHTSPDVDLGDISGINASVVNIQKEIDRLNEVAKNLNESLIDLQELGKYEQYIKGGSGYIPEAPRDGQAYVRKDGEWVLLSTFL

SEQ ID NO: 5862 - protein, 1241 aa, Artificial Sequence
  SARS-CoV-2/Germany/BavPat3/2020__EPI_ISL_414521 spike protein (1-1211)(K986P_V987P_P1069F) Foldon construct
MFVFLVLLPLVSSQCVNLTTRTQLPPAYTNSFTRGVYYPDKVFRSSVLHSTQDLFLPFFSNVTWFHAIHVSGTNGTKRFDNPVLPFNDGVYFASTEKSNIIRGWIFGTTLDSKTQSLLIVNNATNVVIKVCEFQFCNDPFLGVYYHKNNKSWMESEFRVYSSANNCTFEYVSQPFLMDLEGKQGNFKNLREFVFKNIDGYFKIYSKHTPINLVRDLPQGFSALEPLVDLPIGINITRFQTLLALHRSYLTPGDSSSGWTAGAAAYYVGYLQPRTFLLKYNENGTITDAVDCALDPLSETKCTLKSFTVEKGIYQTSNFRVQPTESIVRFPNITNLCPFGEVFNATRFASVYAWNRKRISNCVADYSVLYNSASFSTFKCYGVSPTKLNDLCFTNVYADSFVIRGDEVRQIAPGQTGKIADYNYKLPDDFTGCVIAWNSNNLDSKVGGNYNYLYRLFRKSNLKPFERDISTEIYQAGSTPCNGVEGFNCYFPLQSYGFQPTNGVGYQPYRVVVLSFELLHAPATVCGPKKSTNLVKNKCVNFNFNGLTGTGVLTESNKKFLPFQQFGRDIADTTDAVRDPQTLEILDITPCSFGGVSVITPGTNTSNQVAVLYQDVNCTEVPVAIHADQLTPTWRVYSTGSNVFQTRAGCLIGAEHVNNSYECDIPIGAGICASYQTQTNSPRRARSVASQSIIAYTMSLGAENSVAYSNNSIAIPTNFTISVTTEILPVSMTKTSVDCTMYICGDSTECSNLLLQYGSFCTQLNRALTGIAVEQDKNTQQVFAQVKQIYKTPPIKDFGGFNFSQILPDPSKPSKRSFIEDLLFNKVTLADAGFIKQYGDCLGDIAARDLICAQKFNGLTVLPPLLTDEMIAQYTSALLAGTITSGWTFGAGAALQIPFAMQMAYRFNGIGVTQNVLYENQKLIANQFNSAIGKIQDSLSSTASALGKLQDVVNQNAQALNTLVKQLSSNFGAISSVLNDILSRLDPPEAEVQIDRLITGRLQSLQTYVTQQLIRAAEIRASANLAATKMSECVLGQSKRVDFCGKGYHLMSFPQSAPHGVVFLHVTYVFAQEKNFTTAPAICHDGKAHFPREGVFVSNGTHWFVTQRNFYEPQIITTDNTFVSGNCDVVIGIVNNTVYDPLQPELDSFKEELDKYFKNHTSPDVDLGDISGINASVVNIQKEIDRLNEVAKNLNESLIDLQELGKYEQYIKGGSGYIPEAPRDGQAYVRKDGEWVLLSTFL

SEQ ID NO: 5863 - protein, 1241 aa, Artificial Sequence
  SARS-CoV-2/France/HF1805/2020__EPI_ISL_414628 spike protein (1-1211)(K986P_V987P_P1069F) Foldon construct
MFVFLVLLPLVSSQCVNLTTRTQLPPAYTNSFTRGVYYPDKVFRSSVLHSTQDLFLPFFSNVTWFHAIHVSGTNGTKRFDNPVLPFNDGVYFASTEKSNIIRGWIFGTTLDSKTQSLLIVNNATNVVIKVCEFQFCNDPFLGVYYHKNNKSWMESEFRVYSSANNCTFEYVSQPFLMDLEGKQGNFKNLREFVFKNIDGYFKIYSKHTPINLVRDLPQGFSALEPLVDLPIGINITRFQTLLALHRSYLTPGDSSSGWTAGAAAYYVGYLQPRTFLLKYNENGTITDAVDCALDPLSETKCTLKSFTVEKGIYQTSNFRVQPTESIVRFPNITNLCPFGEVFNATRFASVYAWNRKRISNCVADYSVLYNSASFSTFKCYGVSPTKLNDLCFTNVYADSFVIRGDEVRQIAPGQTGKIADYNYKLPDDFTGCVIAWNSNNLDSKVGGNYNYLYRLFRKSNLKPFERDISTEIYQAGSTPCNGVEGFNCYFPLQSYGFQPTNGVGYQPYRVVVLSFELLHAPATVCGPKKSTNLVKNKCVNFNFNGLTGTGVLTESNKKFLPFQQFGRDIADTTDAVRDPQTLEILDITPCSFGGVSVITPGTNTSNQVAVLYQGVNCTEVPVAIHADQLTPTWRVYSTGSNVFQTRAGCLIGAEHVNNSYECDIPIGAGICASYQTQTNSPRRARSVASQSIIAYTMSLGAENSVAYSNNSIAIPTNFTISVTTEILPVSMTKTSVDCTMYICGDSTECSNLLLQYGSFCTQLNRALTGIAVEQDKNTQEVFAQVKQIYKTPPIKDFGGFNFSQILPDPSKPSKRSFIEDLLFNKVTLADAGFIKQYGDCLGDIAARDLICAQKFNGLTVLPPLLTDEMIAQYTSALLAGTITSGWTFGAGAALQIPFAMQMAYRFNGIGVTQNVLYENQKLIANQFNSAIGKIQDSLSSTASALGKLQDVVNQNAQALNTLVKQLSSNFGAISSVLNDILSRLDPPEAEVQIDRLITGRLQSLQTYVTQQLIRAAEIRASANLAATKMSECVLGQSKRVDFCGKGYHLMSFPQSAPHGVVFLHVTYVFAQEKNFTTAPAICHDGKAHFPREGVFVSNGTHWFVTQRNFYEPQIITTDNTFVSGNCDVVIGVVNNTVYDPLQPELDSFKEELDKYFKNHTSPDVDLGDISGINASVVNIQKEIDRLNEVAKNLNESLIDLQELGKYEQYIKGGSGYIPEAPRDGQAYVRKDGEWVLLSTFL

SEQ ID NO: 5864 - protein, 1241 aa, Artificial Sequence
  SARS-CoV-2/Netherlands/ZuidHolland_9/2020__EPI_ISL_414445 spike protein (1-1211)(K986P_V987P_P1069F) Foldon construct
MFVFLVLLPLVSSQCVNLTTRTQLPPAYTNSFTRGVYYPDKVFRSSVLHSTQDLFLPFFSNVTWFHAIHVSGTNGTKRFDNPVLPFNDGVYFASTEKSNIIRGWIFGTTLDSKTQSLLIVNNATNVVIKVCEFQFCNDPFLGVYYHKNNKSWMESEFRVYSSANNCTFEYVSQPFLMDLEGKQGNFKNLREFVFKNIDGYFKIYSKHTPINLVRDLPQGFSALEPLVDLPIGINITRFQTLLALHRSYLTPGDSSSGWTAGAAAYYVGYLQPRTFLLKYNENGTITDAVDCALDPLSETKCTLKSFTVEKGIYQTSNFRVQPTESIVRFPNITNLCPFGEVFNATRFASVYAWNRKRISNCVADYSVLYNSASFSTFKCYGVSPTKLNDLCFTNVYADSFVIRGDEVRQIAPGQTGKIADYNYKLPDDFTGCVIAWNSNNLDSKVGGNYNYLYRLFRKSNLKPFERDISTEIYQAGSTPCNGVEGFNCYFPLQSYGFQPTNGVGYQPYRVVVLSFELLHAPATVCGPKKSTNLVKNKCVNFNFNGLTGTGVLTESNKKFLPFQQFGRDIADTTDAVRDPQTLEILDITPCSFGGVSVITPGTNTSNQVAVLYQGVNCTEVPVAIHADQLTPTWRVYSTGSNVFQTRAGCLIGAEHVNNSYECDIPIGAGICASYQTQTNSPRRARSVASQSIIAYTMSLGAENSVAYSNNSIAIPTNFTISVTTEILPVSMTKTSVDCTMYICGDSTECSNLLLQYGSFCTQLNRALTGIAVEQDKNTQEVFAQVKQIYKTPPIKDFGGFNFSQILPDPSKPSKRSFIEDLLFNKVTLADAGFIKQYGDCLGDIAARDLICVQKFNGLTVLPPLLTDEMIAQYTSALLAGTITSGWTFGAGAALQIPFAMQMAYRFNGIGVTQNVLYENQKLIANQFNSAIGKIQDSLSSTASALGKLQDVVNQNAQALNTLVKQLSSNFGAISSVLNDILSRLDPPEAEVQIDRLITGRLQSLQTYVTQQLIRAAEIRASANLAATKMSECVLGQSKRVDFCGKGYHLMSFPQSAPHGVVFLHVTYVFAQEKNFTTAPAICHDGKAHFPREGVFVSNGTHWFVTQRNFYEPQIITTDNTFVSGNCDVVIGIVNNTVYDPLQPELDSFKEELDKYFKNHTSPDVDLGDISGINASVVNIQKEIDRLNEVAKNLNESLIDLQELGKYEQYIKGGSGYIPEAPRDGQAYVRKDGEWVLLSTFL

SEQ ID NO: 5865 - protein, 1241 aa, Artificial Sequence
  SARS-CoV-2/Finland/FIN03032020A/2020__EPI_ISL_413602 spike protein (1-1211)(K986P_V987P_P1069F) Foldon construct
MFVFLVLLPLVSSQCVNLTTRTQLPPAYTNSFTRGVYYPDKVFRSSVLHSTQDLFLPFFSNVTWFHAIHVSGTNGTKRFDNPVLPFNDGVYFASTEKSNIIRGWIFGTTLDSKTQSLLIVNNATNVVIKVCEFQFCNDPFLGVYYHKNNKSWMESEFRVYSSANNCTFEYVSQPFLMDLEGKQGNFKNLREFVFKNIDGYFKIYSKHTPINLVRDLPQGFSALEPLVDLPIGINITRFQTLLALHRSYLTPGDSSSGWTAGAAAYYVGYLQPRTFLLKYNENGTITDAVDCALDPLSETKCTLKSFTVEKGIYQTSNFRVQPTESIVRFPNITNLCPFGEVFNATRFASVYAWNRKRISNCVADYSVLYNSASFSTFKCYGVSPTKLNDLCFTNVYADSFVIRGDEVRQIAPGQTGKIADYNYKLPDDFTGCVISWNSNNLDSKVGGNYNYLYRLFRKSNLKPFERDISTEIYQAGSTPCNGVEGFNCYFPLQSYGFQPTNGVGYQPYRVVVLSFELLHAPATVCGPKKSTNLVKNKCVNFNFNGLTGTGVLTESNKKFLPFQQFGRDIADTTDAVRDPQTLEILDITPCSFGGVSVITPGTNTSNQVAVLYQGVNCTEVPVAIHADQLTPTWRVYSTGSNVFQTRAGCLIGAEHVNNSYECDIPIGAGICASYQTQTNSPRRARSVASQSIIAYTMSLGAENSVAYSNNSIAIPTNFTISVTTEILPVSMTKTSVDCTMYICGDSTECSNLLLQYGSFCTQLNRALTGIAVEQDKNTQEVFAQVKQIYKTPPIKDFGGFNFSQILPDPSKPSKRSFIEDLLFNKVTLADAGFIKQYGDCLGDIAARDLICAQKFNGLTVLPPLLTDEMIAQYTSALLAGTITSGWTFGAGAALQIPFAMQMAYRFNGIGVTQNVLYENQKLIANQFNSAIGKIQDSLSSTASALGKLQDVVNQNAQALNTLVKQLSSNFGAISSVLNDILSRLDPPEAEVQIDRLITGRLQSLQTYVTQQLIRAAEIRASANLAATKMSECVLGQSKRVDFCGKGYHLMSFPQSAPHGVVFLHVTYVFAQEKNFTTAPAICHDGKAHFPREGVFVSNGTHWFVTQRNFYEPQIITTDNTFVSGNCDVVIGIVNNTVYDPLQPELDSFKEELDKYFKNHTSPDVDLGDISGINASVVNIQKEIDRLNEVAKNLNESLIDLQELGKYEQYIKGGSGYIPEAPRDGQAYVRKDGEWVLLSTFL

SEQ ID NO: 5866 - protein, 1241 aa, Artificial Sequence
  SARS-CoV-2/France/GE1977/2020__EPI_ISL_414632 spike protein (1-1211)(K986P_V987P_P1069F) Foldon construct
MFVFLVLLPLVSSQCVNLTTRTQLPPAYTNSFTRGVYYPDKVFRSSVLHSTQDLFLPFFSNVTWFHAIHVSGTNGTKRFDNPVLPFNDGVYFASTEKSNIIRGWIFGTTLDSKTQSLLIVNNATNVVIKVCEFQFCNDPFLGVYYHKNNKSWMESEFRVYSSANNCTFEYVSQPFLMDLEGKQGNFKNLREFVFKNIDGYFKIYSKHTPINLVRDLPQGFSALEPLVDLPIGINITRFQTLLALHRSYLTPGDSSSGWTAGAAAYYVGYLQPRTFLLKYNENGTITDAVDCALDPLSETKCTLKSFTVEKGIYQTSNFRVQPTESIVRFPNITNLCPFGEVFNATRFASVYAWNRKRISNCVADYSVLYNSASFSTFKCYGVSPTKLNDLCFTNVYADSFVIRGDEVRQIAPGQTGKIADYNYKLPDDFTGCVIAWNSNNLDSKVGGNYNYLYRLFRKSNLKPFERDISTEIYQAGSTPCNGVEGFNCYFPLQSYGFQPTNGVGYQPYRVVVLSFELLHAPATVCGPKKSTNLVKNKCVNFNFNGLTGTGVLTESNKKFLPFQQFGRDIADTTDAVRDPQTLEILDITPCSFGGVSVITPGTNTSNQVAVLYQGVNCTEVPVAIHADQLTPTWRVYSTGSNVFQTRAGCLIGAEHVNNSYECDIPIGAGICASYQTQTNSPRRARSVASQSIIAYTMSLGAENSVAYSNNSIAIPTNFTISVTTEILPVSMTKTSVDCTMYICGDSTECSNLLLQYGSFCTQLNRALTGIAVEQDKNTQEVFAQVKQIYKTPPIKDFGGFNFSQILPDPSKPSKRSFIEDLLFNKVTLADAGFIKQYGDCLGDIAARDLICAQKFNGLTVLPPLLTDEMIAQYTSALLAGTITSGWTFGAGAALQIPFAMQMAYRFNGIGVTQNVLYENQKLIANQFNSAIGKIQDSLFSTASALGKLQDVVNQNAQALNTLVKQLSSNFGAISSVLNDILSRLDPPEAEVQIDRLITGRLQSLQTYVTQQLIRAAEIRASANLAATKMSECVLGQSKRVDFCGKGYHLMSFPQSAPHGVVFLHVTYVFAQEKNFTTAPAICHDGKAHFPREGVFVSNGTHWFVTQRNFYEPQIITTDNTFVSGNCDVVIGIVNNTVYDPLQPELDSFKEELDKYFKNHTSPDVDLGDISGINASVVNIQKEIDRLNEVAKNLNESLIDLQELGKYEQYIKGGSGYIPEAPRDGQAYVRKDGEWVLLSTFL

SEQ ID NO: 5867 - protein, 1241 aa, Artificial Sequence
  SARS-CoV-2/Finland/FIN-313/2020__EPI_ISL_414641 spike protein (1-1211)(K986P_V987P_P1069F) Foldon construct
MFVFLVLLPLVSSQCVNLTTRTQLPPAYTNSFTRGVYYPDKVFRSSVLHSTQDLFLPFFSNVTWFHAIHVSGTNGTKRFDNPVLPFNDGVYFASTEKSNIIRGWIFGTTLDSKTQSLLIVNNATNVVIKVCEFQFCNDPFLGVYYHKNNKSWMESEFRVYSSANNCTFEYVSQPFLMDLEGKQGNFKNLREFVFKNIDGYFKIYSKHTPINLVRDLPQGFSALEPLVDLPIGINITRFKTLLALHRSYLTPGDSSSGWTAGAAAYYVGYLQPRTFLLKYNENGTITDAVDCALDPLSETKCTLKSFTVEKGIYQTSNFRVQPTESIVRFPNITNLCPFGEVFNATRFASVYAWNRKRISNCVADYSVLYNSASFSTFKCYGVSPTKLNDLCFTNVYADSFVIRGDEVRQIAPGQTGKIADYNYKLPDDFTGCVIAWNSNNLDSKVGGNYNYLYRLFRKSNLKPFERDISTEIYQAGSTPCNGVEGFNCYFPLQSYGFQPTNGVGYQPYRVVVLSFELLHAPATVCGPKKSTNLVKNKCVNFNFNGLTGTGVLTESNKKFLPFQQFGRDIADTTDAVRDPQTLEILDITPCSFGGVSVITPGTNTSNQVAVLYQGVNCTEVPVAIHADQLTPTWRVYSTGSNVFQTRAGCLIGAEHVNNSYECDIPIGAGICASYQTQTNSPRRARSVASQSIIAYTMSLGAENSVAYSNNSIAIPTNFTISVTTEILPVSMTKTSVDCTMYICGDSTECSNLLLQYGSFCTQLNRALTGIAVEQDKNTQEVFAQVKQIYKTPPIKDFGGFNFSQILPDPSKPSKRSFIEDLLFNKVTLADAGFIKQYGDCLGDIAARDLICAQKFNGLTVLPPLLTDEMIAQYTSALLAGTITSGWTFGAGAALQIPFAMQMAYRFNGIGVTQNVLYENQKLIANQFNSAIGKIQDSLSSTASALGKLQDVVNQNAQALNTLVKQLSSNFGAISSVLNDILSRLDPPEAEVQIDRLITGRLQSLQTYVTQQLIRAAEIRASANLAATKMSECVLGQSKRVDFCGKGYHLMSFPQSAPHGVVFLHVTYVFAQEKNFTTAPAICHDGKAHFPREGVFVSNGTHWFVTQRNFYEPQIITTDNTFVSGNCDVVIGIVNNTVYDPLQPELDSFKEELDKYFKNHTSPDVDLGDISGINASVVNIQKEIDRLNEVAKNLNESLIDLQELGKYEQYIKGGSGYIPEAPRDGQAYVRKDGEWVLLSTFL

SEQ ID NO: 5868 - protein, 1241 aa, Artificial Sequence
  SARS-CoV-2/Netherlands/ZuidHolland_2/2020__EPI_ISL_414556 spike protein (1-1211)(K986P_V987P_P1069F) Foldon construct
MFVFLVLLPLVSSQCVNLTTRTQLPPAYTNSFTRGVYYPDKVFRSSVLHSTQDLFLPFFSNVTWFHAIHVSGTNGTKRFDNPVLPFNDGVYFASTEKSNIIRGWIFGTTLDSKTQSLLIVNNATNVVIKVCEFQFCNDPFLGVYYHKNNKSWMESEFRVYSSANNCTFEYVSQPFLMDLEGKQGNFKNLREFVFKNIDGYFKIYSKHTPINLVRDLPQGFSALEPLVDLPIGINITRFQTLLALHRSYLTPGDSSSGWTAGAAAYYVGYLQPRTFLLKYNENGTITDAVDCALDPLSETKCTLKSFTVEKGIYQTSNFRVQPTESIVRFPNITNLCPFGEVFNATRFASVYAWNRKRISNCVADYSVLYNSASFSTFKCYGVSPTKLNDLCFTNVYADSFVIRGDEVRQIAPGQTGKIADYNYKLPDDFTGCVIAWNSNNLDSKVGGNYNYLYRLFRKSNLKPFERDISTEIYQAGSTPCNGVEGFNCYFPLQSYGFQPTNGVGYQPYRVVVLSFELLHAPATVCGPKKSTNLVKNKCVNFNFNGLTGTGVLTESNKKFLPFQQFGRDIADTTDAVRDPQTLEILDITPCSFGGVSVITPGTNTSNQVAVLYQGVNCTEVPVAIHADQLTPTWRVYSTGSNVFQTRAGCLIGAEHVNNSYECDIPIGAGICASYQTQTNSPRRARSVASQSIIAYTMSLGAENSVAYSNNSIAIPTNFTISVTTEILPVSMTKTSVDCTMYICGDSTECSNLLLQYGSFCTQLNRALTGIALEQDKNTQEVFAQVKQIYKTPPIKDFGGFNFSQILPDPSKPSKRSFIEDLLFNKVTLADAGFIKQYGDCLGDIAARDLICAQKFNGLTVLPPLLTDEMIAQYTSALLAGTITSGWTFGAGAALQIPFAMQMAYRFNGIGVTQNVLYENQKLIANQFNSAIGKIQDSLSSTASALGKLQDVVNQNAQALNTLVKQLSSNFGAISSVLNDILSRLDPPEAEVQIDRLITGRLQSLQTYVTQQLIRAAEIRASANLAATKMSECVLGQSKRVDFCGKGYHLMSFPQSAPHGVVFLHVTYVFAQEKNFTTAPAICHDGKAHFPREGVFVSNGTHWFVTQRNFYEPQIITTDNTFVSGNCDVVIGIVNNTVYDPLQPELDSFKEELDKYFKNHTSPDVDLGDISGINASVVNIQKEIDRLNEVAKNLNESLIDLQELGKYEQYIKGGSGYIPEAPRDGQAYVRKDGEWVLLSTFL

SEQ ID NO: 5869 - protein, 1241 aa, Artificial Sequence
  SARS-CoV-2/USA/WA-UW31/2020__EPI_ISL_414618 spike protein (1-1211)(K986P_V987P_P1069F) Foldon construct
MFVFLVLLPLVSSQCVNLTTRTQLPPAYTNSFTRGVYYPDKVFRSSVLHSTQDLFLPFFSNVTWFHAIHVSGTNGTKRFDNPVLPFNDGVYFASTEKSNIIRGWIFGTTLDSKTQSLLIVNNATNVVIKVCEFQFCNDPFLGVYYHKNNKSWMESEFRVYSSANNCTFEYVSQPFLMDLEGKQGNFKNLREFVFKNIDGYFKIYSKHTPINLVRDLPQGFSALEPLVDLPIGINITRFQTLLALHRSYLTPGDSSSGWTAGAAAYYVGYLQPRTFLLKYNENGTITDAVDCALDPLSETKCTLKSFTVEKGIYQTSNFRVQPTESIVRFPNITNLCPFGEVFNATRFASVYAWNRKRISNCVADYSVLYNSASFSTFKCYGVSPTKLNDLCFTNVYADSFVIRGDEVRQIAPGQTGKIADYNYKLPDDFTGCVIAWNSNNLDSKVGGNYNYLYRLFRKSNLKPFERDISTEIYQAGSTPCNGAEGFNCYFPLQSYGFQPTNGVGYQPYRVVVLSFELLHAPATVCGPKKSTNLVKNKCVNFNFNGLTGTGVLTESNKKFLPFQQFGRDIADTTDAVRDPQTLEILDITPCSFGGVSVITPGTNTSNQVAVLYQDVNCTEVPVAIHADQLTPTWRVYSTGSNVFQTRAGCLIGAEHVNNSYECDIPIGAGICASYQTQTNSPRRARSVASQSIIAYTMSLGAENSVAYSNNSIAIPTNFTISVTTEILPVSMTKTSVDCTMYICGDSTECSNLLLQYGSFCTQLNRALTGIAVEQDKNTQEVFAQVKQIYKTPPIKDFGGFNFSQILPDPSKPSKRSFIEDLLFNKVTLADAGFIKQYGDCLGDIAARDLICAQKFNGLTVLPPLLTDEMIAQYTSALLAGTITSGWTFGAGAALQIPFAMQMAYRFNGIGVTQNVLYENQKLIANQFNSAIGKIQDSLSSTASALGKLQDVVNQNAQALNTLVKQLSSNFGAISSVLNDILSRLDPPEAEVQIDRLITGRLQSLQTYVTQQLIRAAEIRASANLAATKMSECVLGQSKRVDFCGKGYHLMSFPQSAPHGVVFLHVTYVFAQEKNFTTAPAICHDGKAHFPREGVFVSNGTHWFVTQRNFYEPQIITTDNTFVSGNCDVVIGIVNNTVYDPLQPELDSFKEELDKYFKNHTSPDVDLGDISGINASVVNIQKEIDRLNEVAKNLNESLIDLQELGKYEQYIKGGSGYIPEAPRDGQAYVRKDGEWVLLSTFL

SEQ ID NO: 5870 - protein, 1241 aa, Artificial Sequence
  SARS-CoV-2/South Korea/SNU01/2020__EPI_ISL_411929 spike protein (1-1211)(K986P_V987P_P1069F) Foldon construct
MFVFLVLLPLVSSQCVNLTTRTQLPPAYTNSFTRGVYYPDKVFRSSVLHSTQDLFLPFFSNVTWFHAIHVSGTNGTKRFDNPVLPFNDGVYFASTEKSNIIRGWIFGTTLDSKTQSLLIVNNATNVVIKVCEFQFCNDPFLGVYYHKNNKSWMESEFRVYSSANNCTFEYVSQPFLMDLEGKQGNFKNLREFVFKNIDGYFKIYSKHTPINLVRDLPQGFWALEPLVDLPIGINITRFQTLLALHRSYLTPGDSSSGWTAGAAAYYVGYLQPRTFLLKYNENGTITDAVDCALDPLSETKCTLKSFTVEKGIYQTSNFRVQPTESIVRFPNITNLCPFGEVFNATRFASVYAWNRKRISNCVADYSVLYNSASFSTFKCYGVSPTKLNDLCFTNVYADSFVIRGDEVRQIAPGQTGKIADYNYKLPDDFTGCVIAWNSNNLDSKVGGNYNYLYRLFRKSNLKPFERDISTEIYQAGSTPCNGVEGFNCYFPLQSYGFQPTNGVGYQPYRVVVLSFELLHAPATVCGPKKSTNLVKNKCVNFNFNGLTGTGVLTESNKKFLPFQQFGRDIADTTDAVRDPQTLEILDITPCSFGGVSVITPGTNTSNQVAVLYQDVNCTEVPVAIHADQLTPTWRVYSTGSNVFQTRAGCLIGAEHVNNSYECDIPIGAGICASYQTQTNSPRRARSVASQSIIAYTMSLGAENSVAYSNNSIAIPTNFTISVTTEILPVSMTKTSVDCTMYICGDSTECSNLLLQYGSFCTQLNRALTGIAVEQDKNTQEVFAQVKQIYKTPPIKDFGGFNFSQILPDPSKPSKRSFIEDLLFNKVTLADAGFIKQYGDCLGDIAARDLICAQKFNGLTVLPPLLTDEMIAQYTSALLAGTITSGWTFGAGAALQIPFAMQMAYRFNGIGVTQNVLYENQKLIANQFNSAIGKIQDSLSSTASALGKLQDVVNQNAQALNTLVKQLSSNFGAISSVLNDILSRLDPPEAEVQIDRLITGRLQSLQTYVTQQLIRAAEIRASANLAATKMSECVLGQSKRVDFCGKGYHLMSFPQSAPHGVVFLHVTYVFAQEKNFTTAPAICHDGKAHFPREGVFVSNGTHWFVTQRNFYEPQIITTDNTFVSGNCDVVIGIVNNTVYDPLQPELDSFKEELDKYFKNHTSPDVDLGDISGINASVVNIQKEIDRLNEVAKNLNESLIDLQELGKYEQYIKGGSGYIPEAPRDGQAYVRKDGEWVLLSTFL

SEQ ID NO: 5871 - protein, 1241 aa, Artificial Sequence
  SARS-CoV-2/China/WF0004/2020__EPI_ISL_413694 spike protein (1-1211)(K986P_V987P_P1069F) Foldon construct
MFVFLVLLPLVSSQCVNLTTRTQLPPAYTNSFTRGVYYPDKVFRSSVLHSTQDLFLPFFSNVTWFHAIHVSGTNGTKRFDNPVLPFNDGVYFASTEKSNIIRGWIFGTTLDSKTQSLLIVNNATNVVIKVCEFQFCNDPFLGVYYHKNNKSWTESEFRVYSSANNCTFEYVSQPFLMDLEGKQGNFKNLREFVFKNIDGYFKIYSKHTPINLVRDLPQGFSALEPLVDLPIGINITRFQTLLALHRSYLTPGDSSSGWTAGAAAYYVGYLQPRTFLLKYNENGTITDAVDCALDPLSETKCTLKSFTVEKGIYQTSNFRVQPTESIVRFPNITNLCPFGEVFNATRFASVYAWNRKRISNCVADYSVLYNSASFSTFKCYGVSPTKLNDLCFTNVYADSFVIRGDEVRQIAPGQTGKIADYNYKLPDDFTGCVIAWNSNNLDSKVGGNYNYLYRLFRKSNLKPFERDISTEIYQAGSTPCNGVEGFNCYFPLQSYGFQPTNGVGYQPYRVVVLSFELLHAPATVCGPKKSTNLVKNKCVNFNFNGLTGTGVLTESNKKFLPFQQFGRDIADTTDAVRDPQTLEILDITPCSFGGVSVITPGTNTSNQVAVLYQDVNCTEVPVAIHADQLTPTWRVYSTGSNVFQTRAGCLIGAEHVNNSYECDIPIGAGICASYQTQTNSPRRARSVASQSIIAYTMSLGAENSVAYSNNSIAIPTNFTISVTTEILPVSMTKTSVDCTMYICGDSTECSNLLLQYGSFCTQLNRALTGIAVEQDKNTQEVFAQVKQIYKTPPIKDFGGFNFSQILPDPSKPSKRSFIEDLLFNKVTLADAGFIKQYGDCLGDIAARDLICAQKFNGLTVLPPLLTDEMIAQYTSALLAGTITSGWTFGAGAALQIPFAMQMAYRFNGIGVTQNVLYENQKLIANQFNSAIGKIQDSLSSTASALGKLQDVVNQNAQALNTLVKQLSSNFGAISSVLNDILSRLDPPEAEVQIDRLITGRLQSLQTYVTQQLIRAAEIRASANLAATKMSECVLGQSKRFDFCGKGYHLMSFPQSAPHGVVFLHVTYVFAQEKNFTTAPAICHDGKAHFPREGVFVSNGTHWFVTQRNFYEPQIITTDNTFVSGNCDVVIGIVNNTVYDPLQPELDSFKEELDKYFKNHTSPDVDLGDISGINASVVNIQKEIDRLNEVAKNLNESLIDLQELGKYEQYIKGGSGYIPEAPRDGQAYVRKDGEWVLLSTFL

SEQ ID NO: 5872 - protein, 1241 aa, Artificial Sequence
  SARS-CoV-2/China/WF0028/2020__EPI_ISL_413791 spike protein (1-1211)(K986P_V987P_P1069F) Foldon construct
MFVFLVLLPLVSSQCVNLTTRTQLPPAYTNSFTRGVYYPDKVFRSSVLHSTQDLFLPFFSNVTWFHAIHVSGTNGTKRFDNPVLPFNDGVYFASTEKSNIIRGWIFGTTLDSKTQSLLIVNNATNVVIKVCEFQFCNDPFLGVYYHKNNKSWMESEFRVYSSANNCTFEYVSQPFLMDLEGKQGNFKNLREFVFKNIDGYFKIYSKHTPINLVRDLPQGFSALEPLVDLPIGINITRFQTLLALHRSYLTPGDSSSGWTAGAAAYYVGYLQPRTFLLKYNENGTITDAVDCALDPLSETKCTLKSFTVEKGIYQTSNFRVQPTESIVRFPNITNLCPFGEVFNATRFASVYAWNRKRISNCVADYSVLYNSASFSTFKCYGVSPTKLNDLCFTNVYADSFVIRGDEVRQIAPGQTGKIADYNYKLPDDFTGCVIAWNSNNLDSKVGGNYNYLYRLFRKSNLKPFERDISTEIYQAGSTPCNGVEGFNCYFPLQSYGFQPTNGVGYQPYRVVVLSFELLHAPATVCGPKKSTNLVKNKCVNFNFNGLTGTGVLTESNKKFLPFQQFGRDIADTTDAVRDPQTLEILDITPCSFGGVSVITPGTNTSNQVAVLYQDVNCTEVPVAIHADQLTPTWRVYSTGSNVFQTRAGCLIGAEHVNNSYECDIPIGAGICASYQTQTNSPRRARSVASQSIIAYTMSLGAENSVAYSNNSIAIPTNFTISVTTEILPVSMTKTSVDCTMYICGDSTECSNLLLQYGSFCTQLNRALTGIAVEQDKNTQEVFAQVKQIYKTPPIKDFGGFNFSQILPDPSKPSKRSFIEDLLFNKVTLADAGFIKQYGDCLGDIAARDLICAQKFNGLTVLPPLLTDEMIAQYTSALLAGTITSGWTFGAGAALQIPFAMQMAYRFNGIGVTQNVLYENQKLIANQFNSAIGKIQDSLSSTASALGKLQDVVNQNAQALNTLVKQLSSNFGAISSVLNDILSRLDPPEAEVQIDRLITGRLQSLQTYVTQQLIRAAEIRASANLAATKMSECVLGQSKRVDFCGKGYHLMSFPQSAPHGVVFLHVTYVFAQEKNFTTAPAICHDGKAHFPREGVFVSNGTHWFVTQRNFYEPQIITTDNTFVSGNCDVVIGIVNNTVYDPLQPELESFKEELDKYFKNHTSPDVDLGDISGINASVVNIQKEIDRLNEVAKNLNESLIDLQELGKYEQYIKGGSGYIPEAPRDGQAYVRKDGEWVLLSTFL

SEQ ID NO: 5873 - protein, 1241 aa, Artificial Sequence
  SARS-CoV-2/2019-nCoV/USA-CruiseA-18/2020__MT159716.1 spike protein (1-1211)(K986P_V987P_P1069F) Foldon construct
MFVFLVLLPLVSSQCVNLTTRTQLPPAYTNSFTRGVYYPDKVFRSSVLHSTQDLFLPFFSNVTWFHAIHVSGTNGTKRFDNPVLPFNDGVYFASTEKSNIIRGWIFGTTLDSKTQSLLIVNNATNVVIKVCEFQFCNDPFLGVYYHKNNKSWMESELRVYSSANNCTFEYVSQPFLMDLEGKQGNFKNLREFVFKNIDGYFKIYSKHTPINLVRDLPQGFSALEPLVDLPIGINITRFQTLLALHRSYLTPGDSSSGWTAGAAAYYVGYLQPRTFLLKYNENGTITDAVDCALDPLSETKCTLKSFTVEKGIYQTSNFRVQPTESIVRFPNITNLCPFGEVFNATRFASVYAWNRKRISNCVADYSVLYNSASFSTFKCYGVSPTKLNDLCFTNVYADSFVIRGDEVRQIAPGQTGKIADYNYKLPDDFTGCVIAWNSNNLDSKVGGNYNYLYRLFRKSNLKPFERDISTEIYQAGSTPCNGVEGFNCYFPLQSYGFQPTNGVGYQPYRVVVLSFELLHAPATVCGPKKSTNLVKNKCVNFNFNGLTGTGVLTESNKKFLPFQQFGRDIADTTDAVRDPQTLEILDITPCSFGGVSVITPGTNTSNQVAVLYQDVNCTEVPVAIHADQLTPTWRVYSTGSNVFQTRAGCLIGAEHVNNSYECDIPIGAGICASYQTQTNSPRRARSVASQSIIAYTMSLGAENSVAYSNNSIAIPTNFTISVTTEILPVSMTKTSVDCTMYICGDSTECSNLLLQYGSFCTQLNRALTGIAVEQDKNTQEVFAQVKQIYKTPPIKDFGGFNFSQILPDPSKPSKRSFIEDLLFNKVTLADAGFIKQYGDCLGDIAARDLICAQKFNGLTVLPPLLTDEMIAQYTSALLAGTITSGWTFGAGAALQIPFAMQMAYRFNGIGVTQNVLYENQKLIANQFNSAIGKIQDSLSSTASALGKLQDVVNQNAQALNTLVKQLSSNFGAISSVLNDILSRLDPPEAEVQIDRLITGRLQSLQTYVTQQLIRAAEIRASANLAATKMSECVLGQSKRVDFCGKGYHLMSFPQSAPHGVVFLHVTYVFAQEKNFTTAPAICHDGKAHFPREGVFVSNGTHWFVTQRNFYEPQIITTDNTFVSGNCDVVIGIVNNTVYDPLQPELDSFKEELDKYFKNHTSPDVDLGDISGINASVVNIQKEIDRLNEVAKNLNESLIDLQELGKYEQYIKGGSGYIPEAPRDGQAYVRKDGEWVLLSTFL

SEQ ID NO: 5874 - protein, 1241 aa, Artificial Sequence
  SARS-CoV-2/SARS-CoV-2/Yunnan-01/human/2020/CHN__MT049951.1 spike protein (1-1211)(K986P_V987P_P1069F) Foldon construct
MFVFLVLLPLVSSQCVNLTTRTQLPPANTNSFTRGVYYPDKVFRSSVLHSTQDLFLPFFSNVTWFHAIHVSGTNGTKRFDNPVLPFNDGVYFASTEKSNIIRGWIFGTTLDSKTQSLLIVNNATNVVIKVCEFQFCNDPFLGVYYHKNNKSWMESEFRVYSSANNCTFEYVSQPFLMDLEGKQGNFKNLREFVFKNIDGYFKIYSKHTPINLVRDLPQGFSALEPLVDLPIGINITRFQTLLALHRSYLTPGDSSSGWTAGAAAYYVGYLQPRTFLLKYNENGTITDAVDCALDPLSETKCTLKSFTVEKGIYQTSNFRVQPTESIVRFPNITNLCPFGEVFNATRFASVYAWNRKRISNCVADYSVLYNSASFSTFKCYGVSPTKLNDLCFTNVYADSFVIRGDEVRQIAPGQTGKIADYNYKLPDDFTGCVIAWNSNNLDSKVGGNYNYLYRLFRKSNLKPFERDISTEIYQAGSTPCNGVEGFNCYFPLQSYGFQPTNGVGYQPYRVVVLSFELLHAPATVCGPKKSTNLVKNKCVNFNFNGLTGTGVLTESNKKFLPFQQFGRDIADTTDAVRDPQTLEILDITPCSFGGVSVITPGTNTSNQVAVLYQDVNCTEVPVAIHADQLTPTWRVYSTGSNVFQTRAGCLIGAEHVNNSYECDIPIGAGICASYQTQTNSPRRARSVASQSIIAYTMSLGAENSVAYSNNSIAIPTNFTISVTTEILPVSMTKTSVDCTMYICGDSTECSNLLLQYGSFCTQLNRALTGIAVEQDKNTQEVFAQVKQIYKTPPIKDFGGFNFSQILPDPSKPSKRSFIEDLLFNKVTLADAGFIKQYGDCLGDIAARDLICAQKFNGLTVLPPLLTDEMIAQYTSALLAGTITSGWTFGAGAALQIPFAMQMAYRFNGIGVTQNVLYENQKLIANQFNSAIGKIQDSLSSTASALGKLQDVVNQNAQALNTLVKQLSSNFGAISSVLNDILSRLDPPEAEVQIDRLITGRLQSLQTYVTQQLIRAAEIRASANLAATKMSECVLGQSKRVDFCGKGYHLMSFPQSAPHGVVFLHVTYVFAQEKNFTTAPAICHDGKAHFPREGVFVSNGTHWFVTQRNFYEPQIITTDNTFVSGNCDVVIGIVNNTVYDPLQPELDSFKEELDKYFKNHTSPDVDLGDISGINASVVNIQKEIDRLNEVAKNLNESLIDLQELGKYEQYIKGGSGYIPEAPRDGQAYVRKDGEWVLLSTFL

SEQ ID NO: 5875 - protein, 1241 aa, Artificial Sequence
  SARS-CoV-2/USA/WA-UW292/2020__EPI_ISL_418077 spike protein (1-1211)(K986P_V987P_P1069F) Foldon construct
MFVFLVLLPLVSSQCVNLTTRTQLPPAYTNSFTRGVYYPDKVFRSSVLHSTQDLFLPFFSNVTWFHAIHVSGTNGTKRFDNPVLPFNDGVYFASTEKSNIIRGWIFGTTLDSKTQSLLIVNNATNVVIKVCEFQFCNDPFLGVYYHKNNKSWMESEFRVYSSANNCTFEYVSQPFLMDLEGKQGNFKNLREFVFKNIDGYFKIYSKHTPINLVRDLPQGFSALEPLVDLPIGINITRFQTLLALHRSYLTPGDSSSGWTAGAAAYYVGYLQPRTFLLKYNENGTITDAVDCALDPLSETKCTLKSFTVEKGIYQTSNFRVQPTESIVRFPNITNLCPFGEVFNATRFASVYAWNRKRISNCVADYSVLYNSASFSTFKCYGVSPTKLNDLCFTNVYADSFVIRGDEVRQIAPGQTGKIADYNYKLPDDFTGCVIAWNSNNLDSKVGGNYNYLYRLFRKSNLKPFERDISTEIYQASSTPCNGVEGFNCYFPLQSYGFQPTNGVGYQPYRVVVLSFELLHAPATVCGPKKSTNLVKNKCVNFNFNGLTGTGVLTESNKKFLPFQQFGRDIADTTDAVRDPQTLEILDITPCSFGGVSVITPGTNTSNQVAVLYQDVNCTEVPVAIHADQLTPTWRVYSTGSNVFQTRAGCLIGAEHVNNSYECDIPIGAGICASYQTQTNSPRRARSVASQSIIAYTMSLGAENSVAYSNNSIAIPTNFTISVTTEILPVSMTKTSVDCTMYICGDSTECSNLLLQYGSFCTQLNRALTGIAVEQDKNTQEVFAQVKQIYKTPPIKDFGGFNFSQILPDPSKPSKRSFIEDLLFNKVTLADAGFIKQYGDCLGDIAARDLICAQKFNGLTVLPPLLTDEMIAQYTSALLAGTITSGWTFGAGAALQIPFAMQMAYRFNGIGVTQNVLYENQKLIANQFNSAIGKIQDSLSSTASALGKLQDVVNQNAQALNTLVKQLSSNFGAISSVLNDILSRLDPPEAEVQIDRLITGRLQSLQTYVTQQLIRAAEIRASANLAATKMSECVLGQSKRVDFCGKGYHLMSFPQSAPHGVVFLHVTYVFAQEKNFTTAPAICHDGKAHFPREGVFVSNGTHWFVTQRNFYEPQIITTDNTFVSGNCDVVIGIVNNTVYDPLQPELDSFKEELDKYFKNHTSPDVDLGDISGINASVVNIQKEIDRLNEVAKNLNESLIDLQELGKYEQYIKGGSGYIPEAPRDGQAYVRKDGEWVLLSTFL

SEQ ID NO: 5876 - protein, 1241 aa, Artificial Sequence
  SARS-CoV-2/Iceland/192/2020__EPI_ISL_417819 spike protein (1-1211)(K986P_V987P_P1069F) Foldon construct
MFVFFVLLPLVSSQCVNLTTRTQLPPAYTNSFTRGVYYPDKVFRSSVLHSTQDLFLPFFSNVTWFHAIHVSGTNGTKRFDNPVLPFNDGVYFASTEKSNIIRGWIFGTTLDSKTQSLLIVNNATNVVIKVCEFQFCNDPFLGVYYHKNNKSWMESEFRVYSSANNCTFEYVSQPFLMDLEGKQGNFKNLREFVFKNIDGYFKIYSKHTPINLVRDLPQGFSALEPLVDLPIGINITRFQTLLALHRSYLTPGDSSSGWTAGAAAYYVGYLQPRTFLLKYNENGTITDAVDCALDPLSETKCTLKSFTVEKGIYQTSNFRVQPTESIVRFPNITNLCPFGEVFNATRFASVYAWNRKRISNCVADYSVLYNSASFSTFKCYGVSPTKLNDLCFTNVYADSFVIRGDEVRQIAPGQTGKIADYNYKLPDDFTGCVIAWNSNNLDSKVGGNYNYLYRLFRKSNLKPFERDISTEIYQAGSTPCNGVEGFNCYFPLQSYGFQPTNGVGYQPYRVVVLSFELLHAPATVCGPKKSTNLVKNKCVNFNFNGLTGTGVLTESNKKFLPFQQFGRDIADTTDAVRDPQTLEILDITPCSFGGVSVITPGTNTSNQVAVLYQGVNCTEVPVAIHADQLTPTWRVYSTGSNVFQTRAGCLIGAEHVNNSYECDIPIGAGICASYQTQTNSPRRARSVASQSIIAYTMSLGAENSVAYSNNSIAIPTNFTISVTTEILPVSMTKTSVDCTMYICGDSTECSNLLLQYGSFCTQLNRALTGIAVEQDKNTQEVFAQVKQIYKTPPIKDFGGFNFSQILPDPSKPSKRSFIEDLLFNKVTLADAGFIKQYGDCLGDIAARDLICAQKFNGLTVLPPLLTDEMIAQYTSALLAGTITSGWTFGAGAALQIPFAMQMAYRFNGIGVTQNVLYENQKLIANQFNSAIGKIQDSLSSTASALGKLQDVVNQNAQALNTLVKQLSSNFGAISSVLNDILSRLDPPEAEVQIDRLITGRLQSLQTYVTQQLIRAAEIRASANLAATKMSECVLGQSKRVDFCGKGYHLMSFPQSAPHGVVFLHVTYVFAQEKNFTTAPAICHDGKAHFPREGVFVSNGTHWFVTQRNFYEPQIITTDNTFVSGNCDVVIGIVNNTVYDPLQPELDSFKEELDKYFKNHTSPDVDLGDISGINASVVNIQKEIDRLNEVAKNLNESLIDLQELGKYEQYIKGGSGYIPEAPRDGQAYVRKDGEWVLLSTFL

SEQ ID NO: 5877 - protein, 1241 aa, Artificial Sequence
  SARS-CoV-2/Belgium/ULG-6939/2020__EPI_ISL_417020 spike protein (1-1211)(K986P_V987P_P1069F) Foldon construct
MFVFLVLLPLVSSQCVNLTTRTQLPPAYTNSFTRGVYYPDKVFRSSVLHSTQDLFLPFFSNVTWFHAIHVSGTNGTKRFDNPVLPFNDGVYFASTEKSNIIRGWIFGTTLDSKTQSLLIVNNATNVVIKVCEFQFCNDPFLGVYYHKNNKSWMESEFRVYSSANNCTFEYVSQPFLMDLEGKQGNFKNLREFVFKNIDGYFKIYSKHTPINLVRDLPQGFSALEPLVDLPIGINITRFQTLLALHRSYLTPGDSSSGWTAGAAAYYVGYLQPRTFLLKYNENGTITDAVDCALDPLSETKCTLKSFTVEKGIYQTSNFRVQPTESIVRFPNITNLCPFGEVFNATRFASVYAWNRKRISNCVADYSVLYNSASFSTFKCYGVSPTKLNDLCFTNVYADSFVIRGDEVRQIAPGQTGKIADYNYKLPDDFTGCVIAWNSNNLDSKVGGNYNYLYRLFRKSNLKPFERDISTEIYQAGSTPCNGVEGFNCYFPLQSYGFQPTNGVGYQPYRVVVLSFELLHAPATVCGPKKSTNLVKNKCVNFNFNGLTGTGVLTESNKKFLPFQQFGRDIADTTDAVRDPQTLEILDITPCSFGGVSVITPGTNTSNQVAVLYQGVNCTEVPVAIHADQLTPTWRVYSTGSNVFQTRAGCLIGAEHVNNSYECDIPIGAGICASYQTQTNSPRRARSVASQSIIAYTMSLGAENSVVYSNNSIAIPTNFTISVTTEILPVSMTKTSVDCTMYICGDSTECSNLLLQYGSFCTQLNRALTGIAVEQDKNTQEVFAQVKQIYKTPPIKDFGGFNFSQILPDPSKPSKRSFIEDLLFNKVTLADAGFIKQYGDCLGDIAARDLICAQKFNGLTVLPPLLTDEMIAQYTSALLAGTITSGWTFGAGAALQIPFAMQMAYRFNGIGVTQNVLYENQKLIANQFNSAIGKIQDSLSSTASALGKLQDVVNQNAQALNTLVKQLSSNFGAISSVLNDILSRLDPPEAEVQIDRLITGRLQSLQTYVTQQLIRAAEIRASANLAATKMSECVLGQSKRVDFCGKGYHLMSFPQSAPHGVVFLHVTYVFAQEKNFTTAPAICHDGKAHFPREGVFVSNGTHWFVTQRNFYEPQIITTDNTFVSGNCDVVIGIVNNTVYDPLQPELDSFKEELDKYFKNHTSPDVDLGDISGINASVVNIQKEIDRLNEVAKNLNESLIDLQELGKYEQYIKGGSGYIPEAPRDGQAYVRKDGEWVLLSTFL

SEQ ID NO: 5878 - protein, 1241 aa, Artificial Sequence
  SARS-CoV-2/France/HF2496/2020__EPI_ISL_418231 spike protein (1-1211)(K986P_V987P_P1069F) Foldon construct
MFVFLVLLPLVSSQCVNLTTRTQLPPAYTNSFTRGVYYPDKVFRSSVLHSTQDLFLPFFSNVTWFHAIHVSGTNGTKRFDNPVLPFNDGVYFASTEKSNIIRGWIFGTTLDSKTQSLLIVNNATNVVIKVCEFQFCNDPFLGVYYHKNNKSWMESEFRVYSSANNCTFEYVSQPFLMDLEGKQGNFKNLREFVFKNIDGYFKIYSKHTPINLVRDLPQGFSALEPLVDLPIGINITRFQTLLALHRSYLTPGDSSSGWTAGAAAYYVGYLQPRTFLLKYNENGTITDAVDCALDPLSETKCTLKSFTVEKGIYQTSNFRVQPTESIVRFPNITNLCPFGEVFNATRFASVYAWNRKRISNCVADYSVLYNSASFSTFKCYGVSPTKLNDLCFTNVYADSFVIRGDEVRQIAPGQTGKIADYNYKLPDDFTGCVIAWNSNNLDSKVGGNYNYLYRLFRKSNLKPFERDISTEIYQAGSTPCNGVEGFNCYFPLQSYGFQPTNGVGYQPYRVVVLSFELLHAPATVCGPKKSTNLVKNKCVNFNFNGLTGTGVLTESNKKFLPFQQFGRDIADTTDAVRDPQTLEILDITPCSFGGVSVITPGTNTSNQVAVLYQGVNCTEVPVAIHADQLTPTWRVYSTGSNVFQTRAGCLIGAEHVNNSYECDIPIGAGICASYQTQTNSPRRARSVASQSIIAYTMSLGAENSVAYSNNSIAIPTNFTISVTTEILPVSMTKTSVDCTMYICGDSTECSNLLLQYGSFCTQLNRALTGIAVEQDKNTQEVFAQVKQIYKTPPIKDFGGFNFSQILPDPSKPSKRSFIEDLLFNKVTLADAGFIKQYGDCLGDIVARDLICAQKFNGLTVLPPLLTDEMIAQYTSALLAGTITSGWTFGAGAALQIPFAMQMAYRFNGIGVTQNVLYENQKLIANQFNSAIGKIQDSLSSTASALGKLQDVVNQNAQALNTLVKQLSSNFGAISSVLNDILSRLDPPEAEVQIDRLITGRLQSLQTYVTQQLIRAAEIRASANLAATKMSECVLGQSKRVDFCGKGYHLMSFPQSAPHGVVFLHVTYVFAQEKNFTTAPAICHDGKAHFPREGVFVSNGTHWFVTQRNFYEPQIITTDNTFVSGNCDVVIGIVNNTVYDPLQPELDSFKEELDKYFKNHTSPDVDLGDISGINASVVNIQKEIDRLNEVAKNLNESLIDLQELGKYEQYIKGGSGYIPEAPRDGQAYVRKDGEWVLLSTFL

SEQ ID NO: 5879 - protein, 1241 aa, Artificial Sequence
  SARS-CoV-2/USA/WA-UW291/2020__EPI_ISL_418076 spike protein (1-1211)(K986P_V987P_P1069F) Foldon construct
MFVFLVLLPLVSSQCVNLTTRTQLPPAYTNSFTRGVYYPDKVFRSSVLHSTQDLFLPFFSNVTWFHAIHVSGTNGTKRFDNPVLPFNDGVYFASTEKSNIIRGWIFGTTLDSKTQSLLIVNNATNVVIKVCEFQFCNDPFLGVYYHKNNKSWMESEFRVYSSANNCTFEYVSQPFLMDLEGKQGNFKNLREFVFKNIDGYFKIYSKHTPINLVRDLPQGFSALEPLVDLPIGINITRFQTLLALHRSYLTPGDSSSGWTAGAAAYYVGYLQPRTFLLKYNENGTITDAVDCALDPLSETKCTLKSFTVEKGIYQTSNFRVQPTESIVRFPNITNLCPFGEVFNATRFASVYAWNRKRISNCVADYSVLYNSASFSTFKCYGVSPTKLNDLCFTNVYADSFVIRGDEVRQIAPGQTGKIADYNYKLPDDFTGCVIAWNSNNLDSKVGGNYNYLYRLFRKSNLKPFERDISTEIYQAGSTPCNGVEGFNCYFPLQSYGFQPTNGVGYQPYRVVVLSFELLHAPATVCGPKKSTNLVKNKCVNFNFNGLTGTGVLTESNKKFLPFQQFGRDIADTTDAVRDPQTLEILDITPCSFGGVSVITPGTNTSNQVAVLYQGVNCTEVPVAIHADQLTPTWRVYSTGSNVFQTRAGCLIGAEHVNNSYECDIPIGAGICASYQTQTNSPRRARSVASQSIIAYTMSLGAENSVAYSNNSIAIPTNFTISVTTEILPVSMTKTSVDCTMYICGDSTECSNLLLQYGSFCTQLNRALTGIAVEQDKNTQEVFAQVKQIYKTPPIKDFGGFNFSQILPDPSKPSKRSFIEDLLFNKVTLADAGFIKQYGDCLGDIAARDLICAQKFNGLTVLPPLLTDEMIAQYTSALLAGTITSGWTFGAGAALQIPFAMQMAYRFNGIGVTQNVLYENQKLIANQFNSAIGKIQYSLSSTASALGKLQDVVNQNAQALNTLVKQLSSNFGAISSVLNDILSRLDPPEAEVQIDRLITGRLQSLQTYVTQQLIRAAEIRASANLAATKMSECVLGQSKRVDFCGKGYHLMSFPQSAPHGVVFLHVTYVFAQEKNFTTAPAICHDGKAHFPREGVFVSNGTHWFVTQRNFYEPQIITTDNTFVSGNCDVVIGIVNNTVYDPLQPELDSFKEELDKYFKNHTSPDVDLGDISGINASVVNIQKEIDRLNEVAKNLNESLIDLQELGKYEQYIKGGSGYIPEAPRDGQAYVRKDGEWVLLSTFL

SEQ ID NO: 5880 - protein, 1241 aa, Artificial Sequence; identical to SEQ ID NO: 5843
  SARS-CoV-2/Portugal/PT0034/2020__EPI_ISL_418019 spike protein (1-1211)(K986P_V987P_P1069F) Foldon construct

SEQ ID NO: 5881 - protein, 1241 aa, Artificial Sequence
  SARS-CoV-2/Iceland/202/2020__EPI_ISL_417750 spike protein (1-1211)(K986P_V987P_P1069F) Foldon construct
MFVFLVLLPLVSSQCVNLTTRTQLPPAYTNSFTRGVYYPDKVFRSSVLHSTQDLFLPFFSNVTWFHAIHVSGTNGTKRFDNPVLPFNDGVYFASTEKSNIIRGWIFGTTLDSKTQSLLIVNNATNVVIKVCEFQFCNDPFLGVYYHKNNKSWMESEFRVYSSANNCTFEYVSQPFLMDLEGKQGNFKNLREFVFKNIDGYFKIYSKHTPINLVRDLPQGFSALEPLVDLPIGINITRFQTLLALHRSYLTPGDSSSGWTAGAAAYYVGYLQPRTFLLKYNENGTITDAVDCALDPLSETKCTLKSFTVEKGIYQTSNFRVQPTESIVRFPNITNLCPFGEVFNATRFASVYAWNRKRISNCVADYSVLYNSASFSTFKCYGVSPTKLNDLCFTNVYADSFVIRGDEVRQIAPGQTGKIADYNYKLPDDFTGCVIAWNSNNLDSKVGGNYNYLYRLFRKSNLKPFERDISTEIYQAGSTPCNGVEGFNCYFPLQSYGFQPTNGVGYQPYRVVVLSFELLHAPATVCGPKKSTNLVKNKCVNFNFNGLTGTGVLTESNKKFLPFQQFGRDIADTTDAVRDPQTLEILDITPCSFGGVSVITPGTNTSNQVAVLYQDVNCTEVPVAIHADQLTPTWRVYSTGSNVFQTRAGCLIGAEHVNNSYECDIPIGAGICASYQTQTNSPRRARSVASQSIIAYTMSLGAENSVAYSNNSIAIPTNFTISVTTEILPVSMTKTSVDCTMYICGDSTECSNLLLQYGSFCTQLNRALTGIAVEQDKNTQEVFAQVKQIYKTPPIKDFGGFNFSQILPDPSKPSKRSFIEDLLFNKVTLADAGFIKQYGDCLGDIAARDLICAQKFNGLTVLPPLLTDEMIAQYTSALLAGTITSGWTFGAGAALQIPFAMQMAYRFNGIGVTQNVLYENQKLIANQFNSAIGKIQDSLSSTASALGKLQDVVNQNAQALNTLVKQLSSNFGAISSVLNDILSRLDPPEAEVQIDRLITGRLQSLQTYVTQQLIRAAEIRASANLAATKMSECVLGQSKRVDFCGKGYHLMSFPQSAPHGVVFLHVTYVFAQEKNFTTAPAICHDGKAHFPREGVFVSNGTHWFVTQRNFYEPQIITTDNTFVSGNCDVVIGIVNNTVYDPLQPELDSFKEELDKYFKNHTSPDVDLGDIPGINASVVNIQKEIDRLNEVAKNLNESLIDLQELGKYEQYIKGGSGYIPEAPRDGQAYVRKDGEWVLLSTFL

SEQ ID NO: 5882 - protein, 1241 aa, Artificial Sequence
  SARS-CoV-2/USA/WA-UW261/2020__EPI_ISL_418046 spike protein (1-1211)(K986P_V987P_P1069F) Foldon construct
MFVFLVLLPLVSSQCVNLTTRTQLPPAYTNSFTRGVYYPDKVFRSSVLHSTQDLFLPFFSNVTWFHAIHVSGTNGTKRFDNPVLPFNDGVYFASTEKSNIIRGWIFGTTLDSKTQSLLIVNNATNVVIKVCEFQFCNDPFLGVYYHKNNKSWMESEFRVYSSANNCTFEYVSQPFLMDLEGKQGNFKNLREFVFKNIDGYFKIYSKHTPINLVRDLPQGFSALEPLVDLPIGINITRFQTLLALHRSYLTPGDSSSGWTAGAAAYYVGYLQPRTFLLKYNENGTITDAVDCALDPLSETKCTLKSFTVEKGIYQTSNFRVQPTESIVRFPNITNLCPFGEVFNATRFTSVYAWNRKRISNCVADYSVLYNSASFSTFKCYGVSPTKLNDLCFTNVYADSFVIRGDEVRQIAPGQTGKIADYNYKLPDDFTGCVIAWNSNNLDSKVGGNYNYLYRLFRKSNLKPFERDISTEIYQAGSTPCNGVEGFNCYFPLQSYGFQPTNGVGYQPYRVVVLSFELLHAPATVCGPKKSTNLVKNKCVNFNFNGLTGTGVLTESNKKFLPFQQFGRDIADTTDAVRDPQTLEILDITPCSFGGVSVITPGTNTSNQVAVLYQDVNCTEVPVAIHADQLTPTWRVYSTGSNVFQTRAGCLIGAEHVNNSYECDIPIGAGICASYQTQTNSPRRARSVASQSIIAYTMSLGAENSVAYSNNSIAIPTNFTISVTTEILPVSMTKTSVDCTMYICGDSTECSNLLLQYGSFCTQLNRALTGIAVEQDKNTQEVFAQVKQIYKTPPIKDFGGFNFSQILPDPSKPSKRSFIEDLLFNKVTLADAGFIKQYGDCLGDIAARDLICAQKFNGLTVLPPLLTDEMIAQYTSALLAGTITSGWTFGAGAALQIPFAMQMAYRFNGIGVTQNVLYENQKLIANQFNSAIGKIQDSLSSTASALGKLQDVVNQNAQALNTLVKQLSSNFGAISSVLNDILSRLDPPEAEVQIDRLITGRLQSLQTYVTQQLIRAAEIRASANLAATKMSECVLGQSKRVDFCGKGYHLMSFPQSAPHGVVFLHVTYVFAQEKNFTTAPAICHDGKAHFPREGVFVSNGTHWFVTQRNFYEPQIITTDNTFVSGNCDVVIGIVNNTVYDPLQPELDSFKEELDKYFKNHTSPDVDLGDISGINASVVNIQKEIDRLNEVAKNLNESLIDLQELGKYEQYIKGGSGYIPEAPRDGQAYVRKDGEWVLLSTFL

SEQ ID NO: 5883 - protein, 1241 aa, Artificial Sequence
  SARS-CoV-2/Portugal/PT0035/2020__EPI_ISL_418020 spike protein (1-1211)(K986P_V987P_P1069F) Foldon construct
MFVFLVLLPLVSSQCVNLTTRTQLPPAYTNSFTRGVYYPDKVFRSSVLHSTQDLFLPFFSNVTWFHAIHVSGTNGTKRFDNPVLPFNDGVYFASTEKSNIIRGWIFGTTLDSKTQSLLIVNNATNVVIKVCEFQFCNDPFLGVYYHKNNKSWMESEFRVYSSANNCTFEYVSQPFLMDLEGKQGNFKNLREFVFKNIDGYFKIYSKHTPINLVRDLPQGFSALEPLVDLPIGINITRFQTLLALHRSYLTPGDSSSGWTAGAAAYYVGYLQPRTFLLKYNENGTITDAVDCALDPLSETKCTLKSFTVEKGIYQTSNFRVQPTESIVRFPNITNLCPFGEVFNATRFASVYAWNRKRISNCVADYSVLYNSASFSTFKCYGVSPTKLNDLCFTNVYADSFVIRGDEVRQIAPGQTGKIADYNYKLPDDFTGCVIAWNSNNLDSKVGGNYNYLYRLFRKSNLKPFERDISTEIYQAGSTPCNGVEGFNCYFPLQSYGFQPTNGVGYQPYRVVVLSFELLHAPATVCGPKKSTNLVKNKCVNFNFNGLTGTGVLTESNKKFLPFQQFGRDIADTTDAVRDPQTLEILDITPCSFGGVSVITPGTNTSNQVAVLYQDVNCTEVPVAIHADQLTPTWRVYSTGSNVFQTRAGCLIGAEHVNNSYECDIPIGAGICASYQTQTNSPRRARSVASQSIIAYTMSLGAENSVAYSNNSIAIPTNFTISVTTEILPVSMTKTSVDCTMYICGDSTECSNLLLQYGSFCTQLNRALTGIAVEQDKNTQEVFAQVKQIYKTPPIKDFGGFNFSQILPDPSKPSKRSFIEDLLFNKVTLADAGFIKQYGDCLGDISARDLICAQKFNGLTVLPPLLTDEMIAQYTSALLAGTITSGWTFGAGAALQIPFAMQMAYRFNGIGVTQNVLYENQKLIANQFNSAIGKIQDSLSSTASALGKLQDVVNQNAQALNTLVKQLSSNFGAISSVLNDILSRLDPPEAEVQIDRLITGRLQSLQTYVTQQLIRAAEIRASANLAATKMSECVLGQSKRVDFCGKGYHLMSFPQSAPHGVVFLHVTYVFAQEKNFTTAPAICHDGKAHFPREGVFVSNGTHWFVTQRNFYEPQIITTDNTFVSGNCDVVIGIVNNTVYDPLQPELDSFKEELDKYFKNHTSPDVDLGDISGINASVVNIQKEIDRLNEVAKNLNESLIDLQELGKYEQYIKGGSGYIPEAPRDGQAYVRKDGEWVLLSTFL

SEQ ID NO: 5884 - protein, 1241 aa, Artificial Sequence
  SARS-CoV-2/USA/NY-NYUMC7/2020__EPI_ISL_418192 spike protein (1-1211)(K986P_V987P_P1069F) Foldon construct
MFVFLVLLPLVSSQCVNLTTRTQLPPAYTNSFTRGVYYPDKVFRSSVLHSTQDLFLPFFSNVTWFHAIHVSGTNGTKRFDNPVLPFNDGVYFASTEKSNIIRGWIFGTTLDSKTQSLLIVNNATNVVIKVCEFQFCNDPFLGVYHHKNNKSWMESEFRVYSSANNCTFEYVSQPFLMDLEGKQGNFKNLREFVFKNIDGYFKIYSKHTPINLVRDLPQGFSALEPLVDLPIGINITRFQTLLALHRSYLTPGDSSSGWTAGAAAYYVGYLQPRTFLLKYNENGTITDAVDCALDPLSETKCTLKSFTVEKGIYQTSNFRVQPTESIVRFPNITNLCPFGEVFNATRFASVYAWNRKRISNCVADYSVLYNSASFSTFKCYGVSPTKLNDLCFTNVYADSFVIRGDEVRQIAPGQTGKIADYNYKLPDDFTGCVIAWNSNNLDSKVGGNYNYLYRLFRKSNLKPFERDISTEIYQAGSTPCNGVEGFNCYFPLQSYGFQPTNGVGYQPYRVVVLSFELLHAPATVCGPKKSTNLVKNKCVNFNFNGLTGTGVLTESNKKFLPFQQFGRDIADTTDAVRDPQTLEILDITPCSFGGVSVITPGTNTSNQVAVLYQGVNCTEVPVAIHADQLTPTWRVYSTGSNVFQTRAGCLIGAEHVNNSYECDIPIGAGICASYQTQTNSPRRARSVASQSIIAYTMSLGAENSVAYSNNSIAIPTNFTISVTTEILPVSMTKTSVDCTMYICGDSTECSNLLLQYGSFCTQLNRALTGIAVEQDKNTQEVFAQVKQIYKTPPIKDFGGFNFSQILPDPSKPSKRSFIEDLLFNKVTLADAGFIKQYGDCLGDIAARDLICAQKFNGLTVLPPLLTDEMIAQYTSALLAGTITSGWTFGAGAALQIPFAMQMAYRFNGIGVTQNVLYENQKLIANQFNSAIGKIQDSLSSTASALGKLQDVVNQNAQALNTLVKQLSSNFGAISSVLNDILSRLDPPEAEVQIDRLITGRLQSLQTYVTQQLIRAAEIRASANLAATKMSECVLGQSKRVDFCGKGYHLMSFPQSAPHGVVFLHVTYVFAQEKNFTTAPAICHDGKAHFPREGVFVSNGTHWFVTQRNFYEPQIITTDNTFVSGNCDVVIGIVNNTVYDPLQPELDSFKEELDKYFKNHTSPDVDLGDISGINASVVNIQKEIDRLNEVAKNLNESLIDLQELGKYEQYIKGGSGYIPEAPRDGQAYVRKDGEWVLLSTFL

SEQ ID NO: 5885 - protein, 1241 aa, Artificial Sequence
  SARS-CoV-2/Iceland/189/2020__EPI_ISL_417709 spike protein (1-1211)(K986P_V987P_P1069F) Foldon construct
MFVFLVLLPLVSSQCVNLTTRTQLPPAYTNSFTRGVYYPDKVFRSSVLHSTQDLFLPFFSNVTWFHAIHVSGTNGTKRFDNPVLPFNDGVYFASTEKSNIIRGWIFGTTLDSKTQSLLIVNNATNVVIKVCEFQFCNDPFLGVYYHKNNKSWMESEFRVYSSANNCTFEYVSQPFLMDLEGKQGNFKNLREFVFKNIDGYFKIYSKHTPINLVRDLPQGFSALEPLVDLPIGINITRFQTLLALHRSYLTPGDSSSGWTAGAAAYYVGYLQPRTFLLKYNENGTITDAVDCALDPLSETKCTLKSFTVEKGIYQTSNFRVQPTESIVRFPNITNLCPFGEVFNATRFASVYAWNRKRISNCVADYSVLYNSASFSTFKCYGVSPTKLNDLCFTNVYADSFVIRGDEVRQIAPGQTGKIADYNYKLPDDFTGCVIAWNSNNLDSKVGGNYNYLYRLFRKSNLKPFERDISTEIYQAGSTPCNGVEGFNCYFPLQSYGFQPTNGVGYQPYRVVVLSFELLHAPATVCGPKKSTNLVKNKCVNFNFNGLTGTGVLTESNKKFLPFQQFGRDIADTTDAVRDPQTLEILDITPCSFGGVSVITPGTNTSNQVAVLYQGVNCTEVPVAIHADQLTPTWRVYSTGSNVFQTRAGCLIGAEHVNNSYECDIPIGAGICASYQTQTNSPRRARSVASQSIIAYTMSLGAENSVAYSNNSIAIPTNFTISVTTEILPVSMTKTSVDCTMYICGDSTECSNLLLQYGSFCTQLNRALTGIAVEQDKNTQEVFAQVKQIYKTPPIKDFGGFNFSQILPDPSKPSKRSFIEDLLFNKVTLADAGFTKQYGDCLGDIAARDLICAQKFNGLTVLPPLLTDEMIAQYTSALLAGTITSGWTFGAGAALQIPFAMQMAYRFNGIGVTQNVLYENQKLIANQFNSAIGKIQDSLSSTASALGKLQDVVNQNAQALNTLVKQLSSNFGAISSVLNDILSRLDPPEAEVQIDRLITGRLQSLQTYVTQQLIRAAEIRASANLAATKMSECVLGQSKRVDFCGKGYHLMSFPQSAPHGVVFLHVTYVFAQEKNFTTAPAICHDGKAHFPREGVFVSNGTHWFVTQRNFYEPQIITTDNTFVSGNCDVVIGIVNNTVYDPLQPELDSFKEELDKYFKNHTSPDVDLGDISGINASVVNIQKEIDRLNEVAKNLNESLIDLQELGKYEQYIKGGSGYIPEAPRDGQAYVRKDGEWVLLSTFL

SEQ ID NO: 5886 - protein, 1241 aa, Artificial Sequence
  SARS-CoV-2/Australia/NSW56/2020__EPI_ISL_417408 spike protein (1-1211)(K986P_V987P_P1069F) Foldon construct
MFVFLVLLPLVSSQCVNLTTRTQLPPAYTNSFTRGVYYPDKVFRSSVLHSTQDLFLPFFSNVTWFHAIHVSGTNGTKRFDNPVLPFNDGVYFASTEKSNIIRGWIFGTTLDSKTQSLLIVNNATNVVIKVCEFQFCNDPFLGVYYHKNNKSWMESEFRVYSSANNCTFEYVSQPFLMDLEGKQGNFKNLREFVFKNIDGYFKIYSKHTPINLVRDLPQGFSALEPLVDLPIGINITRFQTLLALHRSYLTPGDSSSGWTAGAAAYYVGYLQPRTFLLKYNENGTITDAVDCALDPLSETKCTLKSFTVEKGIYQTSNFRVQPTESIVRFPNITNLCPFGEVFNATRFASVYAWNRKRISNCVADYSVLYNSASFSTFKCYGVSPTKLNDLCFTNVYADSFVIRGDEVRQIAPGQTGKIADYNYKLPDDFTGCVIAWNSNNLDSKVGGNYNYLYRLFRKSNLKPFERDISTEIYQAGSTPCNGVEGFNCYFPLQSYGFQPTNGVGYQPYRVVVLSFELLHAPATVCGPKKSTNLVKNKCVNFNFNGLTGTGVLTESNKKFLPFQQFGRDIADTTDAVRDPQTLEILDITPCSFGGVSVITPGTNTSNQVAVLYQDVNCTEVPVAIHADQLTPTWRVYSTGSNVFQTRAGCLIGAEHVNNSYECDIPIGAGICASYQTQTNSPRRARSVASQSIIAYTMSLGAENSVAYSNNSIAIPTNFTISVTTEILPVSMTKTSVDCTMYICGDSTECSNLLLQYGSFCTQLNRALTGIAVEQDKNTQEVFAQVKQIYKTPPIKDFGGFNFSQILPDSSKPSKRSFIEDLLFNKVTLADAGFIKQYGDCLGDIAARDLICAQKFNGLTVLPPLLTDEMIAQYTSALLAGTITSGWTFGAGAALQIPFAMQMAYRFNGIGVTQNVLYENQKLIANQFNSAIGKIQDSLSSTASALGKLQDVVNQNAQALNTLVKQLSSNFGAISSVLNDILSRLDPPEAEVQIDRLITGRLQSLQTYVTQQLIRAAEIRASANLAATKMSECVLGQSKRVDFCGKGYHLMSFPQSAPHGVVFLHVTYVFAQEKNFTTAPAICHDGKAHFPREGVFVSNGTHWFVTQRNFYEPQIITTDNTFVSGNCDVVIGIVNNTVYDPLQPELDSFKEELDKYFKNHTSPDVDLGDISGINASVVNIQKEIDRLNEVAKNLNESLIDLQELGKYEQYIKGGSGYIPEAPRDGQAYVRKDGEWVLLSTFL

SEQ ID NO: 5887 - protein, 1241 aa, Artificial Sequence
  SARS-CoV-2/Iceland/280/2020__EPI_ISL_417608 spike protein (1-1211)(K986P_V987P_P1069F) Foldon construct
MFVFLVLLPLVSSQCVNLTTRTQLPPAYTNSFTRGVYYPDKVFRSSVLHSTQDLFLPFFSNVTWFHAIHVSGTNGTKRFDNPVLPFNDGVYFASTEKSNIIRGWIFGTTLDSKTQSLLIVNNATNVVIKVCEFQFCNDPFLGVYYHKNNKSWMESEFRVYSSANNCTFEYVSQPFLMDLEGKQGNFKNLREFVFKNIDGYFKIYSKHTPINLVRDLPQGFSALEPLVDLPIGINITRFQTLLALHRSYLTPGDSSSGWTAGAAAYYVGYLQPRTFLLKYNENGTITDAVDCALDPLSETKCTLKSFTVEKGIYQTSNFRVQPTESIVRFPNITNLCPFGEVFNATRFASVYAWNRKRISNCVADYSVLYNSASFSTFKCYGVSPTKLNDLCFTNVYADSFVIRGDEVRQIAPGQTGKIADYNYKLPDDFTGCVIAWNSNNLDSKVGGNYNYLYRLFRKSNLKPFERDISTEIYQAGSTPCNGVEGFNCYFPLQSYGFQPTNGVGYQPYRVVVLSFELLHAPATVCGPKKSTNLVKNKCVNFNFNGLTGTGVLTESNKKFLPFQQFGRDIADTTDAVRDPQTLEILDITPCSFGGVSVITPGTNTSNQVAVLYQGVNCTEVPVAIHADQLTPTWRVYSTGSNVFQTRAGCLIGAEHVNNSYECDIPIGAGICASYHTQTNSPRRARSVASQSIIAYTMSLGAENSVAYSNNSIAIPTNFTISVTTEILPVSMTKTSVDCTMYICGDSTECSNLLLQYGSFCTQLNRALTGIAVEQDKNTQEVFAQVKQIYKTPPIKDFGGFNFSQILPDPSKPSKRSFIEDLLFNKVTLADAGFIKQYGDCLGDIAARDLICAQKFNGLTVLPPLLTDEMIAQYTSALLAGTITSGWTFGAGAALQIPFAMQMAYRFNGIGVTQNVLYENQKLIANQFNSAIGKIQDSLSSTASALGKLQDVVNQNAQALNTLVKQLSSNFGAISSVLNDILSRLDPPEAEVQIDRLITGRLQSLQTYVTQQLIRAAEIRASANLAATKMSECVLGQSKRVDFCGKGYHLMSFPQSAPHGVVFLHVTYVFAQEKNFTTAPAICHDGKAHFPREGVFVSNGTHWFVTQRNFYEPQIITTDNTFVSGNCDVVIGIVNNTVYDPLQPELDSFKEELDKYFKNHTSPDVDLGDISGINASVVNIQKEIDRLNEVAKNLNESLIDLQELGKYEQYIKGGSGYIPEAPRDGQAYVRKDGEWVLLSTFL

SEQ ID NO: 5888 - protein, 1241 aa, Artificial Sequence; identical to SEQ ID NO: 5843
  SARS-CoV-2/Iceland/247/2020__EPI_ISL_417575 spike protein (1-1211)(K986P_V987P_P1069F) Foldon construct

SEQ ID NO: 5889 - protein, 1241 aa, Artificial Sequence
  SARS-CoV-2/Iceland/238/2020__EPI_ISL_417566 spike protein (1-1211)(K986P_V987P_P1069F) Foldon construct
MFVFLVLLPLVSSQCVNLTTRTQLPPAYTNSFTRGVYYPDKVFRSSVLHSTQDLFLPFFSNVTWFHAIHVSGTNGTKRFDNPVLPFNDGVYFASTEKSNIIRGWIFGTTLDSKTQSLLIVNNATNVVIKVCEFQFCNDPFLGVYYHKNNKSWMESEFRVYSSANNCTFEYVSQPFLMDLEGKQGNFKNLREFVFKNIDGYFKIYSKHTPINLVRDLPQGFSALEPLVDLPIGINITRFQTLLALHRSYLTPGDSSSGWTAGAAAYYVGYLQPRTFLLKYNENGTITDAVDCALDPLSETKCTLKSFTVEKGIYQTSNFRVQPTESIVRFPNITNLCPFGEVFNATRFASVYAWNRKRISNCVADYSVLYNSASFSTFKCYGVSPTKLNDLCFTNVYADSFVIRGDEVRQIAPGQTGKIADYNYKLPDDFTGCVIAWNSNNLDSKVGGNYNYLYRLFRKSNLKPFERDISTEIYQAGSTPCNGVEGFNCYFPLQSYGFQPTNGVGYQPYRVVVLSFELLHAPATVCGPKKSTNLVKNKCVNFNFNGLTGTGVLTESNKKFLPFQQFGRDIADTTDAVRDPQTLEILDITPCSFGGVSVITPGTNTSNQVAVLYQGVNCTEVPVAIHADQLTPTWRVYSTGSNVFQTRAGCLIGAEHVNNSYECDIPIGAGICASYQTQTNSPRRARSVASQSIIAYTMSLGAENSVAYSNNSIAIPTNFTISVTTEILPVSMTKTSVDCTMYICGDSTECSNLLLQYGSFCTQLNRALTGIAVEQDKNTQEVFAQVKQIYKTPPIKDFGGFNFSQILPDPSKPSKRSFIEDLLFNKVTLADVGFIKQYGDCLGDIAARDLICAQKFNGLTVLPPLLTDEMIAQYTSALLAGTITSGWTFGAGAALQIPFAMQMAYRFNGIGVTQNVLYENQKLIANQFNSAIGKIQDSLSSTASALGKLQDVVNQNAQALNTLVKQLSSNFGAISSVLNDILSRLDPPEAEVQIDRLITGRLQSLQTYVTQQLIRAAEIRASANLAATKMSECVLGQSKRVDFCGKGYHLMSFPQSAPHGVVFLHVTYVFAQEKNFTTAPAICHDGKAHFPREGVFVSNGTHWFVTQRNFYEPQIITTDNTFVSGNCDVVIGIVNNTVYDPLQPELDSFKEELDKYFKNHTSPDVDLGDISGINASVVNIQKEIDRLNEVAKNLNESLIDLQELGKYEQYIKGGSGYIPEAPRDGQAYVRKDGEWVLLSTFL

SEQ ID NO: 5890 - protein, 1241 aa, Artificial Sequence
  SARS-CoV-2/Greece/16/2020__EPI_ISL_418265 spike protein (1-1211)(K986P_V987P_P1069F) Foldon construct
MFVFLVLLPLVSSQCVNLTTRTQLPPAYTNSFTRGVYYPDKVFRSSVLHSTQDLFLPFFSNVTWFHAIHVSGTNGTKRFDNPVLPFNDGVYFASTEKSNIIRGWIFGTTLDSKTQSLLIVNNATNVVIKVCEFQFCNDPFLGVYYHKNNKSWMESEFRVYSSANNCTFEYVSQPFLMDLEGKQGNFKNLREFVFKNVDGYFKIYSKHTPINLVRDLPQGFSALEPLVDLPIGINITRFQTLLALHRSYLTPGDSSSGWTAGAAAYYVGYLQPRTFLLKYNENGTITDAVDCALDPLSETKCTLKSFTVEKGIYQTSNFRVQPTESIVRFPNITNLCPFGEVFNATRFASVYAWNRKRISNCVADYSVLYNSASFSTFKCYGVSPTKLNDLCFTNVYADSFVIRGDEVRQIAPGQTGKIADYNYKLPDDFTGCVIAWNSNNLDSKVGGNYNYLYRLFRKSNLKPFERDISTEIYQAGSTPCNGVEGFNCYFPLQSYGFQPTNGVGYQPYRVVVLSFELLHAPATVCGPKKSTNLVKNKCVNFNFNGLTGTGVLTESNKKFLPFQQFGRDIADTTDAVRDPQTLEILDITPCSFGGVSVITPGTNTSNQVAVLYQDVNCTEVPVAIHADQLTPTWRVYSTGSNVFQTRAGCLIGAEHVNNSYECDIPIGAGICASYQTQTNSPRRARSVASQSIIAYTMSLGAENSVAYSNNSIAIPTNFTISVTTEILPVSMTKTSVDCTMYICGDSTECSNLLLQYGSFCTQLNRALTGIAVEQDKNTQEVFAQVKQIYKTPPIKDFGGFNFSQILPDPSKPSKRSFIEDLLFNKVTLADAGFIKQYGDCLGDIAARDLICAQKFNGLTVLPPLLTDEMIAQYTSALLAGTITSGWTFGAGAALQIPFAMQMAYRFNGIGVTQNVLYENQKLIANQFNSAIGKIQDSLSSTASALGKLQDVVNQNAQALNTLVKQLSSNFGAISSVLNDILSRLDPPEAEVQIDRLITGRLQSLQTYVTQQLIRAAEIRASANLAATKMSECVLGQSKRVDFCGKGYHLMSFPQSAPHGVVFLHVTYVFAQEKNFTTAPAICHDGKAHFPREGVFVSNGTHWFVTQRNFYEPQIITTDNTFVSGNCDVVIGIVNNTVYDPLQPELDSFKEELDKYFKNHTSPDVDLGDISGINASVVNIQKEIDRLNEVAKNLNESLIDLQELGKYEQYIKGGSGYIPEAPRDGQAYVRKDGEWVLLSTFL

SEQ ID NO: 5891 - protein, 1241 aa, Artificial Sequence
  SARS-CoV-2/Iceland/319/2020__EPI_ISL_417648 spike protein (1-1211)(K986P_V987P_P1069F) Foldon construct
MFVFLVLLPLVSSQCVNLTTRTQLPPAYTNSFTRGVYYPDKVFRSSVLHSTQDLFLPFFSNVTWFHAIHVSGTNGTKRFDNPVLPFNDGVYFASTEKSNIIRGWIFGTTLDSKTQSLLIVNNATNVVIKVCEFQFCNDPFLGVYYHKNNKSWMESEFRVYSSANNCTFEYVSQPFLIDLEGKQGNFKNLREFVFKNIDGYFKIYSKHTPINLVRDLPQGFSALEPLVDLPIGINITRFQTLLALHRSYLTPGDSSSGWTAGAAAYYVGYLQPRTFLLKYNENGTITDAVDCALDPLSETKCTLKSFTVEKGIYQTSNFRVQPTESIVRFPNITNLCPFGEVFNATRFASVYAWNRKRISNCVADYSVLYNSASFSTFKCYGVSPTKLNDLCFTNVYADSFVIRGDEVRQIAPGQTGKIADYNYKLPDDFTGCVIAWNSNNLDSKVGGNYNYLYRLFRKSNLKPFERDISTEIYQAGSTPCNGVEGFNCYFPLQSYGFQPTNGVGYQPYRVVVLSFELLHAPATVCGPKKSTNLVKNKCVNFNFNGLTGTGVLTESNKKFLPFQQFGRDIADTTDAVRDPQTLEILDITPCSFGGVSVITPGTNTSNQVAVLYQGVNCTEVPVAIHADQLTPTWRVYSTGSNVFQTRAGCLIGAEHVNNSYECDIPIGAGICASYQTQTNSPRRARSVASQSIIAYTMSLGAENSVAYSNNSIAIPTNFTISVTTEILPVSMTKTSVDCTMYICGDSTECSNLLLQYGSFCTQLNRALTGIAVEQDKNTQEVFAQVKQIYKTPPIKDFGGFNFSQILPDPSKPSKRSFIEDLLFNKVTLADAGFIKQYGDCLGDIAARDLICAQKFNGLTVLPPLLTDEMIAQYTSALLAGTITSGWTFGAGAALQIPFAMQMAYRFNGIGVTQNVLYENQKLIANQFNSAIGKIQDSLSSTASALGKLQDVVNQNAQALNTLVKQLSSNFGAISSVLNDILSRLDPPEAEVQIDRLITGRLQSLQTYVTQQLIRAAEIRASANLAATKMSECVLGQSKRVDFCGKGYHLMSFPQSAPHGVVFLHVTYVFAQEKNFTTAPAICHDGKAHFPREGVFVSNGTHWFVTQRNFYEPQIITTDNTFVSGNCDVVIGIVNNTVYDPLQPELDSFKEELDKYFKNHTSPDVDLGDISGINASVVNIQKEIDRLNEVAKNLNESLIDLQELGKYEQYIKGGSGYIPEAPRDGQAYVRKDGEWVLLSTFL

SEQ ID NO: 5892 - protein, 1241 aa, Artificial Sequence
  SARS-CoV-2/Congo/94/2020__EPI_ISL_417947 spike protein (1-1211)(K986P_V987P_P1069F) Foldon construct
MFVFLVLLPLVSSQCVNLTTRTQLPPAYTNSFTRGVYYPDKVFRSSVLHSTQDLFLPFFSNVTWFHAIHVSGTNGTKRFDNPVLPFNDGVYFASTEKSNIIRGWIFGTTLDSKTQSLLIVNNATNVVIKVCEFQFCNDPFLGVYYHKNNKSWMESEFRVYSSANNCTFEYVSQPFLMDLEGKQGNFKNLREFVFKNIDGYFKIYSKHTPINLVRDLPQGFSALEPLVDLPIGINITRFQTLLALHRSYLTPGDSSSGWTAGAAAYYVGYLQPRTFLLKYNENGTITDAVDCALDPLSETKCTLKSFTVEKGIYQTSNFRVQPTESIVRFPNITNLCPFGEVFNATRFASVYAWNRKRISNCVADYSVLYNSASFSTFKCYGVSPTKLNDLCFTNVYADSFVIRGDEVRQIAPGQTGKIADYNYKLPDDFTGCVIAWNSNNLDSKVGGNYNYLYRLFRKSNLKPFERDISTEIYQAGSTPCNGVEGFNCYFPLQSYGFQPTNGVGYQPYRVVVLSFELLHAPATVCGPKKSTNLVKNKCVNFNFNGLTGTGVLTESNKKFLPFQQFGRDIADTTDAVRDPQTLEILDITPCSFGGVSVITPGTNTSNQVAVLYQGVNCTEVPVAIHADQLTPTWRVYSTGSNVFQTRAGCLIGAEHVNNSYECDIPIGAGICASYQTQTNSPRRARSVASQSIIAYTMSLGAENSVAYSNNSIAIPTNFTISVTTEILPVSMTKTSVDCTMYICGDSTECSNLLLQYGSFCTQLNRALTGIAVEQDKNTQEVFAQVKQIYKTPPIKDFGGFNFSQILPDPSKPSKRSFIEDILFNKVTLADAGFIKQYGDCLGDIAARDLICAQKFNGLTVLPPLLTDEMIAQYTSALLAGTITSGWTFGAGAALQIPFAMQMAYRFNGIGVTQNVLYENQKLIANQFNSAIGKIQDSLSSTASALGKLQDVVNQNAQALNTLVKQLSSNFGAISSVLNDILSRLDPPEAEVQIDRLITGRLQSLQTYVTQQLIRAAEIRASANLAATKMSECVLGQSKRVDFCGKGYHLMSFPQSAPHGVVFLHVTYVFAQEKNFTTAPAICHDGKAHFPREGVFVSNGTHWFVTQRNFYEPQIITTDNTFVSGNCDVVIGIVNNTVYDPLQPELDSFKEELDKYFKNHTSPDVDLGDISGINASVVNIQKEIDRLNEVAKNLNESLIDLQELGKYEQYIKGGSGYIPEAPRDGQAYVRKDGEWVLLSTFL

SEQ ID NO: 5893 - protein, 1241 aa, Artificial Sequence
  SARS-CoV-2/Congo/158/2020__EPI_ISL_417950 spike protein (1-1211)(K986P_V987P_P1069F) Foldon construct
MFVFLVLLPLVSSQCVNLTTRTQLPPAYTNSFTRGVYYPDKVFRSSVLHSTQDLFLPFFSNVTWFHAIHVSGTNGTKRFDNPVLPFNDGVYFASTEKSNIIRGWIFGTTLDSKTQSLLIVNNATNVVIKVCEFQFCNDPFLGVYYHKNNKSWMESEFRVYSSANNCTFEYVSQPFLMDLEGKQGNFKNLREFVFKNIDGYFKIYSKHTPINLVRDLPQGFSALEPLVDLPIGINITRFQTLLALHRSYLTPGDSSSGWTAGAAAYYVGYLQPRTFLLKYNENGTITDAVDCALDPLSETKCTLKSFTVEKGIYQTSNFRVQPTESIVRFPNITNLCPFGEVFNATRFASVYAWNRKRISNCVADYSVLYNSASFSTFKCYGVSPTKLNDLCFTNVYADSFVIRGDEVRQIAPGQTGKIADYNYKLPDDFTGCVIAWNSNNLDSKVGGNYNYLYRLFRKSNLKPFERDISTEIYQAGSTPCNGVEGFNCYFPLQSYGFQPTNGVGYQPYRVVVLSFELLHAPATVCGPKKSTNLVKNKCVNFNFNGLTGTGVLTESNKKFLPFQQFGRDIADTTDAVRDPQTLEILDITPCSFGGVSVITPGTNTSNQVAVLYQDVNCTEVPVAIHADQLTPTWRVYSTGSNVFQTRAGCLIGAEHVNNSYECDIPIGAGICASYQTQTNSPRRARSVASQSIIAYTMSLGAENSVAYSNNSIAIPTNFTISVTTEILPVSMTKTSVDCTMYICGDSTECSNLLLQYGSFCTQLNRALTGIAVEQDKNTQEVFAQVKQIYKTPPIKDFGGFNFSQILPDPSKPSKRSFIEDLLFNKVTLADAGFIKQYGDCLGDIAARDLICAQKFNGLTVLPPLLTDEMIAQYTSALLAGTITSGWTFGAGAALQIPFAMQMAYRFNGIGVTQNVLYENQKLIANQFNSAIGKIQDSLSSTASALGKLQDVVNQNAQALNTLVKQLSSNFGAISSVLNDILSRLDPPEAEVQIDRLITGRLQSLQTYVTQQLIRAAEIRASANLAATKMSECVLGQSKRVDFCGKGYHLMSFPQSAPHGVVFLHVTYVFAQEKNFTTAPAICHDGKAHFPREGVFVSNGTHWFVTQRNFYEPQIITTDNTFLSGNCDVVIGIVNNTVYDPLQPELDSFKEELDKYFKNHTSPDVDLGDISGINASVVNIQKEIDRLNEVAKNLNESLIDLQELGKYEQYIKGGSGYIPEAPRDGQAYVRKDGEWVLLSTFL

SEQ ID NO: 5894 - protein, 1241 aa, Artificial Sequence
  SARS-CoV-2/USA/UT-00034/2020__EPI_ISL_417977 spike protein (1-1211)(K986P_V987P_P1069F) Foldon construct
MFVFLVLLPLVSSQCVNLTTRTQLPPAYTNSFTRGVYYPDKVFRSSVLHSTQDLFLPFFSNVTWFHAIHVSGTNGTKRFDNPVLPFNDGVYFASTEKSNIIRGWIFGTTLDSKTQSLLIVNNATNVVIKVCEFQFCNDPFLGVYYYKNNKSWMESEFRVYSSANNCTFEYVSQPFLMDLEGKQGNFKNLREFVFKNIDGYFKIYSKHTPINLVRDLPQGFSALEPLVDLPIGINITRFQTLLALHRSYLTPGDSSSGWTAGAAAYYVGYLQPRTFLLKYNENGTITDAVDCALDPLSETKCTLKSFTVEKGIYQTSNFRVQPTESIVRFPNITNLCPFGEVFNATRFASVYAWNRKRISNCVADYSVLYNSASFSTFKCYGVSPTKLNDLCFTNVYADSFVIRGDEVRQIAPGQTGKIADYNYKLPDDFTGCVIAWNSNNLDSKVGGNYNYLYRLFRKSNLKPFERDISTEIYQAGSTPCNGVEGFNCYFPLQSYGFQPTNGVGYQPYRVVVLSFELLHAPATVCGPKKSTNLVKNKCVNFNFNGLTGTGVLTESNKKFLPFQQFGRDIADTTDAVRDPQTLEILDITPCSFGGVSVITPGTNTSNQVAVLYQGVNCTEVPVAIHADQLTPTWRVYSTGSNVFQTRAGCLIGAEHVNNSYECDIPIGAGICASYQTQTNSPRRARSVASQSIIAYTMSLGAENSVAYSNNSIAIPTNFTISVTTEILPVSMTKTSVDCTMYICGDSTECSNLLLQYGSFCTQLNRALTGIAVEQDKNTQEVFAQVKQIYKTPPIKDFGGFNFSQILPDPSKPSKRSFIEDLLFNKVTLADAGFIKQYGDCLGDIAARDLICAQKFNGLTVLPPLLTDEMIAQYTSALLAGTITSGWTFGAGAALQIPFAMQMAYRFNGIGVTQNVLYENQKLIANQFNSAIGKIQDSLSSTASALGKLQDVVNQNAQALNTLVKQLSSNFGAISSVLNDILSRLDPPEAEVQIDRLITGRLQSLQTYVTQQLIRAAEIRASANLAATKMSECVLGQSKRVDFCGKGYHLMSFPQSAPHGVVFLHVTYVFAQEKNFTTAPAICHDGKAHFPREGVFVSNGTHWFVTQRNFYEPQIITTDNTFVSGNCDVVIGIVNNTVYDPLQPELDSFKEELDKYFKNHTSPDVDLGDISGINASVVNIQKEIDRLNEVAKNLNESLIDLQELGKYEQYIKGGSGYIPEAPRDGQAYVRKDGEWVLLSTFL

SEQ ID NO: 5895 - protein, 1241 aa, Artificial Sequence
  SARS-CoV-2/USA/UT-00033/2020__EPI_ISL_417976 spike protein (1-1211)(K986P_V987P_P1069F) Foldon construct
MFVFLVLLPLVSSQCVNLTTRTQLPPAYTNSFTRGVYYPDKVFRSSVLHSTQDLFLPFFSNVTWFHAIHVSGTNGTKRFDNPVLPFNDGVYFASTEKSNIIRGWIFGTTLDSKTQSLLIVNNATNVVIKVCEFQFCNDPFLGVYYHKNNKSWMESEFRVYSSANNCTFEYVSQPFLMDLEGKQGNFKNLREFVFKNIDGYFKIYSKHTPINLVRDLPQGFSALEPLVDLPIGINITRFQTLLALHRSYLTPGDSSSGLTAGAAAYYVGYLQPRTFLLKYNENGTITDAVDCALDPLSETKCTLKSFTVEKGIYQTSNFRVQPTESIVRFPNITNLCPFGEVFNATRFASVYAWNRKRISNCVADYSVLYNSASFSTFKCYGVSPTKLNDLCFTNVYADSFVIRGDEVRQIAPGQTGKIADYNYKLPDDFTGCVIAWNSNNLDSKVGGNYNYLYRLFRKSNLKPFERDISTEIYQAGSTPCNGVEGFNCYFPLQSYGFQPTNGVGYQPYRVVVLSFELLHAPATVCGPKKSTNLVKNKCVNFNFNGLTGTGVLTESNKKFLPFQQFGRDIADTTDAVRDPQTLEILDITPCSFGGVSVITPGTNTSNQVAVLYQGVNCTEVPVAIHADQLTPTWRVYSTGSNVFQTRAGCLIGAEHVNNSYECDIPIGAGICASYQTQTNSPRRARSVASQSIIAYTMSLGAENSVAYSNNSIAIPTNFTISVTTEILPVSMTKTSVDCTMYICGDSTECSNLLLQYGSFCTQLNRALTGIAVEQDKNTQEVFAQVKQIYKTPPIKDFGGFNFSQILPDPSKPSKRSFIEDLLFNKVTLADAGFIKQYGDCLGDIAARDLICAQKFNGLTVLPPLLTDEMIAQYTSALLAGTITSGWTFGAGAALQIPFAMQMAYRFNGIGVTQNVLYENQKLIANQFNSAIGKIQDSLSSTASALGKLQDVVNQNAQALNTLVKQLSSNFGAISSVLNDILSRLDPPEAEVQIDRLITGRLQSLQTYVTQQLIRAAEIRASANLAATKMSECVLGQSKRVDFCGKGYHLMSFPQSAPHGVVFLHVTYVFAQEKNFTTAPAICHDGKAHFPREGVFVSNGTHWFVTQRNFYEPQIITTDNTFVSGNCDVVIGIVNNTVYDPLQPELDSFKEELDKYFKNHTSPDVDLGDISGINASVVNIQKEIDRLNEVAKNLNESLIDLQELGKYEQYIKGGSGYIPEAPRDGQAYVRKDGEWVLLSTFL

SEQ ID NO: 5896 - protein, 1241 aa, Artificial Sequence
  SARS-CoV-2/USA/WI-13/2020__EPI_ISL_417516 spike protein (1-1211)(K986P_V987P_P1069F) Foldon construct
MFVFLVLLPLVSSQCVNLTTRTQLPPAYTNSFTRGVYYPDKVFRSSVLHSTQDLFLPFFSNVTWFHAIHVSGTNGTKRFDNPVLPFNDGVYFASTEKSNIIRGWIFGTTLDSKTQSLLIVNNATNVVIKVCEFQFCNDPFLGVYYHKNNKSWMESEFRVYSSANNCTFEYVSQPFLMDLEGKQGNFKNLREFVFKNIDGYFKIYSKHTPINLVRDLPQGFSALEPLVDLPIGINITRFQTLLALHRSYLTPGDSSSGWTAGAAAYYVGYLQPRTFLLKYNENGTITDAVDCALDPLSETKCTLKSFTVEKGIYQTSNFRVLPTESIVRFPNITNLCPFGEVFNATRFASVYAWNRKRISNCVADYSVLYNSASFSTFKCYGVSPTKLNDLCFTNVYADSFVIRGDEVRQIAPGQTGKIADYNYKLPDDFTGCVIAWNSNNLDSKVGGNYNYLYRLFRKSNLKPFERDISTEIYQAGSTPCNGVEGFNCYFPLQSYGFQPTNGVGYQPYRVVVLSFELLHAPATVCGPKKSTNLVKNKCVNFNFNGLTGTGVLTESNKKFLPFQQFGRDIADTTDAVRDPQTLEILDITPCSFGGVSVITPGTNTSNQVAVLYQGVNCTEVPVAIHADQLTPTWRVYSTGSNVFQTRAGCLIGAEHVNNSYECDIPIGAGICASYQTQTNSPRRARSVASQSIIAYTMSLGAENSVAYSNNSIAIPTNFTISVTTEILPVSMTKTSVDCTMYICGDSTECSNLLLQYGSFCTQLNRALTGIAVEQDKNTQEVFAQVKQIYKTPPIKDFGGFNFSQILPDPSKPSKRSFIEDLLFNKVTLADAGFIKQYGDCLGDIAARDLICAQKFNGLTVLPPLLTDEMIAQYTSALLAGTITSGWTFGAGAALQIPFAMQMAYRFNGIGVTQNVLYENQKLIANQFNSAIGKIQDSLSSTASALGKLQDVVNQNAQALNTLVKQLSSNFGAISSVLNDILSRLDPPEAEVQIDRLITGRLQSLQTYVTQQLIRAAEIRASANLAATKMSECVLGQSKRVDFCGKGYHLMSFPQSAPHGVVFLHVTYVFAQEKNFTTAPAICHDGKAHFPREGVFVSNGTHWFVTQRNFYEPQIITTDNTFVSGNCDVVIGIVNNTVYDPLQPELDSFKEELDKYFKNHTSPDVDLGDISGINASVVNIQKEIDRLNEVAKNLNESLIDLQELGKYEQYIKGGSGYIPEAPRDGQAYVRKDGEWVLLSTFL

SEQ ID NO: 5897 - protein, 1240 aa, Artificial Sequence
  SARS-CoV-2/India/1-27/2020__EPI_ISL_413522 spike protein (1-1210)(K985P_V986P_P1068F) Foldon construct
MFVFLVLLPLVSSQCVNLTTRTQLPPAYTNSFTRGVYYPDKVFRSSVLHSTQDLFLPFFSNVTWFHAIHVSGTNGTKRFDNPVLPFNDGVYFASTEKSNIIRGWIFGTTLDSKTQSLLIVNNATNVVIKVCEFQFCNDPFLGVYHKNNKSWMESEFRVYSSANNCTFEYVSQPFLMDLEGKQGNFKNLREFVFKNIDGYFKIYSKHTPINLVRDLPQGFSALEPLVDLPIGINITRFQTLLALHRSYLTPGDSSSGWTAGAAAYYVGYLQPRTFLLKYNENGTITDAVDCALDPLSETKCTLKSFTVEKGIYQTSNFRVQPTESIVRFPNITNLCPFGEVFNATRFASVYAWNRKRISNCVADYSVLYNSASFSTFKCYGVSPTKLNDLCFTNVYADSFVIRGDEVIQIAPGQTGKIADYNYKLPDDFTGCVIAWNSNNLDSKVGGNYNYLYRLFRKSNLKPFERDISTEIYQAGSTPCNGVEGFNCYFPLQSYGFQPTNGVGYQPYRVVVLSFELLHAPATVCGPKKSTNLVKNKCVNFNFNGLTGTGVLTESNKKFLPFQQFGRDIADTTDAVRDPQTLEILDITPCSFGGVSVITPGTNTSNQVAVLYQDVNCTEVPVAIHADQLTPTWRVYSTGSNVFQTRAGCLIGAEHVNNSYECDIPIGAGICASYQTQTNSPRRARSVASQSIIAYTMSLGAENSVAYSNNSIAIPTNFTISVTTEILPVSMTKTSVDCTMYICGDSTECSNLLLQYGSFCTQLNRALTGIAVEQDKNTQEVFAQVKQIYKTPPIKDFGGFNFSQILPDPSKPSKRSFIEDLLFNKVTLADAGFIKQYGDCLGDIAARDLICAQKFNGLTVLPPLLTDEMIAQYTSALLAGTITSGWTFGAGAALQIPFAMQMAYRFNGIGVTQNVLYENQKLIANQFNSAIGKIQDSLSSTASALGKLQDVVNQNAQALNTLVKQLSSNFGAISSVLNDILSRLDPPEAEVQIDRLITGRLQSLQTYVTQQLIRAAEIRASANLAATKMSECVLGQSKRVDFCGKGYHLMSFPQSAPHGVVFLHVTYVFAQEKNFTTAPAICHDGKAHFPREGVFVSNGTHWFVTQRNFYEPQIITTDNTFVSGNCDVVIGIVNNTVYDPLQPELDSFKEELDKYFKNHTSPDVDLGDISGINASVVNIQKEIDRLNEVAKNLNESLIDLQELGKYEQYIKGGSGYIPEAPRDGQAYVRKDGEWVLLSTFL

SEQ ID NO: 5898 - protein, 1235 aa, Artificial Sequence
  SARS-CoV-2/pangolin/Guangxi/P4L/2017__EPI_ISL_410538 spike protein (1-1205)(K980P_V981P_P1063F) Foldon construct
MFVFLFVLPLVSSQCVNLTTRTGIPPGYTNSSTRGVYYPDKVFRSSILHLTQDLFLPFFSNVTWFNTINYQGGFKKFDNPVLPFNDGVYFASTEKSNIIRGWIFGTTLDARTQSLLIVNNATNVVIKVCEFQFCTDPFLGVYYHNNNKTWVENEFRVYSSANNCTFEYISQPFLMDLEGKQGNFKNLREFVFKNVDGYFKIYSKHTPIDLVRDLPRGFAALEPLVDLPIGINITRFQTLLALHRSYLTPGNLESGWTTGAAAYYVGYLQQRTFLLSYNQNGTITDAVDCSLDPLSETKCTLKSLTVEKGIYQTSNFRVQPTISIVRFPNITNLCPFGEVFNASKFASVYAWNRKRISNCVADYSVLYNSTSFSTFKCYGVSPTKLNDLCFTNVYADSFVVKGDEVRQIAPGQTGVIADYNYKLPDDFTGCVIAWNSVKQDALTGGNYGYLYRLFRKSKLKPFERDISTEIYQAGSTPCNGQVGLNCYYPLERYGFHPTTGVNYQPFRVVVLSFELLNGPATVCGPKLSTTLVKDKCVNFNFNGLTGTGVLTTSKKQFLPFQQFGRDISDTTDAVRDPQTLEILDITPCSFGGVSVITPGTNTSNQVAVLYQDVNCTEVPMAIHAEQLTPAWRVYSAGANVFQTRAGCLVGAEHVNNSYECDIPVGAGICASYHSMSSLRSVNQRSIIAYTMSLGAENSVAYSNNSIAIPTNFTISVTTEILPVSMTKTSVDCTMYICGDSIECSNLLLQYGSFCTQLNRALTGIAVEQDKNTQEVFAQVKQIYKTPPIKDFGGFNFSQILPDPSKPSKRSFIEDLLFNKVTLADAGFIKQYGDCLGDIAARDLICAQKFNGLTVLPPLLTDEMIAQYTSALLAGTITSGWTFGAGAALQIPFAMQMAYRFNGIGVTQNVLYENQKLIANQFNSAIGKIQDSLSSTASALGKLQDVVNQNAQALNTLVKQLSSNFGAISSVLNDILSRLDPPEAEVQIDRLITGRLQSLQTYVTQQLIRAAEIRASANLAATKMSECVLGQSKRVDFCGKGYHLMSFPQSAPHGVVFLHVTYVFAQEKNFTTAPAICHEGKAHFPREGVFVSNGTHWFITQRNFYEPQIITTDNTFVSGSCDVVIGIVNNTVYDPLQPELDSFKEELDKYFKNHTSPDVDLGDISGINASVVNIQKEIDRLNEVAKNLNESPIDLQELGKYEQYIKGGSGYIPEAPRDGQAYVRKDGEWVLLSTFL

SEQ ID NO: 5899 - protein, 1235 aa, Artificial Sequence
  SARS-CoV-2/pangolin/Guangxi/P5L/2017__EPI_ISL_410540 spike protein (1-1205)(K980P_V981P_P1063F) Foldon construct
MFVFLFVLPLVSSQCVNLTTRTGIPPGYTNSSTRGVYYPDKVFRSSILHLTQDLFLPFFSNVTWFNTINYQGGFKKFDNPVLPFNDGVYFASTEKSNIIRGWIFGTTLDARTQSLLIVNNATNVVIKVCEFQFCTDPFLGVYYHNNNKTWVENEFRVYSSANNCTFEYISQPFLMDLEGKQGNFKNLREFVFKNVDGYFKIYSKHTPIDLVRDLPRGFAALEPLVDLPIGINITRFQTLLALHRSYLTPGKLESGWTTGAAAYYVGYLQQRTFLLSYNQNGTITDAVDCSLDPLSETKCTLKSLTVEKGIYQTSNFRVQPTISIVRFPNITNLCPFGEVFNASKFASVYAWNRKRISNCVADYSVLYNSTSFSTFKCYGVSPTKLNDLCFTNVYADSFVVKGDEVRQIAPGQTGVIADYNYKLPDDFTGCVIAWNSVKQDALTGGNYGYLYRLFRKSKLKPFERDISTEIYQAGSTPCNGQVGLNCYYPLERYGFHPTTGVNYQPFRVVVLSFELLNGPATVCGPKLSTTLVKDKCVNFNFNGLTGTGVLTTSKKQFLPFQQFGRDISDTTDAVRDPQTLEILDITPCSFGGVSVITPGTNTSNQVAVLYQDVNCTEVPMAIHAEQLTPAWRVYSAGANVFQTRAGCLVGAEHVNNSYECDIPVGAGICASYHSMSSFRSVNQRSIIAYTMSLGAENSVAYSNNSIAIPTNFTISVTTEILPVSMTKTSVDCTMYICGDSIECSNLLLQYGSFCTQLNRALTGIAVEQDKNTQEVFAQVKQIYKTPPIKDFGGFNFSQILPDPSKPSKRSFIEDLLFNKVTLADAGFIKQYGDCLGDIAARDLICAQKFNGLTVLPPLLTDEMIAQYTSALLAGTITSGWTFGAGAALQIPFAMQMAYRFNGIGVTQNVLYENQKLIANQFNSAIGKIQDSLSSTASALGKLQDVVNQNAQALNTLVKQLSSNFGAISSVLNDILSRLDPPEAEVQIDRLITGRLQSLQTYVTQQLIRAAEIRASANLAATKMSECVLGQSKRVDFCGKGYHLMSFPQSAPHGVVFLHVTYVFAQEKNFTTAPAICHEGKAHFPREGVFVSNGTHWFITQRNFYEPQIITTDNTFVSGSCDVVIGIVNNTVYDPLQPELDSFKEELDKYFKNHTSPDVDLGDISGINASVVNIQKEIDRLNEVAKNLNESLIDLQELGKYEQYIKGGSGYIPEAPRDGQAYVRKDGEWVLLSTFL

SEQ ID NO: 5900 - protein, 1235 aa, Artificial Sequence
  SARS-CoV-2/pangolin/Guangxi/P5E/2017__EPI_ISL_410541 spike protein (1-1205)(K980P_V981P_P1063F) Foldon construct
MFVFLFVLPLVSSQCVNLTTRTGIPPGYTNSSTRGVYYPDKVFRSSILHLTQDLFLPFFSNVTWFNTITYQGGSKKFDNPVLPFNDGVYFASTEKSNIIRGWIFGTTLDARTQSLLIVNNATNVVIKVCEFQFCTDPFLGVYYHNNNKTWVENEFRVYSSANNCTFEYISQPFLMDLEGKQGNFKNLREFVFKNVDGYFKIYSKHTPIDLVRDLPRGFAALEPLVDLPIGINITRFQTLLALHRSYLTPGKLESGWTTGAAAYYVGYLQQRTFLLSYNQNGTITDAVDCSLDPLSETKCTLKSLTVEKGIYQTSNFRVQPTISIVRFPNITNLCPFGEVFNASKFASVYAWNRKRISNCVADYSVLYNSTSFSTFKCYGVSPTKLNDLCFTNVYADSFVVKGDEVRQIAPGQTGVIADYNYKLPDDFTGCVIAWNSVKQDALTGDNYGYLYRLFRKSKLKPFERDISTEIYQAGSTPCNGQVGLNCYYPLERYGFHPTTGVNYQPFRVVVLSFELLNGPATVCGPKLSTTLVKDKCVNFNFNGLTGTGVLTTSKKQFLPFQQFGRDISDTTDAVRDPQTLEILDITPCSFGGVSVITPGTNTSNQVAVLYQDVNCTEVPMAIHAEQLTPAWRVYSAGANVFQTRAGCLVGAEHVNNSYECDIPVGAGICASYHSMSSFRSVNQRSIIAYTMSLGAENSVAYSNNSIAIPTNFTISVTTEILPVSMTKTSVDCTMYICGDSIECSNLLLQYGSFCTQLNRALTGIAVEQDKNTQEVFAQVKQIYKTPPIKDFGGFNFSQILPDPSKPSKRSFIEDLLFNKVTLADAGFIKQYGDCLGDIAARDLICAQKFNGLTVLPPLLTDEMIAQYTSALLAGTITSGWTFGAGAALQIPFAMQMAYRFNGIGVTQNVLYENQKLIANQFNSAIGKIQDSLSSTASALGKLQDVVNQNAQALNTLVKQLSSNFGAISSVLNDILSRLDPPEAEVQIDRLITGRLQSLQTYVTQQLIRAAEIRASANLAATKMSECVLGQSKRVDFCGKGYHLMSFPQSAPHGVVFLHVTYVFAQEKNFTTAPAICHEGKAHFPREGVFVSNGTHWFITQRNFYEPQIITTDNTFVSGSCDVVIGIVNNTVYDPLQPELDSFKEELDKYFKNHTSPDVDLGDISGINASVVNIQKEIDRLNEVAKNLNESLIDLQELGKYEQYIKGGSGYIPEAPRDGQAYVRKDGEWVLLSTFL

SEQ ID NO: 5901 - protein, 1233 aa, Artificial Sequence
  SARS-CoV-2/pangolin/Guangxi/P1E/2017__EPI_ISL_410539 spike protein (1-1203)(K978P_V979P_P1061F) Foldon construct
MFVFLFVLPLVSSQCVNLTTRTGIQPGYTNSSTRGVYYPDKVFRSSILHLTQDLFLPFFSNVTWFNTINYQGGFKKFDNPVLPFNDGVYFASTEKSNIIRGWIFGTTLDARTQSLLIVNNATNVVIKVCEFQFCTDPFLGVYYHNNNKTWVENEFRVYSSANNCTFEYISQPFLMDLEGKQGNFKNLREFVFKNVDGYFKIYSKHTPIDLVRDLPRGFAALEPLVDLPIGINITRFQTLLALHRSYLTPGKLESGWTTGAAAYYVGYLQQRTFLLSYNQNGTITDAVDCSLDPLSETKCTLKSLTVEKGIYQTSNFRVQPTISIVRFPNITNLCPFGEVFNASKFASVYAWNRKRISNCVADYSVLYNSTSFSTFKCYGVSPTKLNDLCFTNVYADSFVVKGDEVRQIAPGQTGVIADYNYKLPDDFTGCVIAWNSVKQDALTGGNYLYRLFRKSKLKPFERDISTEIYQAGSTPCNGQVGLNCYYPLERYGFHPTTGVNYQPFRVVVLSFELLNGPATVCGPKLSTTLVKDKCVNFNFNGLTGTGVLTTSKKQFLPFQQFGRDISDTTDAVRDPQTLEILDITPCSFGGVSVITPGTNTSNQVAVLYQDVNCTEVPMAIHAEQLTPAWRVYSAGANVFQTRAGCLVGAEHVNNSYECDIPVGAGICASYHSMSSLRSVNQRSIIAYTMSLGAENSVAYSNNSIAIPTNFTISVTTEILPVSMTKTSVDCTMYICGDSIECSNLLLQYGSFCTQLNRALTGIAVEQDKNTQEVFAQVKQIYKTPPIKDFGGFNFSQILPDPSKPSKRSFIEDLLFNKVTLADAGFIKQYGDCLGDIAARDLICAQKFNGLTVLPPLLTDEMIAQYTSALLAGTITSGWTFGAGAALQIPFAMQMAYRFNGIGVTQNVLYENQKLIANQFNSAIGKIQDSLSSTASALGKLQDVVNQNAQALNTLVKQLSSNFGAISSVLNDILSRLDPPEAEVQIDRLITGRLQSLQTYVTQQLIRAAEIRASANLAATKMSECVLGQSKRVDFCGKGYHLMSFPQSAPHGVVFLHVTYVFAQEKNFTTAPAICHEGKAHFPREGVFVSNGTHWFITQRNFYEPQIITTDNTFVSGSCDVVIGIVNNTVYDPLQPELDSFKEELDKYFKNHTSPDVDLGDISGINASVVNIQKEIDRLNEVAKNLNESLIDLQELGKYEQYIKGGSGYIPEAPRDGQAYVRKDGEWVLLSTFL

SEQ ID NO: 5902 - protein, 1241 aa, Artificial Sequence
  SARS-CoV-2/Wuhan/WIV05/2019__EPI_ISL_402128 spike protein (1-1211)(K986P_V987P_ H1048Q_H1064N_ H1083N_H1101N) Foldon construct
MFVFLVLLPLVSSQCVNLTTRTQLPPAYTNSFTRGVYYPDKVFRSSVLHSTQDLFLPFFSNVTWFHAIHVSGTNGTKRFDNPVLPFNDGVYFASTEKSNIIRGWIFGTTLDSKTQSLLIVNNATNVVIKVCEFQFCNDPFLGVYYHKNNKSWMESEFRVYSSANNCTFEYVSQPFLMDLEGKQGNFKNLREFVFKNIDGYFKIYSKHTPINLVRDLPQGFSALEPLVDLPIGINITRFQTLLALHRSYLTPGDSSSGWTAGAAAYYVGYLQPRTFLLKYNENGTITDAVDCALDPLSETKCTLKSFTVEKGIYQTSNFRVQPTESIVRFPNITNLCPFGEVFNATRFASVYAWNRKRISNCVADYSVLYNSASFSTFKCYGVSPTKLNDLCFTNVYADSFVIRGDEVRQIAPGQTGKIADYNYKLPDDFTGCVIAWNSNNLDSKVGGNYNYLYRLFRKSNLKPFERDISTEIYQAGSTPCNGVEGFNCYFPLQSYGFQPTNGVGYQPYRVVVLSFELLHAPATVCGPKKSTNLVKNKCVNFNFNGLTGTGVLTESNKKFLPFQQFGRDIADTTDAVRDPQTLEILDITPCSFGGVSVITPGTNTSNQVAVLYQDVNCTEVPVAIHADQLTPTWRVYSTGSNVFQTRAGCLIGAEHVNNSYECDIPIGAGICASYQTQTNSPRRARSVASQSIIAYTMSLGAENSVAYSNNSIAIPTNFTISVTTEILPVSMTKTSVDCTMYICGDSTECSNLLLQYGSFCTQLNRALTGIAVEQDKNTQEVFAQVKQIYKTPPIKDFGGFNFSQILPDPSKPSKRSFIEDLLFNKVTLADAGFIKQYGDCLGDIAARDLICAQKFNGLTVLPPLLTDEMIAQYTSALLAGTITSGWTFGAGAALQIPFAMQMAYRFNGIGVTQNVLYENQKLIANQFNSAIGKIQDSLSSTASALGKLQDVVNQNAQALNTLVKQLSSNFGAISSVLNDILSRLDPPEAEVQIDRLITGRLQSLQTYVTQQLIRAAEIRASANLAATKMSECVLGQSKRVDFCGKGYQLMSFPQSAPHGVVFLNVTYVPAQEKNFTTAPAICNDGKAHFPREGVFVSNGTNWFVTQRNFYEPQIITTDNTFVSGNCDVVIGIVNNTVYDPLQPELDSFKEELDKYFKNHTSPDVDLGDISGINASVVNIQKEIDRLNEVAKNLNESLIDLQELGKYEQYIKGGSGYIPEAPRDGQAYVRKDGEWVLLSTFL

SEQ ID NO: 5903 - protein, 1237 aa, Artificial Sequence
  SARS-CoV-2/bat/Yunnan/RaTG13/2013__EPI_ISL_402131 spike protein (1-1207)(K982P_V983P_ H1044Q_H1060N_ H1079N_H1097N) Foldon construct
MFVFLVLLPLVSSQCVNLTTRTQLPPAYTNSSTRGVYYPDKVFRSSVLHLTQDLFLPFFSNVTWFHAIHVSGTNGIKRFDNPVLPFNDGVYFASTEKSNIIRGWIFGTTLDSKTQSLLIVNNATNVVIKVCEFQFCNDPFLGVYYHKNNKSWMESEFRVYSSANNCTFEYVSQPFLMDLEGKQGNFKNLREFVFKNIDGYFKIYSKHTPINLVRDLPPGFSALEPLVDLPIGINITRFQTLLALHRSYLTPGDSSSGWTAGAAAYYVGYLQPRTFLLKYNENGTITDAVDCALDPLSETKCTLKSFTVEKGIYQTSNFRVQPTDSIVRFPNITNLCPFGEVFNATTFASVYAWNRKRISNCVADYSVLYNSTSFSTFKCYGVSPTKLNDLCFTNVYADSFVITGDEVRQIAPGQTGKIADYNYKLPDDFTGCVIAWNSKHIDAKEGGNFNYLYRLFRKANLKPFERDISTEIYQAGSKPCNGQTGLNCYYPLYRYGFYPTDGVGHQPYRVVVLSFELLNAPATVCGPKKSTNLVKNKCVNFNFNGLTGTGVLTESNKKFLPFQQFGRDIADTTDAVRDPQTLEILDITPCSFGGVSVITPGTNASNQVAVLYQDVNCTEVPVAIHADQLTPTWRVYSTGSNVFQTRAGCLIGAEHVNNSYECDIPIGAGICASYQTQTNSRSVASQSIIAYTMSLGAENSVAYSNNSIAIPTNFTISVTTEILPVSMTKTSVDCTMYICGDSTECSNLLLQYGSFCTQLNRALTGIAVEQDKNTQEVFAQVKQIYKTPPIKDFGGFNFSQILPDPSKPSKRSFIEDLLFNKVTLADAGFIKQYGDCLGDIAARDLICAQKFNGLTVLPPLLTDEMIAQYTSALLAGTITSGWTFGAGAALQIPFAMQMAYRFNGIGVTQNVLYENQKLIANQFNSAIGKIQDSLSSTASALGKLQDVVNQNAQALNTLVKQLSSNFGAISSVLNDILSRLDPPEAEVQIDRLITGRLQSLQTYVTQQLIRAAEIRASANLAATKMSECVLGQSKRVDFCGKGYQLMSFPQSAPHGVVFLNVTYVPAQEKNFTTAPAICNDGKAHFPREGVFVSNGTNWFVTQRNFYEPQIITTDNTFVSGSCDVVIGIVNNTVYDPLQPELDSFKEELDKYFKNHTSPDVDLGDISGINASVVNIQKEIDRLNEVAKNLNESLIDLQELGKYEQYIKGGSGYIPEAPRDGQAYVRKDGEWVLLSTFL

SEQ ID NO: 5904 - protein, 1241 aa, Artificial Sequence
  SARS-CoV-2/Wuhan/HBCDC-HB-01/2019__EPI_ISL_402132 spike protein (1-1211)(K986P_V987P_ H1048Q_H1064N_ H1083N_H1101N) Foldon construct
MFVFLVLLPLVSSQCVNLTTRTQLPPAYTNSITRGVYYPDKVFRSSVLHSTQDLFLPFFSNVTWFHAIHVSGTNGTKRFDNPVLPFNDGVYFASTEKSNIIRGWIFGTTLDSKTQSLLIVNNATNVVIKVCEFQFCNDPFLGVYYHKNNKSWMESEFRVYSSANNCTFEYVSQPFLMDLEGKQGNFKNLREFVFKNIDGYFKIYSKHTPINLVRDLPQGFSALEPLVDLPIGINITRFQTLLALHRSYLTPGDSSSGWTAGAAAYYVGYLQPRTFLLKYNENGTITDAVDCALDPLSETKCTLKSFTVEKGIYQTSNFRVQPTESIVRFPNITNLCPFGEVFNATRFASVYAWNRKRISNCVADYSVLYNSASFSTFKCYGVSPTKLNDLCFTNVYADSFVIRGDEVRQIAPGQTGKIADYNYKLPDDFTGCVIAWNSNNLDSKVGGNYNYLYRLFRKSNLKPFERDISTEIYQAGSTPCNGVEGFNCYFPLQSYGFQPTNGVGYQPYRVVVLSFELLHAPATVCGPKKSTNLVKNKCVNFNFNGLTGTGVLTESNKKFLPFQQFGRDIADTTDAVRDPQTLEILDITPCSFGGVSVITPGTNTSNQVAVLYQDVNCTEVPVAIHADQLTPTWRVYSTGSNVFQTRAGCLIGAEHVNNSYECDIPIGAGICASYQTQTNSPRRARSVASQSIIAYTMSLGAENSVAYSNNSIAIPTNFTISVTTEILPVSMTKTSVDCTMYICGDSTECSNLLLQYGSFCTQLNRALTGIAVEQDKNTQEVFAQVKQIYKTPPIKDFGGFNFSQILPDPSKPSKRSFIEDLLFNKVTLADAGFIKQYGDCLGDIAARDLICAQKFNGLTVLPPLLTDEMIAQYTSALLAGTITSGWTFGAGAALQIPFAMQMAYRFNGIGVTQNVLYENQKLIANQFNSAIGKIQDSLSSTASALGKLQDVVNQNAQALNTLVKQLSSNFGAISSVLNDILSRLDPPEAEVQIDRLITGRLQSLQTYVTQQLIRAAEIRASANLAATKMSECVLGQSKRVDFCGKGYQLMSFPQSAPHGVVFLNVTYVPAQEKNFTTAPAICNDGKAHFPREGVFVSNGTNWFVTQRNFYEPQIITTDNTFVSGNCDVVIGIVNNTVYDPLQPELDSFKEELDKYFKNHTSPDVDLGDISGINASVVNIQKEIDRLNEVAKNLNESLIDLQELGKYEQYIKGGSGYIPEAPRDGQAYVRKDGEWVLLSTFL

SEQ ID NO: 5905 - protein, 1241 aa, Artificial Sequence
  SARS-CoV-2/Guangdong/20SF028/2020__EPI_ISL_403936 spike protein (1-1211)(K986P_V987P_ H1048Q_H1064N_ H1083N_H1101N) Foldon construct
MFVFLVLLPLVSSQCVNLTTRTQLPPAYTNSFTRGVYYPDKVFRSSVLYSTQDLFLPFFSNVTWFHAIHVSGTNGTKRFDNPVLPFNDGVYFASTEKSNIIRGWIFGTTLDSKTQSLLIVNNATNVVIKVCEFQFCNDPFLGVYYHKNNKSWMESEFRVYSSANNCTFEYVSQPFLMDLEGKQGNFKNLREFVFKNIDGYFKIYSKHTPINLVRDLPQGFSALEPLVDLPIGINITRFQTLLALHRSYLTPGDSSSGWTAGAAAYYVGYLQPRTFLLKYNENGTITDAVDCALDPLSETKCTLKSFTVEKGIYQTSNFRVQPTESIVRFPNITNLCPFGEVFNATRFASVYAWNRKRISNCVADYSVLYNSASFSTFKCYGVSPTKLNDLCFTNVYADSFVIRGDEVRQIAPGQTGKIADYNYKLPDDFTGCVIAWNSNNLDSKVGGNYNYLYRLFRKSNLKPFERDISTEIYQAGSTPCNGVEGFNCYFPLQSYGFQPTNGVGYQPYRVVVLSFELLHAPATVCGPKKSTNLVKNKCVNFNFNGLTGTGVLTESNKKFLPFQQFGRDIADTTDAVRDPQTLEILDITPCSFGGVSVITPGTNTSNQVAVLYQDVNCTEVPVAIHADQLTPTWRVYSTGSNVFQTRAGCLIGAEHVNNSYECDIPIGAGICASYQTQTNSPRRARSVASQSIIAYTMSLGAENSVAYSNNSIAIPTNFTISVTTEILPVSMTKTSVDCTMYICGDSTECSNLLLQYGSFCTQLNRALTGIAVEQDKNTQEVFAQVKQIYKTPPIKDFGGFNFSQILPDPSKPSKRSFIEDLLFNKVTLADAGFIKQYGDCLGDIAARDLICAQKFNGLTVLPPLLTDEMIAQYTSALLAGTITSGWTFGAGAALQIPFAMQMAYRFNGIGVTQNVLYENQKLIANQFNSAIGKIQDSLSSTASALGKLQDVVNQNAQALNTLVKQLSSNFGAISSVLNDILSRLDPPEAEVQIDRLITGRLQSLQTYVTQQLIRAAEIRASANLAATKMSECVLGQSKRVDFCGKGYQLMSFPQSAPHGVVFLNVTYVPAQEKNFTTAPAICNDGKAHFPREGVFVSNGTNWFVTQRNFYEPQIITTDNTFVSGNCDVVIGIVNNTVYDPLQPELDSFKEELDKYFKNHTSPDVDLGDISGINASVVNIQKEIDRLNEVAKNLNESLIDLQELGKYEQYIKGGSGYIPEAPRDGQAYVRKDGEWVLLSTFL

SEQ ID NO: 5906 - protein, 1241 aa, Artificial Sequence
  SARS-CoV-2/Shenzhen/SZTH-001/2020__EPI_ISL_406592 spike protein (1-1211)(K986P_V987P_ H1048Q_H1064N_ H1083N_H1101N) Foldon construct
MFVFLVLLPLVSSQCVNLTTRTQLPPAYTNSFTRGVYYPDKVFRSSVLHSTQDLFLPFFSNVTWFHAIHVSGTNGTKRFDNPVLPFNDGVYFASTEKSNIIRGWIFGTTLDSKTQSLLIVNNATNVVIKVCEFQFCNDPFLGVYYHKNNKSWMESEFRVYSSANNCTFEYVSQPFLMDLEGKQGNFKNLREFVFKNIDGYFKIYSKHTPINLVRDLPQGFSALEPLVDLPIGINITRFQTLLALHRSYLTPGDSSSGWTAGAAAYYVGYLQPRTFLLKYNENGTITDAVDCALDPLSETKCTLKSFTVEKGIYQTSNFRVQPTESIVRFPNITNLCPFGEVFNATRFASVYAWNRKRISNCVADYSVLYNSASFSTFKCYGVSPTKLNDLCFTNVYADSFVIRGDEVRQIAPGQTGKIADYNYKLPDDFTGCVIAWNSNNLDSKVGGNYNYLYRLFRKSNLKPFERDISTEIYQAGSTPCNGVEGFNCYFPLQSYGFQPTNGVGYQPYRVVVLSFELLHAPATVCGPKKSTNLVKNKCVNFNFNGLTGTGVLTESNKKFLPFQQFGRDIADTTDAVRDPQTLEILDITPCSFGGVSVITPGTNTSNQVAVLYQDVNCTEVPVAIHADQLTPTWRVYSTGSNVFQTRAGCLIGAEHVNNSYECDIPIGAGICASYQTQTNSPRRARSVASQSIIAYTMSLGAENSVAYSNNSIAIPTNFTISVTTEILPVSMTKTSVDCTMYICGDSTECSNLLLQYGSFCTQLNRALTGIAVEQDKNTQEVFAQVKQIYKTPPIKDFGGFNFSQILPDPSKPSKRSFIEDLLFNKVTLADAGFIKQYGDCLGDIAARDLICAQKFNGLTVLPPLLTDEMIAQYTSALLAGTITSGWTFGAGAALQIPFAMQMAYRFNGIGVTQNVLYENQKLIANQFNSAIGKIQDSLSSTASALGKLQDVVNQNAQALNTLVKQLSSNFGAISSVLNDILSRLDPPEAEVQIDRLITGRLQSLQTYVTQQLIRAAEIRASANLAATKMSECVLGQSKRVDFCGKGYQLMSFPQSAPHGVVFLNVTYVPAQEKNFTTAPAICNDGKAHFPREGVFVSNGTNWFVTQRNFYEPQIITTDNTFVSGNCDVLIGIVNNTVYDPLQPELDSFKEELDKYFKNHTSPDVDLGDISGINASVVNIQKEIDRLNEVAKNLNESLIDLQELGKYEQYIKGGSGYIPEAPRDGQAYVRKDGEWVLLSTFL

SEQ ID NO: 5907 - protein, 1241 aa, Artificial Sequence
  SARS-CoV-2/Shenzhen/SZTH-004/2020__EPI_ISL_406595 spike protein (1-1211)(K986P_V987P_ H1048Q_H1064N_ H1083N_H1101N) Foldon construct
MFVFLVLLPLVSSQCVNLTTRTQLPPAYTNSFTRGVYYPDKVFRSSVLHSTQDLFLPFFSNVTWFHAIHVSGTNGTKRFDNPVLPFNDGVYFASTEKSNIIRGWIFGTTLDSKTQSLLIVNNATNVVIKVCEFQFCNDPFLGVYYHKNNKSWMESEFRVYSSANNCTFEYVSQPFLMDLEGKQGNFKNLREFVFKNIDGYFKIYSKHTPINLVRDLPQGFSALEPLVDLPIGINITRFQTLLALHRSYLTPGDSSSGWTAGAAAYYVGYLQPRTFLLKYNENGTITDAVDCALDPLSETKCTLKSFTVEKGIYQTSNFRVQPTESIVRFPNITNLCPFGEVFNATRFASVYAWDRKRISNCVAYYSVLYNSASFSTFKCYGVSPTKLNDLCFTNVYADSFVIRGDEVRQIAPGQTGKIADYNYKLPDDFTGCVIAWNSNNLDSKVGGNYNYLYRLFRKSNLKPFERDISTEIYQAGSTPCNGVEGFNCYFPLQSYGFQPTNGVGYQPYRVVVLSFELLHAPATVCGPKKSTNLVKNKCVNFNFNGLTGTGVLTESNKKFLPFQQFGRDIADTTDAVRDPQTLEILDITPCSFGGVSVITPGTNTSNQVAVLYQDVNCTEVPVAIHADQLTPTWRVYSTGSNVFQTRAGCLIGAEHVNNSYECDIPIGAGICASYQTQTNSPRRARSVASQSIIAYTMSLGAENSVAYSNNSIAIPTNFTISVTTEILPVSMTKTSVDCTMYICGDSTECSNLLLQYGSFCTQLNRALTGIAVEQDKNTQEVFAQVKQIYKTPPIKDFGGFNFSQILPDPSKPSKRSFIEDLLFNKVTLADAGFIKQYGDCLGDIAARDLICAQKFNGLTVLPPLLTDEMIAQYTSALLAGTITSGWTFGAGAALQIPFAMQMAYRFNGIGVTQNVLYENQKLIANQFNSAIGKIQDSLSSTASALGKLQDVVNQNAQALNTLVKQLSSNFGAISSVLNDILSRLDPPEAEVQIDRLITGRLQSLQTYVTQQLIRAAEIRASANLAATKMSECVLGQSKRVDFCGKGYQLMSFPQSAPHGVVFLNVTYVPAQEKNFTTAPAICNDGKAHFPREGVFVSNGTNWFVTQRNFYEPQIITTDNTFVSGNCDVVIGIVNNTVYDPLQPELDSFKEELDKYFKNHTSPDVDLGDISGINASVVNIQKEIDRLNEVAKNLNESLIDLQELGKYEQYIKGGSGYIPEAPRDGQAYVRKDGEWVLLSTFL

SEQ ID NO: 5908 - protein, 1241 aa, Artificial Sequence
  SARS-CoV-2/France/IDF0372/2020__EPI_ISL_406596 spike protein (1-1211)(K986P_V987P_ H1048Q_H1064N_ H1083N_H1101N) Foldon construct
MFVFLVLLPLVSSQCVNLTTRTQLPPAYTNSFTRGVYYPDKVFRSSVLHSTQDLFLPFFSNVTWFHAIHVSGTNGTKRFDNPVLPFNDGVYFASTEKSNIIRGWIFGTTLDSKTQSLLIVNNATNVVIKVCEFQFCNDPFLGVYYHKNNKSWMESEFRVYSSANNCTFEYVSQPFLMDLEGKQGNFKNLREFVFKNIDGYFKIYSKHTPINLVRDLPQGFSALEPLVDLPIGINITRFQTLLALHRSYLTPGDSSSGWTAGAAAYYVGYLQPRTFLLKYNENGTITDAVDCALDPLSETKCTLKSFTVEKGIYQTSNFRVQPTESIVRFPNITNLCPFGEVFNATRFASVYAWNRKRISNCVADYSFLYNSASFSTFKCYGVSPTKLNDLCFTNVYADSFVIRGDEVRQIAPGQTGKIADYNYKLPDDFTGCVIAWNSNNLDSKVGGNYNYLYRLFRKSNLKPFERDISTEIYQAGSTPCNGVEGFNCYFPLQSYGFQPTNGVGYQPYRVVVLSFELLHAPATVCGPKKSTNLVKNKCVNFNFNGLTGTGVLTESNKKFLPFQQFGRDIADTTDAVRDPQTLEILDITPCSFGGVSVITPGTNTSNQVAVLYQDVNCTEVPVAIHADQLTPTWRVYSTGSNVFQTRAGCLIGAEHVNNSYECDIPIGAGICASYQTQTNSPRRARSVASQSIIAYTMSLGAENSVAYSNNSIAIPTNFTISVTTEILPVSMTKTSVDCTMYICGDSTECSNLLLQYGSFCTQLNRALTGIAVEQDKNTQEVFAQVKQIYKTPPIKDFGGFNFSQILPDPSKPSKRSFIEDLLFNKVTLADAGFIKQYGDCLGDIAARDLICAQKFNGLTVLPPLLTDEMIAQYTSALLAGTITSGWTFGAGAALQIPFAMQMAYRFNGIGVTQNVLYENQKLIANQFNSAIGKIQDSLSSTASALGKLQDVVNQNAQALNTLVKQLSSNFGAISSVLNDILSRLDPPEAEVQIDRLITGRLQSLQTYVTQQLIRAAEIRASANLAATKMSECVLGQSKRVDFCGKGYQLMSFPQSAPHGVVFLNVTYVPAQEKNFTTAPAICNDGKAHFPREGVFVSNGTNWFVTQRNFYEPQIITTDNTFVSGNCDVVIGIVNNTVYDPLQPELDSFKEELDKYFKNHTSPDVDLGDISGINASVVNIQKEIDRLNEVAKNLNESLIDLQELGKYEQYIKGGSGYIPEAPRDGQAYVRKDGEWVLLSTFL

SEQ ID NO: 5909 - protein, 1241 aa, Artificial Sequence
  SARS-CoV-2/Australia/VIC01/2020__EPI_ISL_406844 spike protein (1-1211)(K986P_V987P_ H1048Q_H1064N_ H1083N_H1101N) Foldon construct
MFVFLVLLPLVSSQCVNLTTRTQLPPAYTNSFTRGVYYPDKVFRSSVLHSTQDLFLPFFSNVTWFHAIHVSGTNGTKRFDNPVLPFNDGVYFASTEKSNIIRGWIFGTTLDSKTQSLLIVNNATNVVIKVCEFQFCNDPFLGVYYHKNNKSWMESEFRVYSSANNCTFEYVSQPFLMDLEGKQGNFKNLREFVFKNIDGYFKIYSKHTPINLVRDLPQGFSALEPLVDLPIGINITRFQTLLALHRRYLTPGDSSSGWTAGAAAYYVGYLQPRTFLLKYNENGTITDAVDCALDPLSETKCTLKSFTVEKGIYQTSNFRVQPTESIVRFPNITNLCPFGEVFNATRFASVYAWNRKRISNCVADYSVLYNSASFSTFKCYGVSPTKLNDLCFTNVYADSFVIRGDEVRQIAPGQTGKIADYNYKLPDDFTGCVIAWNSNNLDSKVGGNYNYLYRLFRKSNLKPFERDISTEIYQAGSTPCNGVEGFNCYFPLQSYGFQPTNGVGYQPYRVVVLSFELLHAPATVCGPKKSTNLVKNKCVNFNFNGLTGTGVLTESNKKFLPFQQFGRDIADTTDAVRDPQTLEILDITPCSFGGVSVITPGTNTSNQVAVLYQDVNCTEVPVAIHADQLTPTWRVYSTGSNVFQTRAGCLIGAEHVNNSYECDIPIGAGICASYQTQTNSPRRARSVASQSIIAYTMSLGAENSVAYSNNSIAIPTNFTISVTTEILPVSMTKTSVDCTMYICGDSTECSNLLLQYGSFCTQLNRALTGIAVEQDKNTQEVFAQVKQIYKTPPIKDFGGFNFSQILPDPSKPSKRSFIEDLLFNKVTLADAGFIKQYGDCLGDIAARDLICAQKFNGLTVLPPLLTDEMIAQYTSALLAGTITSGWTFGAGAALQIPFAMQMAYRFNGIGVTQNVLYENQKLIANQFNSAIGKIQDSLSSTASALGKLQDVVNQNAQALNTLVKQLSSNFGAISSVLNDILSRLDPPEAEVQIDRLITGRLQSLQTYVTQQLIRAAEIRASANLAATKMSECVLGQSKRVDFCGKGYQLMSFPQSAPHGVVFLNVTYVPAQEKNFTTAPAICNDGKAHFPREGVFVSNGTNWFVTQRNFYEPQIITTDNTFVSGNCDVVIGIVNNTVYDPLQPELDSFKEELDKYFKNHTSPDVDLGDISGINASVVNIQKEIDRLNEVAKNLNESLIDLQELGKYEQYIKGGSGYIPEAPRDGQAYVRKDGEWVLLSTFL

SEQ ID NO: 5910 - protein, 1241 aa, Artificial Sequence
  SARS-CoV-2/Germany/BavPat1/2020__EPI_ISL_406862 spike protein (1-1211)(K986P_V987P_ H1048Q_H1064N_ H1083N_H1101N) Foldon construct
MFVFLVLLPLVSSQCVNLTTRTQLPPAYTNSFTRGVYYPDKVFRSSVLHSTQDLFLPFFSNVTWFHAIHVSGTNGTKRFDNPVLPFNDGVYFASTEKSNIIRGWIFGTTLDSKTQSLLIVNNATNVVIKVCEFQFCNDPFLGVYYHKNNKSWMESEFRVYSSANNCTFEYVSQPFLMDLEGKQGNFKNLREFVFKNIDGYFKIYSKHTPINLVRDLPQGFSALEPLVDLPIGINITRFQTLLALHRSYLTPGDSSSGWTAGAAAYYVGYLQPRTFLLKYNENGTITDAVDCALDPLSETKCTLKSFTVEKGIYQTSNFRVQPTESIVRFPNITNLCPFGEVFNATRFASVYAWNRKRISNCVADYSVLYNSASFSTFKCYGVSPTKLNDLCFTNVYADSFVIRGDEVRQIAPGQTGKIADYNYKLPDDFTGCVIAWNSNNLDSKVGGNYNYLYRLFRKSNLKPFERDISTEIYQAGSTPCNGVEGFNCYFPLQSYGFQPTNGVGYQPYRVVVLSFELLHAPATVCGPKKSTNLVKNKCVNFNFNGLTGTGVLTESNKKFLPFQQFGRDIADTTDAVRDPQTLEILDITPCSFGGVSVITPGTNTSNQVAVLYQGVNCTEVPVAIHADQLTPTWRVYSTGSNVFQTRAGCLIGAEHVNNSYECDIPIGAGICASYQTQTNSPRRARSVASQSIIAYTMSLGAENSVAYSNNSIAIPTNFTISVTTEILPVSMTKTSVDCTMYICGDSTECSNLLLQYGSFCTQLNRALTGIAVEQDKNTQEVFAQVKQIYKTPPIKDFGGFNFSQILPDPSKPSKRSFIEDLLFNKVTLADAGFIKQYGDCLGDIAARDLICAQKFNGLTVLPPLLTDEMIAQYTSALLAGTITSGWTFGAGAALQIPFAMQMAYRFNGIGVTQNVLYENQKLIANQFNSAIGKIQDSLSSTASALGKLQDVVNQNAQALNTLVKQLSSNFGAISSVLNDILSRLDPPEAEVQIDRLITGRLQSLQTYVTQQLIRAAEIRASANLAATKMSECVLGQSKRVDFCGKGYQLMSFPQSAPHGVVFLNVTYVPAQEKNFTTAPAICNDGKAHFPREGVFVSNGTNWFVTQRNFYEPQIITTDNTFVSGNCDVVIGIVNNTVYDPLQPELDSFKEELDKYFKNHTSPDVDLGDISGINASVVNIQKEIDRLNEVAKNLNESLIDLQELGKYEQYIKGGSGYIPEAPRDGQAYVRKDGEWVLLSTFL

SEQ ID NO: 5911 - protein, 1241 aa, Artificial Sequence
  SARS-CoV-2/Wuhan/HBCDC-HB-02/2020__EPI_ISL_412978 spike protein (1-1211)(K986P_V987P_ H1048Q_H1064N_ H1083N_H1101N) Foldon construct
MFVFLVLLPLVSSQCVNLTTRTQLPPAYTNSFTRGVYYPDKVFRSSVLHSTQDLFLPFFSNVTWFHAIHVSGTNGTKRFDNPVLPFNDGVYFASTEKSNIIRGWIFGTTLDSKTQSLLIVNNATNVVIKVCEFQFCNDPFLGVYYHKNNKSWMESEFRVYSSANNCTFEYVSQPFLMDLEGKQGNFKNLREFVFKNIDGYFKIYSKHTPINLVRDLPQGFSALEPLVDLPIGINITRFQTLLALHRSYLTPGDSSSGWTAGAAAYYVGYLQPRTFLLKYNENGTITDAVDCALDPLSETKCTLKSFTVEKGIYQTSNFRVQPTESIVRFPNITNLCPFGEVFNATRFASVYAWNRKRISNCVADYSVLYNSASFSTFKCYGVSPTKLNDLCFTNVYADSFVIRGDEVRQIAPGQTGKIADYNYKLPDDFTGCVIAWNSNNLDSKVGGNYNYLYRLFRKSNLKPFERDISTEIYQAGSTPCNGVEGFNCYFPLQSYGFQPTNGVGYQPYRVVVLSFELLHAPATVCGPKKSTNLVKNKCVNFNFNGLTGTGVLTESNKKFLPFQQFGRDIADTTDAVRDPQTLEILDITPCSFGGVSVITPGTNTSNQVAVLYQDVNCTEVPVAIHADQLTPTWRVYSTGSNVFQTRAGCLIGAEHVNNSYECDIPIGAGICASYQTQTNSPRRARSVASQSIIAYTMSLGAENSVAYSNNSIAIPTNFTISVTTEILPVSMTKTSVDCTMYICGDSTECSNFLLQYGSFCTQLNRALTGIAVEQDKNTQEVFAQVKQIYKTPPIKDFGGFNFSQILPDPSKPSKRSFIEDLLFNKVTLADAGFIKQYGDCLGDIAARDLICAQKFNGLTVLPPLLTDEMIAQYTSALLAGTITSGWTFGAGAALQIPFAMQMAYRFNGIGVTQNVLYENQKLIANQFNSAIGKIQDSLSSTASALGKLQDVVNQNAQALNTLVKQLSSNFGAISSVLNDILSRLDPPEAEVQIDRLITGRLQSLQTYVTQQLIRAAEIRASANLAATKMSECVLGQSKRVDFCGKGYQLMSFPQSAPHGVVFLNVTYVPAQEKNFTTAPAICNDGKAHFPREGVFVSNGTNWFVTQRNFYEPQIITTDNTFVSGNCDVVIGIVNNTVYDPLQPELDSFKEELDKYFKNHTSPDVDLGDISGINASVVNIQKEIDRLNEVAKNLNESLIDLQELGKYEQYIKGGSGYIPEAPRDGQAYVRKDGEWVLLSTFL

SEQ ID NO: 5912 - protein, 1241 aa, Artificial Sequence
  SARS-CoV-2/Australia/QLD02/2020__EPI_ISL_407896 spike protein (1-1211)(K986P_V987P_ H1048Q_H1064N_ H1083N_H1101N) Foldon construct
MFVFLVLLPLVSSQCVNLTTRTQLPPAYTNSFTRGVYYPDKVFRSSVLHSTQDLFLPFFSNVTWFHAIHVSGTNGTKRFDNPVLPFNDGVYFASTEKSNIIRGWIFGTTLDSKTQSLLIVNNATNVVIKVCEFQFCNDPFLGVYYHKNNKSWMESEFRVYSSANNCTFEYVSQPFLMDLEGKQGNFKNLREFVFKNIDGYFKIYSKHTPINLVRDLPQGFSALEPLVDLPIGINITRFQTLLALHRSYLTPGDSSSGWTAGAAAYYVGYLQPRTFLLKYNENGTITDAVDCALDPLSETKCTLKSFTVEKGIYQTSNFRVQPTESIVRFPNITNLCPFGEVFNATRFASVYAWNRKRISNCVADYSVLYNSASFSTFKCYGVSPTKLNDLCFTNVYADSFVIRGDEVRQIAPGQTGKIADYNYKLPDDFTGCVIAWNSNNLDSKVGGNYNYLYRLFRKSNLKPFERDISTEIYQAGSTPCNGVEGFNCYFPLQSYGFQPTNGVGYQPYRVVVLSFELLHAPATVCGPKKSTNLVKNKCVNFNFNGLTGTGVLTESNKKFLPFQQFGRDIADTTDAVRDPQTLEILDITPCSFGGVSVITPGTNTSNQVAVLYQDVNCTEVPVAIHADQLTPTWRVYSTGSNVFQTRAGCLIGAEHVNNSYECDIPIGAGICASYQTQTNSPRRARSVASQSIIAYTMSLGAENSVAYSNNSIAIPTNFTISVTTEILPVSMTKTSVDCTMYICGDSTECSNLLLQYGSFCTQLNRALTGIAVEQDKNTQEVFAQVKQIYKTPPIKDFGGFNFSQILPDPSKPSKRSFIEDLLFNKVTLADAGFIKQYGDCLGDIAARDLICAQKFNGLTVLPPLLTDEMIAQYTSALLAGTITSGWTFGAGAALQIPFAMQMAYRFNGIGVTQNVLYENQKLIANQFNSAIGKIQDSLSSTASALGKLQDVVNQNAQALNTLVKQLSSNFGAISSVLNDILSRLDPPEAEVQIDRLITGRLQSLQTYVTQQLIRAAEIRASANLAATKMSECVLGQSKRVDFCGKGYQLMSFPQSAPHGVVFLNVTYVPAQEKNFTTAPAICNDGKAHFPREGVFVSNGTNWFVTQRNFYEPQIITTDNTFVSGNCDVVIGIVNNTVYDPLQLELDSFKEELDKYFKNHTSPDVDLGDISGINASVVNIQKEIDRLNEVAKNLNESLIDLQELGKYEQYIKGGSGYIPEAPRDGQAYVRKDGEWVLLSTFL

SEQ ID NO: 5913 - protein, 1241 aa, Artificial Sequence
  SARS-CoV-2/India/1-31/2020__EPI_ISL_413523 spike protein (1-1211)(K986P_V987P_ H1048Q_H1064N_ H1083N_H1101N) Foldon construct
MFVFLVLLPLVSSQCVNLTTRTQLPPAYTNSFTRGVYYPDKVFRSSVLHSTQDLFLPFFSNVTWFHAIHVSGTNGTKRFDNPVLPFNDGVYFASTEKSNIIRGWIFGTTLDSKTQSLLIVNNATNVVIKVCEFQFCNDPFLGVYYHKNNKSWMESEFRVYSSANNCTFEYVSQPFLMDLEGKQGNFKNLREFVFKNIDGYFKIYSKHTPINLVRDLPQGFSALEPLVDLPIGINITRFQTLLALHRSYLTPGDSSSGWTAGAAAYYVGYLQPRTFLLKYNENGTITDAVDCALDPLSETKCTLKSFTVEKGIYQTSNFRVQPTESIVRFPNITNLCPFGEVFNATRFASVYAWNRKRISNCVADYSVLYNSASFSTFKCYGVSPTKLNDLCFTNVYADSFVIRGDEVRQIAPGQTGKIADYNYKLPDDFTGCVIAWNSNNLDSKVGGNYNYLYRLFRKSNLKPFERDISTEIYQAGSTPCNGVEGFNCYFPLQSYGFQPTNGVGYQPYRVVVLSFELLHAPATVCGPKKSTNLVKNKCVNFNFNGLTGTGVLTESNKKFLPFQQFGRDIADTTDAVRDPQTLEILDITPCSFGGVSVITPGTNTSNQVAVLYQDVNCTEVPVAIHADQLTPTWRVYSTGSNVFQTRAGCLIGAEHVNNSYECDIPIGAGICASYQTQTNSPRRARSVASQSIIAYTMSLGAENSVAYSNNSIAIPTNFTISVTTEILPVSMTKTSVDCTMYICGDSTECSNLLLQYGSFCTQLNRALTGIAVEQDKNTQEVFAQVKQIYKTPPIKDFGGFNFSQILPDPSKPSKRSFIEDLLFNKVTLADAGFIKQYGDCLGDIAARDLICAQKFNGLTVLPPLLTDEMIAQYTSALLAGTITSGWTFGAGAALQIPFAMQMAYRFNGIGVTQNVLYENQKLIANQFNSVIGKIQDSLSSTASALGKLQDVVNQNAQALNTLVKQLSSNFGAISSVLNDILSRLDPPEAEVQIDRLITGRLQSLQTYVTQQLIRAAEIRASANLAATKMSECVLGQSKRVDFCGKGYQLMSFPQSAPHGVVFLNVTYVPAQEKNFTTAPAICNDGKAHFPREGVFVSNGTNWFVTQRNFYEPQIITTDNTFVSGNCDVVIGIVNNTVYDPLQPELDSFKEELDKYFKNHTSPDVDLGDISGINASVVNIQKEIDRLNEVAKNLNESLIDLQELGKYEQYIKGGSGYIPEAPRDGQAYVRKDGEWVLLSTFL

SEQ ID NO: 5914 - protein, 1241 aa, Artificial Sequence
  SARS-CoV-2/Guangdong/GD2020087-P0008/2020__EPI_ISL_413863 spike protein (1-1211)(K986P_V987P_ H1048Q_H1064N_ H1083N_H1101N) Foldon construct
MFVFLVLLPLVSSQCVNLTTRTQLPPAYTNSFTRGVYYPDKVFRSSVLHSTQDLFLPFFSNVTWFHAIHVSGTNGTKRFDNPVLPFNDGVYFASTEKSNIIRGWIFGTTLDSKTQSLLIVNNATNVVIKVCEFQFCNDPFLGVYYHKNNKSWMESEFRVYSSANNCTFEYVSQPFLMDLEGKQGNFKNLREFVFKNIDGYFKIYSKHTPINLVRDLPQGFSALEPLVDLPIGINITRFQTLLALHRSYLTPGDSSSGWTAGAAAYYVGYLQPRTFLLKYNENGTITDAVDCALDPLSETKCTLKSFTVEKGIYQTSNFRVQPTESIVRFPNITNLCPFGEVFNATRFASVYAWNRKRISNCVADYSVLYNSASFSTFKCYGVSPTKLNDLCFTNVYADSFVIRGDEVREIAPGQTGKIADYNYKLPDDFTGCVIAWNSNNLDSKVGGNYNYLYRLFRKSNLKPFERDISTEIYQAGSTPCNGVEGFNCYFPLQSYGFQPTNGVGYQPYRVVVLSFELLHAPATVCGPKKSTNLVKNKCVNFNFNGLTGTGVLTESNKKFLPFQQFGRDIADTTDAVRDPQTLEILDITPCSFGGVSVITPGTNTSNQVAVLYQDVNCTEVPVAIHADQLTPTWRVYSTGSNVFQTRAGCLIGAEHVNNSYECDIPIGAGICASYQTQTNSPRRARSVASQSIIAYTMSLGAENSVAYSNNSIAIPTNFTISVTTEILPVSMTKTSVDCTMYICGDSTECSNLLLQYGSFCTQLNRALTGIAVEQDKNTQEVFAQVKQIYKTPPIKDFGGFNFSQILPDPSKPSKRSFIEDLLFNKVTLADAGFIKQYGDCLGDIAARDLICAQKFNGLTVLPPLLTDEMIAQYTSALLAGTITSGWTFGAGAALQIPFAMQMAYRFNGIGVTQNVLYENQKLIANQFNSAIGKIQDSLSSTASALGKLQDVVNQNAQALNTLVKQLSSNFGAISSVLNDILSRLDPPEAEVQIDRLITGRLQSLQTYVTQQLIRAAEIRASANLAATKMSECVLGQSKRVDFCGKGYQLMSFPQSAPHGVVFLNVTYVPAQEKNFTTAPAICNDGKAHFPREGVFVSNGTNWFVTQRNFYEPQIITTDNTFVSGNCDVVIGIVNNTVYDPLQPELDSFKEELDKYFKNHTSPDVDLGDISGINASVVNIQKEIDRLNEVAKNLNESLIDLQELGKYEQYIKGGSGYIPEAPRDGQAYVRKDGEWVLLSTFL

SEQ ID NO: 5915 - protein, 1241 aa, Artificial Sequence
  SARS-CoV-2/Sweden/01/2020__EPI_ISL_411951 spike protein (1-1211)(K986P_V987P_ H1048Q_H1064N_ H1083N_H1101N) Foldon construct
MFVFLVLLPLVSSQCVNLTTRTQLPPAYTNSFTRGVYYPDKVFRSSVLHSTQDLFLPFFSNVTWFHAIHVSGTNGTKRFDNPVLPFNDGVYFASTEKSNIIRGWIFGTTLDSKTQSLLIVNNATNVVIKVCEFQFCNDPFLGVYYHKNNKSWMESEFRVYSSANNCTFEYVSQPFLMDLEGKQGNFKNLREFVFKNIDGYFKIYSKHTPINLVRDLPQGFSALEPLVDLPIGINITRFQTLLALHRSYLTPGDSSSGWTAGAAAYYVGYLQPRTFLLKYNENGTITDAVDCALDPLSETKCTLKSFTVEKGIYQTSNFRVQPTESIVRFPNITNLCPFGEVFNATRFASVYAWNRKRISNCVADYSVLYNSASFSTFKCYGVSPTKLNDLCFTNVYADSFVIRGDEVRQIAPGQTGKIADYNYKLPDDFTGCVIAWNSNNLDSKVGGNYNYLYRLFRKSNLKPFERDISTEIYQAGSTPCNGVEGFNCYFPLQSYGFQPTNGVGYQPYRVVVLSFELLHAPATVCGPKKSTNLVKNKCVNFNFNGLTGTGVLTESNKKFLPFQQFGRDIADTTDAVRDPQTLEILDITPCSFGGVSVITPGTNTSNQVAVLYQDVNCTEVPVAIHADQLTPTWRVYSTGSNVFQTRAGCLIGAEHVNNSYECDIPIGAGICASYQTQTNSPRRARSVASQSIIAYTMSLGAENSVAYSNNSIAIPTNFTISVTTEILPVSMTKTSVDCTMYICGDSTECSNLLLQYGSFCTQLNRALTGIAVEQDKNTQEVFAQVKQIYKTPPIKDCGGFNFSQILPDPSKPSKRSFIEDLLFNKVTLADAGFIKQYGDCLGDIAARDLICAQKFNGLTVLPPLLTDEMIAQYTSALLAGTITSGWTFGAGAALQIPFAMQMAYRFNGIGVTQNVLYENQKLIANQFNSAIGKIQDSLSSTASALGKLQDVVNQNAQALNTLVKQLSSNFGAISSVLNDILSRLDPPEAEVQIDRLITGRLQSLQTYVTQQLIRAAEIRASANLAATKMSECVLGQSKRVDFCGKGYQLMSFPQSAPHGVVFLNVTYVPAQEKNFTTAPAICNDGKAHFPREGVFVSNGTNWFVTQRNFYEPQIITTDNTFVSGNCDVVIGIVNNTVYDPLQPELDSFKEELDKYFKNHTSPDVDLGDISGINASVVNIQKEIDRLNEVAKNLNESLIDLQELGKYEQYIKGGSGYIPEAPRDGQAYVRKDGEWVLLSTFL

SEQ ID NO: 5916 - protein, 1241 aa, Artificial Sequence
  SARS-CoV-2/Tianmen/HBCDC-HB-07/2020__EPI_ISL_412983 spike protein (1-1211)(K986P_V987P_ H1048Q_H1064N_ H1083N_H1101N) Foldon construct
MFVFLVLLPLVSSQCVNLTTRTQLPPAYTNSFTRGVYYPDKVFRSSVLHSTQDLFLPFFSNVTWFHAIHVSGTNGTKRFDNPVLPFNDGVYFASTEKSNIIRGWIFGTTLDSKTQSLLIVNNATNVVIKVCEFQFCNDPFLGVYYHKNNKSWMESEFRVYSSANNCTFEYVSQPFLMDLEGKQGNFKNLREFVFKNIDGYFKIYSKHTPINLVRDLPQGFSALEPLVDLPIGINITRFQTLLALHRSYLTPGDSSSGWTAGAAAYYVGYLQPRTFLLKYNENGTITDAVDCALDPLSETKCTLKSFTVEKGIYQTSNFRVQPTESIVRFPNITNLCPFGEVFNATRFASVYAWNRKRISNCVADYSVLYNSASFSTFKCYGVSPTKLNDLCFTNVYADSFVIRGDEVRQIAPGQTGKIADYNYKLPDDFTGCVIAWNSNNLDSKVGGNYNYLYRLFRKSNLKPFERDISTEIYQAGSTPCNGVEGFNCYFPLQSYGFQPTNGVGYQPYRVVVLSFELLHAPATVCGPKKSTNLVKNKCVNFNFNGLTGTGVLTESNKKFLPFQQFGRDIADTTDAVRDPQTLEILDITPCSFGGVSVITPGTNTSNQVAVLYQDLNCTEVPVAIHADQLTPTWRVYSTGSNVFQTRAGCLIGAEHVNNSYECDIPIGAGICASYQTQTNSPRRARSVASQSIIAYTMSLGAENSVAYSNNSIAIPTNFTISVTTEILPVSMTKTSVDCTMYICGDSTECSNLLLQYGSFCTQLNRALTGIAVEQDKNTQEVFAQVKQIYKTPPIKDFGGFNFSQILPDPSKPSKRSFIEDLLFNKVTLADAGFIKQYGDCLGDIAARDLICAQKFNGLTVLPPLLTDEMIAQYTSALLAGTITSGWTFGAGAALQIPFAMQMAYRFNGIGVTQNVLYENQKLIANQFNSAIGKIQDSLSSTASALGKLQDVVNQNAQALNTLVKQLSSNFGAISSVLNDILSRLDPPEAEVQIDRLITGRLQSLQTYVTQQLIRAAEIRASANLAATKMSECVLGQSKRVDFCGKGYQLMSFPQSAPHGVVFLNVTYVPAQEKNFTTAPAICNDGKAHFPREGVFVSNGTNWFVTQRNFYEPQIITTDNTFVSGNCDVVIGIVNNTVYDPLQPELDSFKEELDKYFKNHTSPDVDLGDISGINASVVNIQKEIDRLNEVAKNLNESLIDLQELGKYEQYIKGGSGYIPEAPRDGQAYVRKDGEWVLLSTFL

SEQ ID NO: 5917 - protein, 1241 aa, Artificial Sequence
  SARS-CoV-2/Hong Kong/case42_VM20002493/2020__EPI_ISL_414527 spike protein (1-1211)(K986P_V987P_ H1048Q_H1064N_ H1083N_H1101N) Foldon construct
MFVFLVLLPLVSSQCVNLTTRTQLPPAYTNSFTRGVYYPDKVFRSSVLHSTQDLFLPFFSNVTWFHAIHVSGTNGTKRFDNPVLPFNDGVYFASTEKSNIIRGWIFGTTLDSKTQSLLIVNNATNVVIKVCEFQFCNDPFLGVYYHKNNKSWMESEFRVYSSANNCTFEYVSQPFLMDLEGKQGNFKNLREFVFKNIDGYFKIYSKHTPINLVRDLPQGFSALEPLVDLPIGINITRFQTLLALHRSYLTPGDSSSGWTAGAAAYYVGYLQPRTFLLKYNENGTITDAVDCALDPLSETKCTLKSFTVEKGIYQTSNFRVQPTESIVRFPNITNLCPFGEVFNATRFASVYAWNRKRISNCVADYSVLYNSASFSTFKCYGVSPTKLNDLCFTNVYADSFVIRGDEVRQIAPGQTGKIADYNYKLPDDFTGCVIAWNSNNLDSKVGGNYNYLYRLFRKSNLKPFERDISTEIYQAGSTPCNGVEGFNCYFPLQSYGFQPTNGVGYQPYRVVVLSFELLHAPATVCGPKKSTNLVKNKCVNFNFNGLTGTGVLTESNKKFLPFQQFGRDIADTTDAVRDPQTLEILDITPCSFGGVSVITPGTNTSNQVAVLYQDVNCTEVPVAIHADQLTPTWRVYSTGSNVFQTRAGCLIGAEHVNNSYECDIPIGAGICASYQTQTNSPRRARSVASQSIIAYTMSLGAENSVAYSNNSIAIPTNFAISVTTEILPVSMTKTSVDCTMYICGDSTECSNLLLQYGSFCTQLNRALTGIAVEQDKNTQEVFAQVKQIYKTPPIKDFGGFNFSQILPDPSKPSKRSFIEDLLFNKVTLADAGFIKQYGDCLGDIAARDLICAQKFNGLTVLPPLLTDEMIAQYTSALLAGTITSGWTFGAGAALQIPFAMQMAYRFNGIGVTQNVLYENQKLIANQFNSAIGKIQDSLSSTASALGKLQDVVNQNAQALNTLVKQLSSNFGAISSVLNDILSRLDPPEAEVQIDRLITGRLQSLQTYVTQQLIRAAEIRASANLAATKMSECVLGQSKRVDFCGKGYQLMSFPQSAPHGVVFLNVTYVPAQEKNFTTAPAICNDGKAHFPREGVFVSNGTNWFVTQRNFYEPQIITTDNTFVSGNCDVVIGIVNNTVYDPLQPELDSFKEELDKYFKNHTSPDVDLGDISGINASVVNIQKEIDRLNEVAKNLNESLIDLQELGKYEQYIKGGSGYIPEAPRDGQAYVRKDGEWVLLSTFL

SEQ ID NO: 5918 - protein, 1241 aa, Artificial Sequence
  SARS-CoV-2/USA/CruiseA-23/2020__EPI_ISL_414482 spike protein (1-1211)(K986P_V987P_ H1048Q_H1064N_ H1083N_H1101N) Foldon construct
MFVFLVLLPLVSSQCVNLTTRTQLPPAYTNSFTRGVYYPDKVFRSSVLHSTQDLFLPFFSNVTWFHAIHVSGTNGTKRFDNPVLPFNDGVYFASTEKSNIIRGWIFGTTLDSKTQSLLIVNNATNVVIKVCEFQFCNDPFLGVYYHKNNKSWMESEFRVYSSANNCTFEYVSQPFLMDLEVKQGNFKNLREFVFKNIDGYFKIYSKHTPINLVRDLPQGFSALEPLVDLPIGINITRFQTLLALHRSYLTPGDSSSGWTAGAAAYYVGYLQPRTFLLKYNENGTITDAVDCALDPLSETKCTLKSFTVEKGIYQTSNFRVQPTESIVRFPNITNLCPFGEVFNATRFASVYAWNRKRISNCVADYSVLYNSASFSTFKCYGVSPTKLNDLCFTNVYADSFVIRGDEVRQIAPGQTGKIADYNYKLPDDFTGCVIAWNSNNLDSKVGGNYNYLYRLFRKSNLKPFERDISTEIYQAGSTPCNGVEGFNCYFPLQSYGFQPTNGVGYQPYRVVVLSFELLHAPATVCGPKKSTNLVKNKCVNFNFNGLTGTGVLTESNKKFLPFQQFGRDIADTTDAVRDPQTLEILDITPCSFGGVSVITPGTNTSNQVAVLYQDVNCTEVPVAIHADQLTPTWRVYSTGSNVFQTRAGCLIGAEHVNNSYECDIPIGAGICASYQTQTNSPRRARSVASQSIIAYTMSLGAENSVAYSNNSIAIPTNFTISVTTEILPVSMTKTSVDCTMYICGDSTECSNLLLQYGSFCTQLNRALTGIAVEQDKNTQEVFAQVKQIYKTPPIKDFGGFNFSQILPDPSKPSKRSFIEDLLFNKVTLADAGFIKQYGDCLGDIAARDLICAQKFNGLTVLPPLLTDEMIAQYTSALLAGTITSGWTFGAGAALQIPFAMQMAYRFNGIGVTQNVLYENQKLIANQFNSAIGKIQDSLSSTASALGKLQDVVNQNAQALNTLVKQLSSNFGAISSVLNDILSRLDPPEAEVQIDRLITGRLQSLQTYVTQQLIRAAEIRASANLAATKMSECVLGQSKRVDFCGKGYQLMSFPQSAPHGVVFLNVTYVPAQEKNFTTAPAICNDGKAHFPREGVFVSNGTNWFVTQRNFYEPQIITTDNTFVSGNCDVVIGIVNNTVYDPLQPELDSFKEELDKYFKNHTSPDVDLGDISGINASVVNIQKEIDRLNEVAKNLNESLIDLQELGKYEQYIKGGSGYIPEAPRDGQAYVRKDGEWVLLSTFL

SEQ ID NO: 5919 - protein, 1241 aa, Artificial Sequence
  SARS-CoV-2/Hong Kong/case85_VM20002868/2020__EPI_ISL_414519 spike protein (1-1211)(K986P_V987P_ H1048Q_H1064N_ H1083N_H1101N) Foldon construct
MFVFLVLVPLVSSQCVNLTTRTQLPPAYTNSFTRGVYYPDKVFRSSVLHSTQDLFLPFFSNVTWFHAIHVSGTNGTKRFDNPVLPFNDGVYFASTEKSNIIRGWIFGTTLDSKTQSLLIVNNATNVVIKVCEFQFCNDPFLGVYYHKNNKSWMESEFRVYSSANNCTFEYVSQPFLMDLEGKQGNFKNLREFVFKNIDGYFKIYSKHTPINLVRDLPQGFSALEPLVDLPIGINITRFQTLLALHRSYLTPGDSSSGWTAGAAAYYVGYLQPRTFLLKYNENGTITDAVDCALDPLSETKCTLKSFTVEKGIYQTSNFRVQPTESIVRFPNITNLCPFGEVFNATRFASVYAWNRKRISNCVADYSVLYNSASFSTFKCYGVSPTKLNDLCFTNVYADSFVIRGDEVRQIAPGQTGKIADYNYKLPDDFTGCVIAWNSNNLDSKVGGNYNYLYRLFRKSNLKPFERDISTEIYQAGSTPCNGVEGFNCYFPLQSYGFQPTNGVGYQPYRVVVLSFELLHAPATVCGPKKSTNLVKNKCVNFNFNGLTGTGVLTESNKKFLPFQQFGRDIADTTDAVRDPQTLEILDITPCSFGGVSVITPGTNTSNQVAVLYQDVNCTEVPVAIHADQLTPTWRVYSTGSNVFQTRAGCLIGAEHVNNSYECDIPIGAGICASYQTQTNSPRRARSVASQSIIAYTMSLGAENSVAYSNNSIAIPTNFTISVTTEILPVSMTKTSVDCTMYICGDSTECSNLLLQYGSFCTQLNRALTGIAVEQDKNTQEVFAQVKQIYKTPPIKDFGGFNFSQILPDPSKPSKRSFIEDLLFNKVTLADAGFIKQYGDCLGDIAARDLICAQKFNGLTVLPPLLTDEMIAQYTSALLAGTITSGWTFGAGAALQIPFAMQMAYRFNGIGVTQNVLYENQKLIANQFNSAIGKIQDSLSSTASALGKLQDVVNQNAQALNTLVKQLSSNFGAISSVLNDILSRLDPPEAEVQIDRLITGRLQSLQTYVTQQLIRAAEIRASANLAATKMSECVLGQSKRVDFCGKGYQLMSFPQSAPHGVVFLNVTYVPAQEKNFTTAPAICNDGKAHFPREGVFVSNGTNWFVTQRNFYEPQIITTDNTFVSGNCDVVIGIVNNTVYDPLQPELDSFKEELDKYFKNHTSPDVDLGDISGINASVVNIQKEIDRLNEVAKNLNESLIDLQELGKYEQYIKGGSGYIPEAPRDGQAYVRKDGEWVLLSTFL

SEQ ID NO: 5920 - protein, 1241 aa, Artificial Sequence; identical to SEQ ID NO: 5910
  SARS-CoV-2/England/200990660/2020__EPI_ISL_414523 spike protein (1-1211)(K986P_V987P_ H1048Q_H1064N_ H1083N_H1101N) Foldon construct

SEQ ID NO: 5921 - protein, 1241 aa, Artificial Sequence
  SARS-CoV-2/Australia/NSW09/2020__EPI_ISL_413595 spike protein (1-1211)(K986P_V987P_ H1048Q_H1064N_ H1083N_H1101N) Foldon construct
MFVFLVLLPLVSSQCVNLTTRTQLPPAYTNSFTRGVYYPDKVFRSSVLHSTQDLFLPFFSNVTWFHAIHVSGTNGTKRFDNPVLPFNDGVYFASTEKSNIIRGWIFGTTLDSKTQSLLIVNNATNVVIKVCEFQFCNDPFLGVYYHKNNKSWMESEFRVYSSANNCTFEYVSQPFLMDLEGKQGNFKNLREFVFKNIDGYFKIYSKHTPINLVRDLPQGFSALEPLVDLPIGINITRFQTLLALHRSYLTPGDSSSGWTAGAAAYYVGYLQPRTFLLKYNENGTITDAVDCALDPLSETKCTLKSFTVEKGIYQTSNFRVQPTESIVRFPNITNLCPFGEVFNATRFASVYAWNRKRISNCVADYSVLYNSASFSTFKCYGVSPTKLNDLCFTNVYADSFVIRGDEVRQIAPGQTGKIADYNYKLPDDFTGCVIAWNSNNLDSKVGGNYNYLYRLFRKSNLKPFERDISTEIYQAGSTPCNGVEGFNCYFPLQSYGFQPTNGVGYQPYRVVVLSFELLHAPATVCGPKKSTNLVKNKCVNFNFNGLTGTGVLTESNKKFLPFQQFGRDIADTTDAVRDPQTLEILDITPCSFGGVSVITPGTNTSNQVAVLYQDVNCTEVPVAIHADQLTPTWRVYSTGSNVFQTRAGCLIGAEHVNNSYECDIPIGAGICASYQTQTNSPRRARSVASQSIIAYTMSLGAENSVAYSNNSIAIPTNFTISVTTEILPVSMTKTSVDCTMYICGDSTECSNLLLQYGSFCTQLNRALTGIAVEQDKNTQEVFAQVKQIYKTPPIKDFGGFNFSQILPDPSKPSKRSFIEDLLFNKVTLADAGFIKQYGDCLGDIAARDLICAQKFNGLTVLPPLLTDEMIAQYTSALLAGTITSGWTFGAGAALQIPFAMQMAYRFNGIGVTQNVLYENQKLIANQFNSAIGKIQDSLSFTASALGKLQDVVNQNAQALNTLVKQLSSNFGAISSVLNDILSRLDPPEAEVQIDRLITGRLQSLQTYVTQQLIRAAEIRASANLAATKMSECVLGQSKRVDFCGKGYQLMSFPQSAPHGVVFLNVTYVPAQEKNFTTAPAICNDGKAHFPREGVFVSNGTNWFVTQRNFYEPQIITTDNTFVSGNCDVVIGIVNNTVYDPLQPELDSFKEELDKYFKNHTSPDVDLGDISGINASVVNIQKEIDRLNEVAKNLNESLIDLQELGKYEQYIKGGSGYIPEAPRDGQAYVRKDGEWVLLSTFL

SEQ ID NO: 5922 - protein, 1241 aa, Artificial Sequence; identical to SEQ ID NO: 5902
  SARS-CoV-2/Australia/NSW10/2020__EPI_ISL_413596 spike protein (1-1211)(K986P_V987P_ H1048Q_H1064N_ H1083N_H1101N) Foldon construct

SEQ ID NO: 5923 - protein, 1241 aa, Artificial Sequence
  SARS-CoV-2/Switzerland/1000477797/2020__EPI_ISL_413023 spike protein (1-1211)(K986P_V987P_ H1048Q_H1064N_ H1083N_H1101N) Foldon construct
MFVFLVLLPLVSSQCVNLTTRTQLPPAYTNSFTRGVYYPDKVFRSSVLHSTQDLFLPFFSNVTWFHAIHVSGTNGTKRFDNPVLPFNDGVYFASTEKSNIIRGWIFGTTLDSKTQSLLIVNNATNVVIKVCEFQFCNDPFLGVYYHKNNKSWMESEFRVYSSANNCTFEYVSQPFLMDLEGKQGNFKNLREFVFKNIDGYFNIYSKHTPINLVRDLPQGFSALEPLVDLPIGINITRFQTLLALHRSYLTPGDSSSGWTAGAAAYYVGYLQPRTFLLKYNENGTITDAVDCALDPLSETKCTLKSFTVEKGIYQTSNFRVQPTESIVRFPNITNLCPFGEVFNATRFASVYAWNRKRISNCVADYSVLYNSASFSTFKCYGVSPTKLNDLCFTNVYADSFVIRGDEVRQIAPGQTGKIADYNYKLPDDFTGCVIAWNSNNLDSKVGGNYNYLYRLFRKSNLKPFERDISTEIYQAGSTPCNGVEGFNCYFPLQSYGFQPTNGVGYQPYRVVVLSFELLHAPATVCGPKKSTNLVKNKCVNFNFNGLTGTGVLTESNKKFLPFQQFGRDIADTTDAVRDPQTLEILDITPCSFGGVSVITPGTNTSNQVAVLYQGVNCTEVPVAIHADQLTPTWRVYSTGSNVFQTRAGCLIGAEHVNNSYECDIPIGAGICASYQTQTNSPRRARSVASQSIIAYTMSLGAENSVAYSNNSIAIPTNFTISVTTEILPVSMTKTSVDCTMYICGDSTECSNLLLQYGSFCTQLNRALTGIAVEQDKNTQEVFAQVKQIYKTPPIKDFGGFNFSQILPDPSKPSKRSFIEDLLFNKVTLADAGFIKQYGDCLGDIAARDLICAQKFNGLTVLPPLLTDEMIAQYTSALLAGTITSGWTFGAGAALQIPFAMQMAYRFNGIGVTQNVLYENQKLIANQFNSAIGKIQDSLSSTASALGKLQDVVNQNAQALNTLVKQLSSNFGAISSVLNDILSRLDPPEAEVQIDRLITGRLQSLQTYVTQQLIRAAEIRASANLAATKMSECVLGQSKRVDFCGKGYQLMSFPQSAPHGVVFLNVTYVPAQEKNFTTAPAICNDGKAHFPREGVFVSNGTNWFVTQRNFYEPQIITTDNTFVSGNCDVVIGIVNNTVYDPLQPELDSFKEELDKYFKNHTSPDVDLGDISGINASVVNIQKEIDRLNEVAKNLNESLIDLQELGKYEQYIKGGSGYIPEAPRDGQAYVRKDGEWVLLSTFL

SEQ ID NO: 5924 - protein, 1241 aa, Artificial Sequence
  SARS-CoV-2/Belgium/BA-02291/2020__EPI_ISL_415159 spike protein (1-1211)(K986P_V987P_ H1048Q_H1064N_ H1083N_H1101N) Foldon construct
MFVFLVLLPLVSSQCVNLTTRTQLPPAYTNSFTRGVYYPDKVFRSSVLHSTQDLFLPFFSNVTWFHAIHVSGTNGTKRFDNPVLPFNDGVYFASTEKSNIIRGWIFGTTLDSKTQSLLIVNNATNVVIKVCEFQFCNDPFLGVYYHKNNKSWMESEFRVYSSANNCTFEYVSQPFLMDLEGKQGNFKNLREFVFKNIDGYFKIYSKHTPINLVRDLPQGFSALEPLVDLPIGINITRFQTLLALHRSYLTPGDSSSGWTAGAAAYYVGYLQPRTFLLKYNENGTITDAVDCALDPLSETKCTLKSFTVEKGIYQTSNFRVQPTESIVRFPNITNLCPFGEVFNATRFASVYAWNRKRISNCVADYSVLYNSASFSTFKCYGVSPTKLNDLCFTNVYADSFVIRGDEVRQIAPGQTGKIADYNYKLPDDFTGCVIAWNSNNLDSKVGGNYNYLYRLFRRSNLKPFERDISTEIYQAGSTPCNGVEGFNCYFPLQSYGFQPTNGVGYQPYRVVVLSFELLPAPATVCGPKKSTNLVKNKCVNFNFNGLTGTGVLTESNKKFLPFQQFGRDIADTTDAVRDPQTLEILDITPCSFGGVSVITPGTNTSNQVAVLYQGVNCTEVPVAIHADQLTPTWRVYSTGSNVFQTRAGCLIGAEHVNNSYECDIPIGAGICASYQTQTNSPRRARSVASQSIIAYTMSLGAENSVAYSNNSIAIPTNFTISVTTEILPVSMTKTSVDCTMYICGDSTECSNLLLQYGSFCTQLNRALTGIAVEQDKNTQEVFAQVKQIYKTPPIKDFGGFNFSQILPDPSKPSKRSFIEDLLFNKVTLADAGFIKQYGDCLGDIAARDLICAQKFNGLTVLPPLLTDEMIAQYTSALLAGTITSGWTFGAGAALQIPFAMQMAYRFNGIGVTQNVLYENQKLIANQFNSAIGKIQDSLSSAAPALGKLQDVVNQNAQALNTLVKQLSSNFGAISSVLNDILSRLDPPEAEVQIDRLITGRLQSLQTYVTQQLIRAAEIRASANLAATKMSECVLGQSKRVDFCGKGYQLMSFPQSAPHGVVFLNVTYVPAQEKNFTTAPAICNDGKAHFPREGVFVSNGTNWFVTQRNFYEPQIITTDNTFVSGNCDVVIGIVNNTVYDPLQPELDSFKEELDKYFKNHTSPDVDLGDISGINASVVNIQKEIDRLNEVAKNLNESLIDLQELGKYEQYIKGGSGYIPEAPRDGQAYVRKDGEWVLLSTFL

SEQ ID NO: 5925 - protein, 1241 aa, Artificial Sequence
  SARS-CoV-2/USA/WA8-UW5/2020__EPI_ISL_413486 spike protein (1-1211)(K986P_V987P_ H1048Q_H1064N_ H1083N_H1101N) Foldon construct
MFVFLVLLPLVSSQCVNLTTRTQLPPAYTNSFTRGVYYPDKVFRSSVLHSTQDLFLPFFSNVTWFHAIHVSGTNGTKRFDNPVLPFNDGVYFASTEKSNIIRGWIFGTTLDSKTQSLLIVNNATNVVIKVCEFQFCNDPFLGVYYHKNNKSWMESEFRVYSSANNCTFEYVSQPFLMDLEGKQGNFKNLREFVFKNIDGYFKIYSKHTPINLVRDLPQGFSALEPLVDLPIGINITRFQTLLALHRSYLTPGDSSSGWTAGAAAYYVGYLQPRTFLLKYNENGTITDAVDCALDPLSETKCTLKSFTVEKGIYQTSNFRVQPTESIVRFPNITNLCPFGEVFNATRFASVYAWNRKRISNCVADYSVLYNSASFSTFKCYGVSPTKLNDLCFTNVYADSFVIRGDEVRQIAPGQTGKIADYNYKLPDDFTGCVIAWNSNNLDSKVGGNYNYLYRLFRKSNLKPFERDISTEIYQAGSTPCNGVEGFNCYFPLQSYGFQPTNGVGYQPYRVVVLSFELLHAPATVCGPKKSTNLVKNKCVNFNFNGLTGTGVLTESNKKFLPFQQFGRDIADTTDAVRDPQTLEILDITPCSFGGVSVITPGTNTSNQVAVLYQDVNCTEVPVAIHADQLTPTWRVYSTGSNVFQTRAGCLIGAEYVNNSYECDIPIGAGICASYQTQTNSPRRARSVASQSIIAYTMSLGAENSVAYSNNSIAIPTNFTISVTTEILPVSMTKTSVDCTMYICGDSTECSNLLLQYGSFCTQLNRALTGIAVEQDKNTQEVFAQVKQIYKTPPIKDFGGFNFSQILPDPSKPSKRSFIEDLLFNKVTLADAGFIKQYGDCLGDIAARDLICAQKFNGLTVLPPLLTDEMIAQYTSALLAGTITSGWTFGAGAALQIPFAMQMAYRFNGIGVTQNVLYENQKLIANQFNSAIGKIQDSLSSTASALGKLQDVVNQNAQALNTLVKQLSSNFGAISSVLNDILSRLDPPEAEVQIDRLITGRLQSLQTYVTQQLIRAAEIRASANLAATKMSECVLGQSKRVDFCGKGYQLMSFPQSAPHGVVFLNVTYVPAQEKNFTTAPAICNDGKAHFPREGVFVSNGTNWFVTQRNFYEPQIITTDNTFVSGNCDVVIGIVNNTVYDPLQPELDSFKEELDKYFKNHTSPDVDLGDISGINASVVNIQKEIDRLNEVAKNLNESLIDLQELGKYEQYIKGGSGYIPEAPRDGQAYVRKDGEWVLLSTFL

SEQ ID NO: 5926 - protein, 1241 aa, Artificial Sequence
  SARS-CoV-2/England/20102000506/2020__EPI_ISL_415147 spike protein (1-1211)(K986P_V987P_ H1048Q_H1064N_ H1083N_H1101N) Foldon construct
MFVFLVLLPLVSSQCVNLTTRTQLPPAYTNSFTRGVYYPDKVFRSSVLHSTQDLFLPFFSNVTWFHAIHVSGTNGTKRFDNPVLPFNDGVYFASTEKSNIIRGWIFGTTLDSKTQSLLIVNNATNVVIKVCEFQFCNDPFLGVYYHKNNKSWMESEFRVYSSANNCTFEYVSQPFLMDLEGKQGNFKNLREFVFKNIDGYFKIYSKHTPINLVRDLPQGFSALEPLVDLPIGINITRFQTLLALHRSYLTPGDSSSGWTAGAAAYYVGYLQPRTFLLKYNENGTITDAVDCALDPLSETKCTLKSFTVEKGIYQTSNFRVQPTESIVRFPNITNLCPFGEVFNATRFASVYAWNRKRISNCVADYSVLYNSASFSTFKCYGVSPTKLNDLCFTNVYADSFVIRGDEVRQIAPGQTGKIADYNYKLPDDFTGCVIAWNSNNLDSKVGGNYNYLYRLFRKSNLKPFERDISTEIYQAGSTPCNGVEGFNCYFPLQSYGFQPTNGVGYQPYRVVVLSFELLHAPATVCGPKKSTNLVKNKCVNFNFNGLTGTGVLTESNKKFLPFQQFGRDIADTTDAVRDPQTLEILDITPCSFGGVSVITPGTNTSNQVAVLYQGVNCTEVPVAIHADQLTPTWRVYSTGSNVFQTRAGCLIGAEHVNNSYECDIPIGAGICASYQTQTNSPRRARSVASQSIIAYTMSLGAENSVAYSNNSIAIPTNFTISVTTEILPVSMTKTSVDCTMYICGDSTECSNLLLQYGSFCTQLNRALTGIAVEQDKNTQEVFAQVKQIYKTPPIKDFGGFNFSQILPDPSKPSKRSFIEDLLFNKVTLADAGFIKQYGYCLGDIAARDLICAQKFNGLTVLPPLLTDEMIAQYTSALLAGTITSGWTFGAGAALQIPFAMQMAYRFNGIGVTQNVLYENQKLIANQFNSAIGKIQDSLSSTASALGKLQDVVNQNAQALNTLVKQLSSNFGAISSVLNDILSRLDPPEAEVQIDRLITGRLQSLQTYVTQQLIRAAEIRASANLAATKMSECVLGQSKRVDFCGKGYQLMSFPQSAPHGVVFLNVTYVPAQEKNFTTAPAICNDGKAHFPREGVFVSNGTNWFVTQRNFYEPQIITTDNTFVSGNCDVVIGIVNNTVYDPLQPELDSFKEELDKYFKNHTSPDVDLGDISGINASVVNIQKEIDRLNEVAKNLNESLIDLQELGKYEQYIKGGSGYIPEAPRDGQAYVRKDGEWVLLSTFL

SEQ ID NO: 5927 - protein, 1241 aa, Artificial Sequence
  SARS-CoV-2/Belgium/VAG-03013/2020__EPI_ISL_415155 spike protein (1-1211)(K986P_V987P_ H1048Q_H1064N_ H1083N_H1101N) Foldon construct
MFVFLVLLPLVSSQCVNLTTRTQLPPAYTNSFTRGVYYPDKVFRSSVLHSTQDLFLPFFSNVTWFHAIHVSGTNGTKRFDNPVLPFNDGVYFASTEKSNIIRGWIFGTTLDSKTQSLLIVNNATNVVIKVCEFQFCNDPFLGVYYHKNNKSWMESEFRVYSSANNCTFEYVSQPFLMDLEGKQGNFKNLREFVFKNIDGYFKIYSKHTPINLVRDLPQGFSALEPLVDLPIGINITRFQTLLALHRSYLTPGDSSSGWTAGAAAYYVGYLQPRTFLLKYNENGTITDAVDCALDPLSETKCTLKSFTVEKGIYQTSNFRVQPTESIVRFPNITNLCPFGEVFNATRFASVYAWNRKRISNCVADYSVLYNSASFSTFKCYGVSPTKLNDLCFTNVYADSFVIRGDEVRQIAPGQTGKIADYNYKLPDDFTGCVIAWNSNNLDSKVGGNYNYLYRLFRKSNLKPFERDISTEIYQAGSTPCNGVEGFNCYFPLQSYGFQPTNGVGYQPYRVVVLSFELLHAPATVCGPKKSTNLVKNKCVNFNFNGLTGTGVLTESNKKFLPFQQFGRDIADTTDAVRDPQTLEILDITPCSFGGVSVITPGTNTSNQVAVLYQGVNCTEVPVAIHADQLTPTWRVYSTGSNVFQTRAGCLIGAEHVNNSYECDIPIGAGICASYQTQTNSPRRARSVASQSIIAYTMSLGAENSVAYSNNSIAIPTNFTISVTTEILPVSMTKTSVDCTMYICGDSTECSNLLLQYGSFCTQLNRALTGIAVEQDKNTQEVFAQVKQIYKTPPIKDFGGFNFSQILPDPSKPSKRSFIEDLLFNKVTLADAGFIKQYGDCLGDIAARDLICAQKFNGLTVLPPLLTDEMIAQYTSALLAGTITSGWTFGAGAALQIPFAMQMAYRFNGIGVTQNVLYENQKLIANQFNSAIGKIQDSLSSTATALGKLQDVVNQNAQALNTLVKQLSSNFGAISSVLNDILSRLDPPEAEVQIDRLITGRLQSLQTYVTQQLIRAAEIRASANLAATKMSECVLGQSKRVDFCGKGYQLMSFPQSAPHGVVFLNVTYVPAQEKNFTTAPAICNDGKAHFPREGVFVSNGTNWFVTQRNFYEPQIITTDNTFVSGNCDVVIGIVNNTVYDPLQPELDSFKEELDKYFKNHTSPDVDLGDISGINASVVNIQKEIDRLNEVAKNLNESLIDLQELGKYEQYIKGGSGYIPEAPRDGQAYVRKDGEWVLLSTFL

SEQ ID NO: 5928 - protein, 1241 aa, Artificial Sequence
  SARS-CoV-2/Belgium/BC-03016/2020__EPI_ISL_415157 spike protein (1-1211)(K986P_V987P_ H1048Q_H1064N_ H1083N_H1101N) Foldon construct
MFVFLVLLPLVSSQCVNLTTRTQLPPAYTNSFTRGVYYPDKVFRSSVLHSTQDLFLPFFSNVTWFHAIHVSGTNGTKRFDNPVLPFNDGVYFASTEKSNIIRGWIFGTTLDSKTQSLLIVNNATNVVIKVCEFQFCNDPFLGVYYHKNNKSWMESEFRVYSSANNCTFEYVSQPFLMDLEGKQGNFKNLREFVFKNIDGYFKIYSKHTPINLVRDLPQGFSALEPLVDLPIGINITRFQTLLALHRSYLTPGDSSSGWTAGAAAYYVGYLQPRTFLLKYNENGTITDAVDCALDPLSETKCTLKSFTVEKGIYQTSNFRVQPTESIVRFPNITNLCPFGEVFNATRFASVYAWNRKRISNCVADYSVLYNSASFSTFKCYGVSPTKLNDLCFTNVYADSFVIRGDEVRQIAPGQTGKIADYNYKLPDDFTGCVIAWNSNNLDSKVGGNYNYLYRLFRKSNLKPFERDISTEIYQAGSTPCNGVEGFNCYFPLQSYGFQPTNGVGYQPYRVVVLSFELLHAPATVCGPKKSTNLVKNKCVNFNFNGLTGTGVLTESNKKFLPFQQFGRDIADTTDAVRDPQTLEILDITPCSFGGVSVITPGTNTSNQVAVLYQGVNCTEVPVAIHADQLTPTWRVYSTGSNVFQTRAGCLIGAEHVNNSYECDIPIGAGICASYQTQTNSPRRARSVASQSIIAYTMSLGAENSVAYSNNSIAIPTNFTISVTTEILPVSMTKTSVDCTMYICGDSTECSNLLLQYGSFCTQLNRALTGIAVEQDKNTQEVFAQVKQIYKTPPIKDFGGFNFSQILPDPSKPSKRSFIEDLLFNKVTLADAGFIKQYGDCLGDIAARDLICAQKFNGLTVLPPLLTDEMIAQYTSALLAGTITSGWTFGAGAALQIPFAMQMAYRFNGIGVTQNVLYENQKLIANQFNSAIGKIQDSLSSTAPALGKLQDVVNQNAQALNTLVKQLSSNFGAISSVLNDILSRLDPPEAEVQIDRLITGRLQSLQTYVTQQLIRAAEIRASANLAATKMSECVLGQSKRVDFCGKGYQLMSFPQSAPHGVVFLNVTYVPAQEKNFTTAPAICNDGKAHFPREGVFVSNGTNWFVTQRNFYEPQIITTDNTFVSGNCDVVIGIVNNTVYDPLQPELDSFKEELDKYFKNHTSPDVDLGDISGINASVVNIQKEIDRLNEVAKNLNESLIDLQELGKYEQYIKGGSGYIPEAPRDGQAYVRKDGEWVLLSTFL

SEQ ID NO: 5929 - protein, 1241 aa, Artificial Sequence
  SARS-CoV-2/Germany/BavPat3/2020__EPI_ISL_414521 spike protein (1-1211)(K986P_V987P_ H1048Q_H1064N_ H1083N_H1101N) Foldon construct
MFVFLVLLPLVSSQCVNLTTRTQLPPAYTNSFTRGVYYPDKVFRSSVLHSTQDLFLPFFSNVTWFHAIHVSGTNGTKRFDNPVLPFNDGVYFASTEKSNIIRGWIFGTTLDSKTQSLLIVNNATNVVIKVCEFQFCNDPFLGVYYHKNNKSWMESEFRVYSSANNCTFEYVSQPFLMDLEGKQGNFKNLREFVFKNIDGYFKIYSKHTPINLVRDLPQGFSALEPLVDLPIGINITRFQTLLALHRSYLTPGDSSSGWTAGAAAYYVGYLQPRTFLLKYNENGTITDAVDCALDPLSETKCTLKSFTVEKGIYQTSNFRVQPTESIVRFPNITNLCPFGEVFNATRFASVYAWNRKRISNCVADYSVLYNSASFSTFKCYGVSPTKLNDLCFTNVYADSFVIRGDEVRQIAPGQTGKIADYNYKLPDDFTGCVIAWNSNNLDSKVGGNYNYLYRLFRKSNLKPFERDISTEIYQAGSTPCNGVEGFNCYFPLQSYGFQPTNGVGYQPYRVVVLSFELLHAPATVCGPKKSTNLVKNKCVNFNFNGLTGTGVLTESNKKFLPFQQFGRDIADTTDAVRDPQTLEILDITPCSFGGVSVITPGTNTSNQVAVLYQDVNCTEVPVAIHADQLTPTWRVYSTGSNVFQTRAGCLIGAEHVNNSYECDIPIGAGICASYQTQTNSPRRARSVASQSIIAYTMSLGAENSVAYSNNSIAIPTNFTISVTTEILPVSMTKTSVDCTMYICGDSTECSNLLLQYGSFCTQLNRALTGIAVEQDKNTQQVFAQVKQIYKTPPIKDFGGFNFSQILPDPSKPSKRSFIEDLLFNKVTLADAGFIKQYGDCLGDIAARDLICAQKFNGLTVLPPLLTDEMIAQYTSALLAGTITSGWTFGAGAALQIPFAMQMAYRFNGIGVTQNVLYENQKLIANQFNSAIGKIQDSLSSTASALGKLQDVVNQNAQALNTLVKQLSSNFGAISSVLNDILSRLDPPEAEVQIDRLITGRLQSLQTYVTQQLIRAAEIRASANLAATKMSECVLGQSKRVDFCGKGYQLMSFPQSAPHGVVFLNVTYVPAQEKNFTTAPAICNDGKAHFPREGVFVSNGTNWFVTQRNFYEPQIITTDNTFVSGNCDVVIGIVNNTVYDPLQPELDSFKEELDKYFKNHTSPDVDLGDISGINASVVNIQKEIDRLNEVAKNLNESLIDLQELGKYEQYIKGGSGYIPEAPRDGQAYVRKDGEWVLLSTFL

SEQ ID NO: 5930 - protein, 1241 aa, Artificial Sequence
  SARS-CoV-2/France/HF1805/2020__EPI_ISL_414628 spike protein (1-1211)(K986P_V987P_ H1048Q_H1064N_ H1083N_H1101N) Foldon construct
MFVFLVLLPLVSSQCVNLTTRTQLPPAYTNSFTRGVYYPDKVFRSSVLHSTQDLFLPFFSNVTWFHAIHVSGTNGTKRFDNPVLPFNDGVYFASTEKSNIIRGWIFGTTLDSKTQSLLIVNNATNVVIKVCEFQFCNDPFLGVYYHKNNKSWMESEFRVYSSANNCTFEYVSQPFLMDLEGKQGNFKNLREFVFKNIDGYFKIYSKHTPINLVRDLPQGFSALEPLVDLPIGINITRFQTLLALHRSYLTPGDSSSGWTAGAAAYYVGYLQPRTFLLKYNENGTITDAVDCALDPLSETKCTLKSFTVEKGIYQTSNFRVQPTESIVRFPNITNLCPFGEVFNATRFASVYAWNRKRISNCVADYSVLYNSASFSTFKCYGVSPTKLNDLCFTNVYADSFVIRGDEVRQIAPGQTGKIADYNYKLPDDFTGCVIAWNSNNLDSKVGGNYNYLYRLFRKSNLKPFERDISTEIYQAGSTPCNGVEGFNCYFPLQSYGFQPTNGVGYQPYRVVVLSFELLHAPATVCGPKKSTNLVKNKCVNFNFNGLTGTGVLTESNKKFLPFQQFGRDIADTTDAVRDPQTLEILDITPCSFGGVSVITPGTNTSNQVAVLYQGVNCTEVPVAIHADQLTPTWRVYSTGSNVFQTRAGCLIGAEHVNNSYECDIPIGAGICASYQTQTNSPRRARSVASQSIIAYTMSLGAENSVAYSNNSIAIPTNFTISVTTEILPVSMTKTSVDCTMYICGDSTECSNLLLQYGSFCTQLNRALTGIAVEQDKNTQEVFAQVKQIYKTPPIKDFGGFNFSQILPDPSKPSKRSFIEDLLFNKVTLADAGFIKQYGDCLGDIAARDLICAQKFNGLTVLPPLLTDEMIAQYTSALLAGTITSGWTFGAGAALQIPFAMQMAYRFNGIGVTQNVLYENQKLIANQFNSAIGKIQDSLSSTASALGKLQDVVNQNAQALNTLVKQLSSNFGAISSVLNDILSRLDPPEAEVQIDRLITGRLQSLQTYVTQQLIRAAEIRASANLAATKMSECVLGQSKRVDFCGKGYQLMSFPQSAPHGVVFLNVTYVPAQEKNFTTAPAICNDGKAHFPREGVFVSNGTNWFVTQRNFYEPQIITTDNTFVSGNCDVVIGVVNNTVYDPLQPELDSFKEELDKYFKNHTSPDVDLGDISGINASVVNIQKEIDRLNEVAKNLNESLIDLQELGKYEQYIKGGSGYIPEAPRDGQAYVRKDGEWVLLSTFL

SEQ ID NO: 5931 - protein, 1241 aa, Artificial Sequence
  SARS-CoV-2/Netherlands/ZuidHolland_9/2020__EPI_ISL_414445 spike protein (1-1211)(K986P_V987P_ H1048Q_H1064N_ H1083N_H1101N) Foldon construct
MFVFLVLLPLVSSQCVNLTTRTQLPPAYTNSFTRGVYYPDKVFRSSVLHSTQDLFLPFFSNVTWFHAIHVSGTNGTKRFDNPVLPFNDGVYFASTEKSNIIRGWIFGTTLDSKTQSLLIVNNATNVVIKVCEFQFCNDPFLGVYYHKNNKSWMESEFRVYSSANNCTFEYVSQPFLMDLEGKQGNFKNLREFVFKNIDGYFKIYSKHTPINLVRDLPQGFSALEPLVDLPIGINITRFQTLLALHRSYLTPGDSSSGWTAGAAAYYVGYLQPRTFLLKYNENGTITDAVDCALDPLSETKCTLKSFTVEKGIYQTSNFRVQPTESIVRFPNITNLCPFGEVFNATRFASVYAWNRKRISNCVADYSVLYNSASFSTFKCYGVSPTKLNDLCFTNVYADSFVIRGDEVRQIAPGQTGKIADYNYKLPDDFTGCVIAWNSNNLDSKVGGNYNYLYRLFRKSNLKPFERDISTEIYQAGSTPCNGVEGFNCYFPLQSYGFQPTNGVGYQPYRVVVLSFELLHAPATVCGPKKSTNLVKNKCVNFNFNGLTGTGVLTESNKKFLPFQQFGRDIADTTDAVRDPQTLEILDITPCSFGGVSVITPGTNTSNQVAVLYQGVNCTEVPVAIHADQLTPTWRVYSTGSNVFQTRAGCLIGAEHVNNSYECDIPIGAGICASYQTQTNSPRRARSVASQSIIAYTMSLGAENSVAYSNNSIAIPTNFTISVTTEILPVSMTKTSVDCTMYICGDSTECSNLLLQYGSFCTQLNRALTGIAVEQDKNTQEVFAQVKQIYKTPPIKDFGGFNFSQILPDPSKPSKRSFIEDLLFNKVTLADAGFIKQYGDCLGDIAARDLICVQKFNGLTVLPPLLTDEMIAQYTSALLAGTITSGWTFGAGAALQIPFAMQMAYRFNGIGVTQNVLYENQKLIANQFNSAIGKIQDSLSSTASALGKLQDVVNQNAQALNTLVKQLSSNFGAISSVLNDILSRLDPPEAEVQIDRLITGRLQSLQTYVTQQLIRAAEIRASANLAATKMSECVLGQSKRVDFCGKGYQLMSFPQSAPHGVVFLNVTYVPAQEKNFTTAPAICNDGKAHFPREGVFVSNGTNWFVTQRNFYEPQIITTDNTFVSGNCDVVIGIVNNTVYDPLQPELDSFKEELDKYFKNHTSPDVDLGDISGINASVVNIQKEIDRLNEVAKNLNESLIDLQELGKYEQYIKGGSGYIPEAPRDGQAYVRKDGEWVLLSTFL

SEQ ID NO: 5932 - protein, 1241 aa, Artificial Sequence
  SARS-CoV-2/Finland/FIN03032020A/2020__EPI_ISL_413602 spike protein (1-1211)(K986P_V987P_ H1048Q_H1064N_ H1083N_H1101N) Foldon construct
MFVFLVLLPLVSSQCVNLTTRTQLPPAYTNSFTRGVYYPDKVFRSSVLHSTQDLFLPFFSNVTWFHAIHVSGTNGTKRFDNPVLPFNDGVYFASTEKSNIIRGWIFGTTLDSKTQSLLIVNNATNVVIKVCEFQFCNDPFLGVYYHKNNKSWMESEFRVYSSANNCTFEYVSQPFLMDLEGKQGNFKNLREFVFKNIDGYFKIYSKHTPINLVRDLPQGFSALEPLVDLPIGINITRFQTLLALHRSYLTPGDSSSGWTAGAAAYYVGYLQPRTFLLKYNENGTITDAVDCALDPLSETKCTLKSFTVEKGIYQTSNFRVQPTESIVRFPNITNLCPFGEVFNATRFASVYAWNRKRISNCVADYSVLYNSASFSTFKCYGVSPTKLNDLCFTNVYADSFVIRGDEVRQIAPGQTGKIADYNYKLPDDFTGCVISWNSNNLDSKVGGNYNYLYRLFRKSNLKPFERDISTEIYQAGSTPCNGVEGFNCYFPLQSYGFQPTNGVGYQPYRVVVLSFELLHAPATVCGPKKSTNLVKNKCVNFNFNGLTGTGVLTESNKKFLPFQQFGRDIADTTDAVRDPQTLEILDITPCSFGGVSVITPGTNTSNQVAVLYQGVNCTEVPVAIHADQLTPTWRVYSTGSNVFQTRAGCLIGAEHVNNSYECDIPIGAGICASYQTQTNSPRRARSVASQSIIAYTMSLGAENSVAYSNNSIAIPTNFTISVTTEILPVSMTKTSVDCTMYICGDSTECSNLLLQYGSFCTQLNRALTGIAVEQDKNTQEVFAQVKQIYKTPPIKDFGGFNFSQILPDPSKPSKRSFIEDLLFNKVTLADAGFIKQYGDCLGDIAARDLICAQKFNGLTVLPPLLTDEMIAQYTSALLAGTITSGWTFGAGAALQIPFAMQMAYRFNGIGVTQNVLYENQKLIANQFNSAIGKIQDSLSSTASALGKLQDVVNQNAQALNTLVKQLSSNFGAISSVLNDILSRLDPPEAEVQIDRLITGRLQSLQTYVTQQLIRAAEIRASANLAATKMSECVLGQSKRVDFCGKGYQLMSFPQSAPHGVVFLNVTYVPAQEKNFTTAPAICNDGKAHFPREGVFVSNGTNWFVTQRNFYEPQIITTDNTFVSGNCDVVIGIVNNTVYDPLQPELDSFKEELDKYFKNHTSPDVDLGDISGINASVVNIQKEIDRLNEVAKNLNESLIDLQELGKYEQYIKGGSGYIPEAPRDGQAYVRKDGEWVLLSTFL

SEQ ID NO: 5933 - protein, 1241 aa, Artificial Sequence
  SARS-CoV-2/France/GE1977/2020__EPI_ISL_414632 spike protein (1-1211)(K986P_V987P_ H1048Q_H1064N_ H1083N_H1101N) Foldon construct
MFVFLVLLPLVSSQCVNLTTRTQLPPAYTNSFTRGVYYPDKVFRSSVLHSTQDLFLPFFSNVTWFHAIHVSGTNGTKRFDNPVLPFNDGVYFASTEKSNIIRGWIFGTTLDSKTQSLLIVNNATNVVIKVCEFQFCNDPFLGVYYHKNNKSWMESEFRVYSSANNCTFEYVSQPFLMDLEGKQGNFKNLREFVFKNIDGYFKIYSKHTPINLVRDLPQGFSALEPLVDLPIGINITRFQTLLALHRSYLTPGDSSSGWTAGAAAYYVGYLQPRTFLLKYNENGTITDAVDCALDPLSETKCTLKSFTVEKGIYQTSNFRVQPTESIVRFPNITNLCPFGEVFNATRFASVYAWNRKRISNCVADYSVLYNSASFSTFKCYGVSPTKLNDLCFTNVYADSFVIRGDEVRQIAPGQTGKIADYNYKLPDDFTGCVIAWNSNNLDSKVGGNYNYLYRLFRKSNLKPFERDISTEIYQAGSTPCNGVEGFNCYFPLQSYGFQPTNGVGYQPYRVVVLSFELLHAPATVCGPKKSTNLVKNKCVNFNFNGLTGTGVLTESNKKFLPFQQFGRDIADTTDAVRDPQTLEILDITPCSFGGVSVITPGTNTSNQVAVLYQGVNCTEVPVAIHADQLTPTWRVYSTGSNVFQTRAGCLIGAEHVNNSYECDIPIGAGICASYQTQTNSPRRARSVASQSIIAYTMSLGAENSVAYSNNSIAIPTNFTISVTTEILPVSMTKTSVDCTMYICGDSTECSNLLLQYGSFCTQLNRALTGIAVEQDKNTQEVFAQVKQIYKTPPIKDFGGFNFSQILPDPSKPSKRSFIEDLLFNKVTLADAGFIKQYGDCLGDIAARDLICAQKFNGLTVLPPLLTDEMIAQYTSALLAGTITSGWTFGAGAALQIPFAMQMAYRFNGIGVTQNVLYENQKLIANQFNSAIGKIQDSLFSTASALGKLQDVVNQNAQALNTLVKQLSSNFGAISSVLNDILSRLDPPEAEVQIDRLITGRLQSLQTYVTQQLIRAAEIRASANLAATKMSECVLGQSKRVDFCGKGYQLMSFPQSAPHGVVFLNVTYVPAQEKNFTTAPAICNDGKAHFPREGVFVSNGTNWFVTQRNFYEPQIITTDNTFVSGNCDVVIGIVNNTVYDPLQPELDSFKEELDKYFKNHTSPDVDLGDISGINASVVNIQKEIDRLNEVAKNLNESLIDLQELGKYEQYIKGGSGYIPEAPRDGQAYVRKDGEWVLLSTFL

SEQ ID NO: 5934 - protein, 1241 aa, Artificial Sequence
  SARS-CoV-2/Finland/FIN-313/2020__EPI_ISL_414641 spike protein (1-1211)(K986P_V987P_ H1048Q_H1064N_ H1083N_H1101N) Foldon construct
MFVFLVLLPLVSSQCVNLTTRTQLPPAYTNSFTRGVYYPDKVFRSSVLHSTQDLFLPFFSNVTWFHAIHVSGTNGTKRFDNPVLPFNDGVYFASTEKSNIIRGWIFGTTLDSKTQSLLIVNNATNVVIKVCEFQFCNDPFLGVYYHKNNKSWMESEFRVYSSANNCTFEYVSQPFLMDLEGKQGNFKNLREFVFKNIDGYFKIYSKHTPINLVRDLPQGFSALEPLVDLPIGINITRFKTLLALHRSYLTPGDSSSGWTAGAAAYYVGYLQPRTFLLKYNENGTITDAVDCALDPLSETKCTLKSFTVEKGIYQTSNFRVQPTESIVRFPNITNLCPFGEVFNATRFASVYAWNRKRISNCVADYSVLYNSASFSTFKCYGVSPTKLNDLCFTNVYADSFVIRGDEVRQIAPGQTGKIADYNYKLPDDFTGCVIAWNSNNLDSKVGGNYNYLYRLFRKSNLKPFERDISTEIYQAGSTPCNGVEGFNCYFPLQSYGFQPTNGVGYQPYRVVVLSFELLHAPATVCGPKKSTNLVKNKCVNFNFNGLTGTGVLTESNKKFLPFQQFGRDIADTTDAVRDPQTLEILDITPCSFGGVSVITPGTNTSNQVAVLYQGVNCTEVPVAIHADQLTPTWRVYSTGSNVFQTRAGCLIGAEHVNNSYECDIPIGAGICASYQTQTNSPRRARSVASQSIIAYTMSLGAENSVAYSNNSIAIPTNFTISVTTEILPVSMTKTSVDCTMYICGDSTECSNLLLQYGSFCTQLNRALTGIAVEQDKNTQEVFAQVKQIYKTPPIKDFGGFNFSQILPDPSKPSKRSFIEDLLFNKVTLADAGFIKQYGDCLGDIAARDLICAQKFNGLTVLPPLLTDEMIAQYTSALLAGTITSGWTFGAGAALQIPFAMQMAYRFNGIGVTQNVLYENQKLIANQFNSAIGKIQDSLSSTASALGKLQDVVNQNAQALNTLVKQLSSNFGAISSVLNDILSRLDPPEAEVQIDRLITGRLQSLQTYVTQQLIRAAEIRASANLAATKMSECVLGQSKRVDFCGKGYQLMSFPQSAPHGVVFLNVTYVPAQEKNFTTAPAICNDGKAHFPREGVFVSNGTNWFVTQRNFYEPQIITTDNTFVSGNCDVVIGIVNNTVYDPLQPELDSFKEELDKYFKNHTSPDVDLGDISGINASVVNIQKEIDRLNEVAKNLNESLIDLQELGKYEQYIKGGSGYIPEAPRDGQAYVRKDGEWVLLSTFL

SEQ ID NO: 5935 - protein, 1241 aa, Artificial Sequence
  SARS-CoV-2/Netherlands/ZuidHolland_2/2020__EPI_ISL_414556 spike protein (1-1211)(K986P_V987P_ H1048Q_H1064N_ H1083N_H1101N) Foldon construct
MFVFLVLLPLVSSQCVNLTTRTQLPPAYTNSFTRGVYYPDKVFRSSVLHSTQDLFLPFFSNVTWFHAIHVSGTNGTKRFDNPVLPFNDGVYFASTEKSNIIRGWIFGTTLDSKTQSLLIVNNATNVVIKVCEFQFCNDPFLGVYYHKNNKSWMESEFRVYSSANNCTFEYVSQPFLMDLEGKQGNFKNLREFVFKNIDGYFKIYSKHTPINLVRDLPQGFSALEPLVDLPIGINITRFQTLLALHRSYLTPGDSSSGWTAGAAAYYVGYLQPRTFLLKYNENGTITDAVDCALDPLSETKCTLKSFTVEKGIYQTSNFRVQPTESIVRFPNITNLCPFGEVFNATRFASVYAWNRKRISNCVADYSVLYNSASFSTFKCYGVSPTKLNDLCFTNVYADSFVIRGDEVRQIAPGQTGKIADYNYKLPDDFTGCVIAWNSNNLDSKVGGNYNYLYRLFRKSNLKPFERDISTEIYQAGSTPCNGVEGFNCYFPLQSYGFQPTNGVGYQPYRVVVLSFELLHAPATVCGPKKSTNLVKNKCVNFNFNGLTGTGVLTESNKKFLPFQQFGRDIADTTDAVRDPQTLEILDITPCSFGGVSVITPGTNTSNQVAVLYQGVNCTEVPVAIHADQLTPTWRVYSTGSNVFQTRAGCLIGAEHVNNSYECDIPIGAGICASYQTQTNSPRRARSVASQSIIAYTMSLGAENSVAYSNNSIAIPTNFTISVTTEILPVSMTKTSVDCTMYICGDSTECSNLLLQYGSFCTQLNRALTGIALEQDKNTQEVFAQVKQIYKTPPIKDFGGFNFSQILPDPSKPSKRSFIEDLLFNKVTLADAGFIKQYGDCLGDIAARDLICAQKFNGLTVLPPLLTDEMIAQYTSALLAGTITSGWTFGAGAALQIPFAMQMAYRFNGIGVTQNVLYENQKLIANQFNSAIGKIQDSLSSTASALGKLQDVVNQNAQALNTLVKQLSSNFGAISSVLNDILSRLDPPEAEVQIDRLITGRLQSLQTYVTQQLIRAAEIRASANLAATKMSECVLGQSKRVDFCGKGYQLMSFPQSAPHGVVFLNVTYVPAQEKNFTTAPAICNDGKAHFPREGVFVSNGTNWFVTQRNFYEPQIITTDNTFVSGNCDVVIGIVNNTVYDPLQPELDSFKEELDKYFKNHTSPDVDLGDISGINASVVNIQKEIDRLNEVAKNLNESLIDLQELGKYEQYIKGGSGYIPEAPRDGQAYVRKDGEWVLLSTFL

SEQ ID NO: 5936 - protein, 1241 aa, Artificial Sequence
  SARS-CoV-2/USA/WA-UW31/2020__EPI_ISL_414618 spike protein (1-1211)(K986P_V987P_ H1048Q_H1064N_ H1083N_H1101N) Foldon construct
MFVFLVLLPLVSSQCVNLTTRTQLPPAYTNSFTRGVYYPDKVFRSSVLHSTQDLFLPFFSNVTWFHAIHVSGTNGTKRFDNPVLPFNDGVYFASTEKSNIIRGWIFGTTLDSKTQSLLIVNNATNVVIKVCEFQFCNDPFLGVYYHKNNKSWMESEFRVYSSANNCTFEYVSQPFLMDLEGKQGNFKNLREFVFKNIDGYFKIYSKHTPINLVRDLPQGFSALEPLVDLPIGINITRFQTLLALHRSYLTPGDSSSGWTAGAAAYYVGYLQPRTFLLKYNENGTITDAVDCALDPLSETKCTLKSFTVEKGIYQTSNFRVQPTESIVRFPNITNLCPFGEVFNATRFASVYAWNRKRISNCVADYSVLYNSASFSTFKCYGVSPTKLNDLCFTNVYADSFVIRGDEVRQIAPGQTGKIADYNYKLPDDFTGCVIAWNSNNLDSKVGGNYNYLYRLFRKSNLKPFERDISTEIYQAGSTPCNGAEGFNCYFPLQSYGFQPTNGVGYQPYRVVVLSFELLHAPATVCGPKKSTNLVKNKCVNFNFNGLTGTGVLTESNKKFLPFQQFGRDIADTTDAVRDPQTLEILDITPCSFGGVSVITPGTNTSNQVAVLYQDVNCTEVPVAIHADQLTPTWRVYSTGSNVFQTRAGCLIGAEHVNNSYECDIPIGAGICASYQTQTNSPRRARSVASQSIIAYTMSLGAENSVAYSNNSIAIPTNFTISVTTEILPVSMTKTSVDCTMYICGDSTECSNLLLQYGSFCTQLNRALTGIAVEQDKNTQEVFAQVKQIYKTPPIKDFGGFNFSQILPDPSKPSKRSFIEDLLFNKVTLADAGFIKQYGDCLGDIAARDLICAQKFNGLTVLPPLLTDEMIAQYTSALLAGTITSGWTFGAGAALQIPFAMQMAYRFNGIGVTQNVLYENQKLIANQFNSAIGKIQDSLSSTASALGKLQDVVNQNAQALNTLVKQLSSNFGAISSVLNDILSRLDPPEAEVQIDRLITGRLQSLQTYVTQQLIRAAEIRASANLAATKMSECVLGQSKRVDFCGKGYQLMSFPQSAPHGVVFLNVTYVPAQEKNFTTAPAICNDGKAHFPREGVFVSNGTNWFVTQRNFYEPQIITTDNTFVSGNCDVVIGIVNNTVYDPLQPELDSFKEELDKYFKNHTSPDVDLGDISGINASVVNIQKEIDRLNEVAKNLNESLIDLQELGKYEQYIKGGSGYIPEAPRDGQAYVRKDGEWVLLSTFL

SEQ ID NO: 5937 - protein, 1241 aa, Artificial Sequence
  SARS-CoV-2/South Korea/SNU01/2020__EPI_ISL_411929 spike protein (1-1211)(K986P_V987P_ H1048Q_H1064N_ H1083N_H1101N) Foldon construct
MFVFLVLLPLVSSQCVNLTTRTQLPPAYTNSFTRGVYYPDKVFRSSVLHSTQDLFLPFFSNVTWFHAIHVSGTNGTKRFDNPVLPFNDGVYFASTEKSNIIRGWIFGTTLDSKTQSLLIVNNATNVVIKVCEFQFCNDPFLGVYYHKNNKSWMESEFRVYSSANNCTFEYVSQPFLMDLEGKQGNFKNLREFVFKNIDGYFKIYSKHTPINLVRDLPQGFWALEPLVDLPIGINITRFQTLLALHRSYLTPGDSSSGWTAGAAAYYVGYLQPRTFLLKYNENGTITDAVDCALDPLSETKCTLKSFTVEKGIYQTSNFRVQPTESIVRFPNITNLCPFGEVFNATRFASVYAWNRKRISNCVADYSVLYNSASFSTFKCYGVSPTKLNDLCFTNVYADSFVIRGDEVRQIAPGQTGKIADYNYKLPDDFTGCVIAWNSNNLDSKVGGNYNYLYRLFRKSNLKPFERDISTEIYQAGSTPCNGVEGFNCYFPLQSYGFQPTNGVGYQPYRVVVLSFELLHAPATVCGPKKSTNLVKNKCVNFNFNGLTGTGVLTESNKKFLPFQQFGRDIADTTDAVRDPQTLEILDITPCSFGGVSVITPGTNTSNQVAVLYQDVNCTEVPVAIHADQLTPTWRVYSTGSNVFQTRAGCLIGAEHVNNSYECDIPIGAGICASYQTQTNSPRRARSVASQSIIAYTMSLGAENSVAYSNNSIAIPTNFTISVTTEILPVSMTKTSVDCTMYICGDSTECSNLLLQYGSFCTQLNRALTGIAVEQDKNTQEVFAQVKQIYKTPPIKDFGGFNFSQILPDPSKPSKRSFIEDLLFNKVTLADAGFIKQYGDCLGDIAARDLICAQKFNGLTVLPPLLTDEMIAQYTSALLAGTITSGWTFGAGAALQIPFAMQMAYRFNGIGVTQNVLYENQKLIANQFNSAIGKIQDSLSSTASALGKLQDVVNQNAQALNTLVKQLSSNFGAISSVLNDILSRLDPPEAEVQIDRLITGRLQSLQTYVTQQLIRAAEIRASANLAATKMSECVLGQSKRVDFCGKGYQLMSFPQSAPHGVVFLNVTYVPAQEKNFTTAPAICNDGKAHFPREGVFVSNGTNWFVTQRNFYEPQIITTDNTFVSGNCDVVIGIVNNTVYDPLQPELDSFKEELDKYFKNHTSPDVDLGDISGINASVVNIQKEIDRLNEVAKNLNESLIDLQELGKYEQYIKGGSGYIPEAPRDGQAYVRKDGEWVLLSTFL

SEQ ID NO: 5938 - protein, 1241 aa, Artificial Sequence
  SARS-CoV-2/China/WF0004/2020__EPI_ISL_413694 spike protein (1-1211)(K986P_V987P_ H1048Q_H1064N_ H1083N_H1101N) Foldon construct
MFVFLVLLPLVSSQCVNLTTRTQLPPAYTNSFTRGVYYPDKVFRSSVLHSTQDLFLPFFSNVTWFHAIHVSGTNGTKRFDNPVLPFNDGVYFASTEKSNIIRGWIFGTTLDSKTQSLLIVNNATNVVIKVCEFQFCNDPFLGVYYHKNNKSWTESEFRVYSSANNCTFEYVSQPFLMDLEGKQGNFKNLREFVFKNIDGYFKIYSKHTPINLVRDLPQGFSALEPLVDLPIGINITRFQTLLALHRSYLTPGDSSSGWTAGAAAYYVGYLQPRTFLLKYNENGTITDAVDCALDPLSETKCTLKSFTVEKGIYQTSNFRVQPTESIVRFPNITNLCPFGEVFNATRFASVYAWNRKRISNCVADYSVLYNSASFSTFKCYGVSPTKLNDLCFTNVYADSFVIRGDEVRQIAPGQTGKIADYNYKLPDDFTGCVIAWNSNNLDSKVGGNYNYLYRLFRKSNLKPFERDISTEIYQAGSTPCNGVEGFNCYFPLQSYGFQPTNGVGYQPYRVVVLSFELLHAPATVCGPKKSTNLVKNKCVNFNFNGLTGTGVLTESNKKFLPFQQFGRDIADTTDAVRDPQTLEILDITPCSFGGVSVITPGTNTSNQVAVLYQDVNCTEVPVAIHADQLTPTWRVYSTGSNVFQTRAGCLIGAEHVNNSYECDIPIGAGICASYQTQTNSPRRARSVASQSIIAYTMSLGAENSVAYSNNSIAIPTNFTISVTTEILPVSMTKTSVDCTMYICGDSTECSNLLLQYGSFCTQLNRALTGIAVEQDKNTQEVFAQVKQIYKTPPIKDFGGFNFSQILPDPSKPSKRSFIEDLLFNKVTLADAGFIKQYGDCLGDIAARDLICAQKFNGLTVLPPLLTDEMIAQYTSALLAGTITSGWTFGAGAALQIPFAMQMAYRFNGIGVTQNVLYENQKLIANQFNSAIGKIQDSLSSTASALGKLQDVVNQNAQALNTLVKQLSSNFGAISSVLNDILSRLDPPEAEVQIDRLITGRLQSLQTYVTQQLIRAAEIRASANLAATKMSECVLGQSKRFDFCGKGYQLMSFPQSAPHGVVFLNVTYVPAQEKNFTTAPAICNDGKAHFPREGVFVSNGTNWFVTQRNFYEPQIITTDNTFVSGNCDVVIGIVNNTVYDPLQPELDSFKEELDKYFKNHTSPDVDLGDISGINASVVNIQKEIDRLNEVAKNLNESLIDLQELGKYEQYIKGGSGYIPEAPRDGQAYVRKDGEWVLLSTFL

SEQ ID NO: 5939 - protein, 1241 aa, Artificial Sequence
  SARS-CoV-2/China/WF0028/2020__EPI_ISL_413791 spike protein (1-1211)(K986P_V987P_ H1048Q_H1064N_ H1083N_H1101N) Foldon construct
MFVFLVLLPLVSSQCVNLTTRTQLPPAYTNSFTRGVYYPDKVFRSSVLHSTQDLFLPFFSNVTWFHAIHVSGTNGTKRFDNPVLPFNDGVYFASTEKSNIIRGWIFGTTLDSKTQSLLIVNNATNVVIKVCEFQFCNDPFLGVYYHKNNKSWMESEFRVYSSANNCTFEYVSQPFLMDLEGKQGNFKNLREFVFKNIDGYFKIYSKHTPINLVRDLPQGFSALEPLVDLPIGINITRFQTLLALHRSYLTPGDSSSGWTAGAAAYYVGYLQPRTFLLKYNENGTITDAVDCALDPLSETKCTLKSFTVEKGIYQTSNFRVQPTESIVRFPNITNLCPFGEVFNATRFASVYAWNRKRISNCVADYSVLYNSASFSTFKCYGVSPTKLNDLCFTNVYADSFVIRGDEVRQIAPGQTGKIADYNYKLPDDFTGCVIAWNSNNLDSKVGGNYNYLYRLFRKSNLKPFERDISTEIYQAGSTPCNGVEGFNCYFPLQSYGFQPTNGVGYQPYRVVVLSFELLHAPATVCGPKKSTNLVKNKCVNFNFNGLTGTGVLTESNKKFLPFQQFGRDIADTTDAVRDPQTLEILDITPCSFGGVSVITPGTNTSNQVAVLYQDVNCTEVPVAIHADQLTPTWRVYSTGSNVFQTRAGCLIGAEHVNNSYECDIPIGAGICASYQTQTNSPRRARSVASQSIIAYTMSLGAENSVAYSNNSIAIPTNFTISVTTEILPVSMTKTSVDCTMYICGDSTECSNLLLQYGSFCTQLNRALTGIAVEQDKNTQEVFAQVKQIYKTPPIKDFGGFNFSQILPDPSKPSKRSFIEDLLFNKVTLADAGFIKQYGDCLGDIAARDLICAQKFNGLTVLPPLLTDEMIAQYTSALLAGTITSGWTFGAGAALQIPFAMQMAYRFNGIGVTQNVLYENQKLIANQFNSAIGKIQDSLSSTASALGKLQDVVNQNAQALNTLVKQLSSNFGAISSVLNDILSRLDPPEAEVQIDRLITGRLQSLQTYVTQQLIRAAEIRASANLAATKMSECVLGQSKRVDFCGKGYQLMSFPQSAPHGVVFLNVTYVPAQEKNFTTAPAICNDGKAHFPREGVFVSNGTNWFVTQRNFYEPQIITTDNTFVSGNCDVVIGIVNNTVYDPLQPELESFKEELDKYFKNHTSPDVDLGDISGINASVVNIQKEIDRLNEVAKNLNESLIDLQELGKYEQYIKGGSGYIPEAPRDGQAYVRKDGEWVLLSTFL

SEQ ID NO: 5940 - protein, 1241 aa, Artificial Sequence
  SARS-CoV-2/2019-nCoV/USA-CruiseA-18/2020__MT159716.1 spike protein (1-1211)(K986P_V987P_ H1048Q_H1064N_ H1083N_H1101N) Foldon construct
MFVFLVLLPLVSSQCVNLTTRTQLPPAYTNSFTRGVYYPDKVFRSSVLHSTQDLFLPFFSNVTWFHAIHVSGTNGTKRFDNPVLPFNDGVYFASTEKSNIIRGWIFGTTLDSKTQSLLIVNNATNVVIKVCEFQFCNDPFLGVYYHKNNKSWMESELRVYSSANNCTFEYVSQPFLMDLEGKQGNFKNLREFVFKNIDGYFKIYSKHTPINLVRDLPQGFSALEPLVDLPIGINITRFQTLLALHRSYLTPGDSSSGWTAGAAAYYVGYLQPRTFLLKYNENGTITDAVDCALDPLSETKCTLKSFTVEKGIYQTSNFRVQPTESIVRFPNITNLCPFGEVFNATRFASVYAWNRKRISNCVADYSVLYNSASFSTFKCYGVSPTKLNDLCFTNVYADSFVIRGDEVRQIAPGQTGKIADYNYKLPDDFTGCVIAWNSNNLDSKVGGNYNYLYRLFRKSNLKPFERDISTEIYQAGSTPCNGVEGFNCYFPLQSYGFQPTNGVGYQPYRVVVLSFELLHAPATVCGPKKSTNLVKNKCVNFNFNGLTGTGVLTESNKKFLPFQQFGRDIADTTDAVRDPQTLEILDITPCSFGGVSVITPGTNTSNQVAVLYQDVNCTEVPVAIHADQLTPTWRVYSTGSNVFQTRAGCLIGAEHVNNSYECDIPIGAGICASYQTQTNSPRRARSVASQSIIAYTMSLGAENSVAYSNNSIAIPTNFTISVTTEILPVSMTKTSVDCTMYICGDSTECSNLLLQYGSFCTQLNRALTGIAVEQDKNTQEVFAQVKQIYKTPPIKDFGGFNFSQILPDPSKPSKRSFIEDLLFNKVTLADAGFIKQYGDCLGDIAARDLICAQKFNGLTVLPPLLTDEMIAQYTSALLAGTITSGWTFGAGAALQIPFAMQMAYRFNGIGVTQNVLYENQKLIANQFNSAIGKIQDSLSSTASALGKLQDVVNQNAQALNTLVKQLSSNFGAISSVLNDILSRLDPPEAEVQIDRLITGRLQSLQTYVTQQLIRAAEIRASANLAATKMSECVLGQSKRVDFCGKGYQLMSFPQSAPHGVVFLNVTYVPAQEKNFTTAPAICNDGKAHFPREGVFVSNGTNWFVTQRNFYEPQIITTDNTFVSGNCDVVIGIVNNTVYDPLQPELDSFKEELDKYFKNHTSPDVDLGDISGINASVVNIQKEIDRLNEVAKNLNESLIDLQELGKYEQYIKGGSGYIPEAPRDGQAYVRKDGEWVLLSTFL

SEQ ID NO: 5941 - protein, 1241 aa, Artificial Sequence
  SARS-CoV-2/SARS-CoV-2/Yunnan-01/human/2020/CHN__MT049951.1 spike protein (1-1211)(K986P_V987P_ H1048Q_H1064N_ H1083N_H1101N) Foldon construct
MFVFLVLLPLVSSQCVNLTTRTQLPPANTNSFTRGVYYPDKVFRSSVLHSTQDLFLPFFSNVTWFHAIHVSGTNGTKRFDNPVLPFNDGVYFASTEKSNIIRGWIFGTTLDSKTQSLLIVNNATNVVIKVCEFQFCNDPFLGVYYHKNNKSWMESEFRVYSSANNCTFEYVSQPFLMDLEGKQGNFKNLREFVFKNIDGYFKIYSKHTPINLVRDLPQGFSALEPLVDLPIGINITRFQTLLALHRSYLTPGDSSSGWTAGAAAYYVGYLQPRTFLLKYNENGTITDAVDCALDPLSETKCTLKSFTVEKGIYQTSNFRVQPTESIVRFPNITNLCPFGEVFNATRFASVYAWNRKRISNCVADYSVLYNSASFSTFKCYGVSPTKLNDLCFTNVYADSFVIRGDEVRQIAPGQTGKIADYNYKLPDDFTGCVIAWNSNNLDSKVGGNYNYLYRLFRKSNLKPFERDISTEIYQAGSTPCNGVEGFNCYFPLQSYGFQPTNGVGYQPYRVVVLSFELLHAPATVCGPKKSTNLVKNKCVNFNFNGLTGTGVLTESNKKFLPFQQFGRDIADTTDAVRDPQTLEILDITPCSFGGVSVITPGTNTSNQVAVLYQDVNCTEVPVAIHADQLTPTWRVYSTGSNVFQTRAGCLIGAEHVNNSYECDIPIGAGICASYQTQTNSPRRARSVASQSIIAYTMSLGAENSVAYSNNSIAIPTNFTISVTTEILPVSMTKTSVDCTMYICGDSTECSNLLLQYGSFCTQLNRALTGIAVEQDKNTQEVFAQVKQIYKTPPIKDFGGFNFSQILPDPSKPSKRSFIEDLLFNKVTLADAGFIKQYGDCLGDIAARDLICAQKFNGLTVLPPLLTDEMIAQYTSALLAGTITSGWTFGAGAALQIPFAMQMAYRFNGIGVTQNVLYENQKLIANQFNSAIGKIQDSLSSTASALGKLQDVVNQNAQALNTLVKQLSSNFGAISSVLNDILSRLDPPEAEVQIDRLITGRLQSLQTYVTQQLIRAAEIRASANLAATKMSECVLGQSKRVDFCGKGYQLMSFPQSAPHGVVFLNVTYVPAQEKNFTTAPAICNDGKAHFPREGVFVSNGTNWFVTQRNFYEPQIITTDNTFVSGNCDVVIGIVNNTVYDPLQPELDSFKEELDKYFKNHTSPDVDLGDISGINASVVNIQKEIDRLNEVAKNLNESLIDLQELGKYEQYIKGGSGYIPEAPRDGQAYVRKDGEWVLLSTFL

SEQ ID NO: 5942 - protein, 1241 aa, Artificial Sequence
  SARS-CoV-2/USA/WA-UW292/2020__EPI_ISL_418077 spike protein (1-1211)(K986P_V987P_ H1048Q_H1064N_ H1083N_H1101N) Foldon construct
MFVFLVLLPLVSSQCVNLTTRTQLPPAYTNSFTRGVYYPDKVFRSSVLHSTQDLFLPFFSNVTWFHAIHVSGTNGTKRFDNPVLPFNDGVYFASTEKSNIIRGWIFGTTLDSKTQSLLIVNNATNVVIKVCEFQFCNDPFLGVYYHKNNKSWMESEFRVYSSANNCTFEYVSQPFLMDLEGKQGNFKNLREFVFKNIDGYFKIYSKHTPINLVRDLPQGFSALEPLVDLPIGINITRFQTLLALHRSYLTPGDSSSGWTAGAAAYYVGYLQPRTFLLKYNENGTITDAVDCALDPLSETKCTLKSFTVEKGIYQTSNFRVQPTESIVRFPNITNLCPFGEVFNATRFASVYAWNRKRISNCVADYSVLYNSASFSTFKCYGVSPTKLNDLCFTNVYADSFVIRGDEVRQIAPGQTGKIADYNYKLPDDFTGCVIAWNSNNLDSKVGGNYNYLYRLFRKSNLKPFERDISTEIYQASSTPCNGVEGFNCYFPLQSYGFQPTNGVGYQPYRVVVLSFELLHAPATVCGPKKSTNLVKNKCVNFNFNGLTGTGVLTESNKKFLPFQQFGRDIADTTDAVRDPQTLEILDITPCSFGGVSVITPGTNTSNQVAVLYQDVNCTEVPVAIHADQLTPTWRVYSTGSNVFQTRAGCLIGAEHVNNSYECDIPIGAGICASYQTQTNSPRRARSVASQSIIAYTMSLGAENSVAYSNNSIAIPTNFTISVTTEILPVSMTKTSVDCTMYICGDSTECSNLLLQYGSFCTQLNRALTGIAVEQDKNTQEVFAQVKQIYKTPPIKDFGGFNFSQILPDPSKPSKRSFIEDLLFNKVTLADAGFIKQYGDCLGDIAARDLICAQKFNGLTVLPPLLTDEMIAQYTSALLAGTITSGWTFGAGAALQIPFAMQMAYRFNGIGVTQNVLYENQKLIANQFNSAIGKIQDSLSSTASALGKLQDVVNQNAQALNTLVKQLSSNFGAISSVLNDILSRLDPPEAEVQIDRLITGRLQSLQTYVTQQLIRAAEIRASANLAATKMSECVLGQSKRVDFCGKGYQLMSFPQSAPHGVVFLNVTYVPAQEKNFTTAPAICNDGKAHFPREGVFVSNGTNWFVTQRNFYEPQIITTDNTFVSGNCDVVIGIVNNTVYDPLQPELDSFKEELDKYFKNHTSPDVDLGDISGINASVVNIQKEIDRLNEVAKNLNESLIDLQELGKYEQYIKGGSGYIPEAPRDGQAYVRKDGEWVLLSTFL

SEQ ID NO: 5943 - protein, 1241 aa, Artificial Sequence
  SARS-CoV-2/Iceland/192/2020__EPI_ISL_417819 spike protein (1-1211)(K986P_V987P_ H1048Q_H1064N_ H1083N_H1101N) Foldon construct
MFVFFVLLPLVSSQCVNLTTRTQLPPAYTNSFTRGVYYPDKVFRSSVLHSTQDLFLPFFSNVTWFHAIHVSGTNGTKRFDNPVLPFNDGVYFASTEKSNIIRGWIFGTTLDSKTQSLLIVNNATNVVIKVCEFQFCNDPFLGVYYHKNNKSWMESEFRVYSSANNCTFEYVSQPFLMDLEGKQGNFKNLREFVFKNIDGYFKIYSKHTPINLVRDLPQGFSALEPLVDLPIGINITRFQTLLALHRSYLTPGDSSSGWTAGAAAYYVGYLQPRTFLLKYNENGTITDAVDCALDPLSETKCTLKSFTVEKGIYQTSNFRVQPTESIVRFPNITNLCPFGEVFNATRFASVYAWNRKRISNCVADYSVLYNSASFSTFKCYGVSPTKLNDLCFTNVYADSFVIRGDEVRQIAPGQTGKIADYNYKLPDDFTGCVIAWNSNNLDSKVGGNYNYLYRLFRKSNLKPFERDISTEIYQAGSTPCNGVEGFNCYFPLQSYGFQPTNGVGYQPYRVVVLSFELLHAPATVCGPKKSTNLVKNKCVNFNFNGLTGTGVLTESNKKFLPFQQFGRDIADTTDAVRDPQTLEILDITPCSFGGVSVITPGTNTSNQVAVLYQGVNCTEVPVAIHADQLTPTWRVYSTGSNVFQTRAGCLIGAEHVNNSYECDIPIGAGICASYQTQTNSPRRARSVASQSIIAYTMSLGAENSVAYSNNSIAIPTNFTISVTTEILPVSMTKTSVDCTMYICGDSTECSNLLLQYGSFCTQLNRALTGIAVEQDKNTQEVFAQVKQIYKTPPIKDFGGFNFSQILPDPSKPSKRSFIEDLLFNKVTLADAGFIKQYGDCLGDIAARDLICAQKFNGLTVLPPLLTDEMIAQYTSALLAGTITSGWTFGAGAALQIPFAMQMAYRFNGIGVTQNVLYENQKLIANQFNSAIGKIQDSLSSTASALGKLQDVVNQNAQALNTLVKQLSSNFGAISSVLNDILSRLDPPEAEVQIDRLITGRLQSLQTYVTQQLIRAAEIRASANLAATKMSECVLGQSKRVDFCGKGYQLMSFPQSAPHGVVFLNVTYVPAQEKNFTTAPAICNDGKAHFPREGVFVSNGTNWFVTQRNFYEPQIITTDNTFVSGNCDVVIGIVNNTVYDPLQPELDSFKEELDKYFKNHTSPDVDLGDISGINASVVNIQKEIDRLNEVAKNLNESLIDLQELGKYEQYIKGGSGYIPEAPRDGQAYVRKDGEWVLLSTFL

SEQ ID NO: 5944 - protein, 1241 aa, Artificial Sequence
  SARS-CoV-2/Belgium/ULG-6939/2020__EPI_ISL_417020 spike protein (1-1211)(K986P_V987P_ H1048Q_H1064N_ H1083N_H1101N) Foldon construct
MFVFLVLLPLVSSQCVNLTTRTQLPPAYTNSFTRGVYYPDKVFRSSVLHSTQDLFLPFFSNVTWFHAIHVSGTNGTKRFDNPVLPFNDGVYFASTEKSNIIRGWIFGTTLDSKTQSLLIVNNATNVVIKVCEFQFCNDPFLGVYYHKNNKSWMESEFRVYSSANNCTFEYVSQPFLMDLEGKQGNFKNLREFVFKNIDGYFKIYSKHTPINLVRDLPQGFSALEPLVDLPIGINITRFQTLLALHRSYLTPGDSSSGWTAGAAAYYVGYLQPRTFLLKYNENGTITDAVDCALDPLSETKCTLKSFTVEKGIYQTSNFRVQPTESIVRFPNITNLCPFGEVFNATRFASVYAWNRKRISNCVADYSVLYNSASFSTFKCYGVSPTKLNDLCFTNVYADSFVIRGDEVRQIAPGQTGKIADYNYKLPDDFTGCVIAWNSNNLDSKVGGNYNYLYRLFRKSNLKPFERDISTEIYQAGSTPCNGVEGFNCYFPLQSYGFQPTNGVGYQPYRVVVLSFELLHAPATVCGPKKSTNLVKNKCVNFNFNGLTGTGVLTESNKKFLPFQQFGRDIADTTDAVRDPQTLEILDITPCSFGGVSVITPGTNTSNQVAVLYQGVNCTEVPVAIHADQLTPTWRVYSTGSNVFQTRAGCLIGAEHVNNSYECDIPIGAGICASYQTQTNSPRRARSVASQSIIAYTMSLGAENSVVYSNNSIAIPTNFTISVTTEILPVSMTKTSVDCTMYICGDSTECSNLLLQYGSFCTQLNRALTGIAVEQDKNTQEVFAQVKQIYKTPPIKDFGGFNFSQILPDPSKPSKRSFIEDLLFNKVTLADAGFIKQYGDCLGDIAARDLICAQKFNGLTVLPPLLTDEMIAQYTSALLAGTITSGWTFGAGAALQIPFAMQMAYRFNGIGVTQNVLYENQKLIANQFNSAIGKIQDSLSSTASALGKLQDVVNQNAQALNTLVKQLSSNFGAISSVLNDILSRLDPPEAEVQIDRLITGRLQSLQTYVTQQLIRAAEIRASANLAATKMSECVLGQSKRVDFCGKGYQLMSFPQSAPHGVVFLNVTYVPAQEKNFTTAPAICNDGKAHFPREGVFVSNGTNWFVTQRNFYEPQIITTDNTFVSGNCDVVIGIVNNTVYDPLQPELDSFKEELDKYFKNHTSPDVDLGDISGINASVVNIQKEIDRLNEVAKNLNESLIDLQELGKYEQYIKGGSGYIPEAPRDGQAYVRKDGEWVLLSTFL

SEQ ID NO: 5945 - protein, 1241 aa, Artificial Sequence
  SARS-CoV-2/France/HF2496/2020__EPI_ISL_418231 spike protein (1-1211)(K986P_V987P_ H1048Q_H1064N_ H1083N_H1101N) Foldon construct
MFVFLVLLPLVSSQCVNLTTRTQLPPAYTNSFTRGVYYPDKVFRSSVLHSTQDLFLPFFSNVTWFHAIHVSGTNGTKRFDNPVLPFNDGVYFASTEKSNIIRGWIFGTTLDSKTQSLLIVNNATNVVIKVCEFQFCNDPFLGVYYHKNNKSWMESEFRVYSSANNCTFEYVSQPFLMDLEGKQGNFKNLREFVFKNIDGYFKIYSKHTPINLVRDLPQGFSALEPLVDLPIGINITRFQTLLALHRSYLTPGDSSSGWTAGAAAYYVGYLQPRTFLLKYNENGTITDAVDCALDPLSETKCTLKSFTVEKGIYQTSNFRVQPTESIVRFPNITNLCPFGEVFNATRFASVYAWNRKRISNCVADYSVLYNSASFSTFKCYGVSPTKLNDLCFTNVYADSFVIRGDEVRQIAPGQTGKIADYNYKLPDDFTGCVIAWNSNNLDSKVGGNYNYLYRLFRKSNLKPFERDISTEIYQAGSTPCNGVEGFNCYFPLQSYGFQPTNGVGYQPYRVVVLSFELLHAPATVCGPKKSTNLVKNKCVNFNFNGLTGTGVLTESNKKFLPFQQFGRDIADTTDAVRDPQTLEILDITPCSFGGVSVITPGTNTSNQVAVLYQGVNCTEVPVAIHADQLTPTWRVYSTGSNVFQTRAGCLIGAEHVNNSYECDIPIGAGICASYQTQTNSPRRARSVASQSIIAYTMSLGAENSVAYSNNSIAIPTNFTISVTTEILPVSMTKTSVDCTMYICGDSTECSNLLLQYGSFCTQLNRALTGIAVEQDKNTQEVFAQVKQIYKTPPIKDFGGFNFSQILPDPSKPSKRSFIEDLLFNKVTLADAGFIKQYGDCLGDIVARDLICAQKFNGLTVLPPLLTDEMIAQYTSALLAGTITSGWTFGAGAALQIPFAMQMAYRFNGIGVTQNVLYENQKLIANQFNSAIGKIQDSLSSTASALGKLQDVVNQNAQALNTLVKQLSSNFGAISSVLNDILSRLDPPEAEVQIDRLITGRLQSLQTYVTQQLIRAAEIRASANLAATKMSECVLGQSKRVDFCGKGYQLMSFPQSAPHGVVFLNVTYVPAQEKNFTTAPAICNDGKAHFPREGVFVSNGTNWFVTQRNFYEPQIITTDNTFVSGNCDVVIGIVNNTVYDPLQPELDSFKEELDKYFKNHTSPDVDLGDISGINASVVNIQKEIDRLNEVAKNLNESLIDLQELGKYEQYIKGGSGYIPEAPRDGQAYVRKDGEWVLLSTFL

SEQ ID NO: 5946 - protein, 1241 aa, Artificial Sequence
  SARS-CoV-2/USA/WA-UW291/2020__EPI_ISL_418076 spike protein (1-1211)(K986P_V987P_ H1048Q_H1064N_ H1083N_H1101N) Foldon construct
MFVFLVLLPLVSSQCVNLTTRTQLPPAYTNSFTRGVYYPDKVFRSSVLHSTQDLFLPFFSNVTWFHAIHVSGTNGTKRFDNPVLPFNDGVYFASTEKSNIIRGWIFGTTLDSKTQSLLIVNNATNVVIKVCEFQFCNDPFLGVYYHKNNKSWMESEFRVYSSANNCTFEYVSQPFLMDLEGKQGNFKNLREFVFKNIDGYFKIYSKHTPINLVRDLPQGFSALEPLVDLPIGINITRFQTLLALHRSYLTPGDSSSGWTAGAAAYYVGYLQPRTFLLKYNENGTITDAVDCALDPLSETKCTLKSFTVEKGIYQTSNFRVQPTESIVRFPNITNLCPFGEVFNATRFASVYAWNRKRISNCVADYSVLYNSASFSTFKCYGVSPTKLNDLCFTNVYADSFVIRGDEVRQIAPGQTGKIADYNYKLPDDFTGCVIAWNSNNLDSKVGGNYNYLYRLFRKSNLKPFERDISTEIYQAGSTPCNGVEGFNCYFPLQSYGFQPTNGVGYQPYRVVVLSFELLHAPATVCGPKKSTNLVKNKCVNFNFNGLTGTGVLTESNKKFLPFQQFGRDIADTTDAVRDPQTLEILDITPCSFGGVSVITPGTNTSNQVAVLYQGVNCTEVPVAIHADQLTPTWRVYSTGSNVFQTRAGCLIGAEHVNNSYECDIPIGAGICASYQTQTNSPRRARSVASQSIIAYTMSLGAENSVAYSNNSIAIPTNFTISVTTEILPVSMTKTSVDCTMYICGDSTECSNLLLQYGSFCTQLNRALTGIAVEQDKNTQEVFAQVKQIYKTPPIKDFGGFNFSQILPDPSKPSKRSFIEDLLFNKVTLADAGFIKQYGDCLGDIAARDLICAQKFNGLTVLPPLLTDEMIAQYTSALLAGTITSGWTFGAGAALQIPFAMQMAYRFNGIGVTQNVLYENQKLIANQFNSAIGKIQYSLSSTASALGKLQDVVNQNAQALNTLVKQLSSNFGAISSVLNDILSRLDPPEAEVQIDRLITGRLQSLQTYVTQQLIRAAEIRASANLAATKMSECVLGQSKRVDFCGKGYQLMSFPQSAPHGVVFLNVTYVPAQEKNFTTAPAICNDGKAHFPREGVFVSNGTNWFVTQRNFYEPQIITTDNTFVSGNCDVVIGIVNNTVYDPLQPELDSFKEELDKYFKNHTSPDVDLGDISGINASVVNIQKEIDRLNEVAKNLNESLIDLQELGKYEQYIKGGSGYIPEAPRDGQAYVRKDGEWVLLSTFL

SEQ ID NO: 5947 - protein, 1241 aa, Artificial Sequence; identical to SEQ ID NO: 5910
  SARS-CoV-2/Portugal/PT0034/2020__EPI_ISL_418019 spike protein (1-1211)(K986P_V987P_ H1048Q_H1064N_ H1083N_H1101N) Foldon construct

SEQ ID NO: 5948 - protein, 1241 aa, Artificial Sequence
  SARS-CoV-2/Iceland/202/2020__EPI_ISL_417750 spike protein (1-1211)(K986P_V987P_ H1048Q_H1064N_ H1083N_H1101N) Foldon construct
MFVFLVLLPLVSSQCVNLTTRTQLPPAYTNSFTRGVYYPDKVFRSSVLHSTQDLFLPFFSNVTWFHAIHVSGTNGTKRFDNPVLPFNDGVYFASTEKSNIIRGWIFGTTLDSKTQSLLIVNNATNVVIKVCEFQFCNDPFLGVYYHKNNKSWMESEFRVYSSANNCTFEYVSQPFLMDLEGKQGNFKNLREFVFKNIDGYFKIYSKHTPINLVRDLPQGFSALEPLVDLPIGINITRFQTLLALHRSYLTPGDSSSGWTAGAAAYYVGYLQPRTFLLKYNENGTITDAVDCALDPLSETKCTLKSFTVEKGIYQTSNFRVQPTESIVRFPNITNLCPFGEVFNATRFASVYAWNRKRISNCVADYSVLYNSASFSTFKCYGVSPTKLNDLCFTNVYADSFVIRGDEVRQIAPGQTGKIADYNYKLPDDFTGCVIAWNSNNLDSKVGGNYNYLYRLFRKSNLKPFERDISTEIYQAGSTPCNGVEGFNCYFPLQSYGFQPTNGVGYQPYRVVVLSFELLHAPATVCGPKKSTNLVKNKCVNFNFNGLTGTGVLTESNKKFLPFQQFGRDIADTTDAVRDPQTLEILDITPCSFGGVSVITPGTNTSNQVAVLYQDVNCTEVPVAIHADQLTPTWRVYSTGSNVFQTRAGCLIGAEHVNNSYECDIPIGAGICASYQTQTNSPRRARSVASQSIIAYTMSLGAENSVAYSNNSIAIPTNFTISVTTEILPVSMTKTSVDCTMYICGDSTECSNLLLQYGSFCTQLNRALTGIAVEQDKNTQEVFAQVKQIYKTPPIKDFGGFNFSQILPDPSKPSKRSFIEDLLFNKVTLADAGFIKQYGDCLGDIAARDLICAQKFNGLTVLPPLLTDEMIAQYTSALLAGTITSGWTFGAGAALQIPFAMQMAYRFNGIGVTQNVLYENQKLIANQFNSAIGKIQDSLSSTASALGKLQDVVNQNAQALNTLVKQLSSNFGAISSVLNDILSRLDPPEAEVQIDRLITGRLQSLQTYVTQQLIRAAEIRASANLAATKMSECVLGQSKRVDFCGKGYQLMSFPQSAPHGVVFLNVTYVPAQEKNFTTAPAICNDGKAHFPREGVFVSNGTNWFVTQRNFYEPQIITTDNTFVSGNCDVVIGIVNNTVYDPLQPELDSFKEELDKYFKNHTSPDVDLGDIPGINASVVNIQKEIDRLNEVAKNLNESLIDLQELGKYEQYIKGGSGYIPEAPRDGQAYVRKDGEWVLLSTFL

SEQ ID NO: 5949 - protein, 1241 aa, Artificial Sequence
  SARS-CoV-2/USA/WA-UW261/2020__EPI_ISL_418046 spike protein (1-1211)(K986P_V987P_ H1048Q_H1064N_ H1083N_H1101N) Foldon construct
MFVFLVLLPLVSSQCVNLTTRTQLPPAYTNSFTRGVYYPDKVFRSSVLHSTQDLFLPFFSNVTWFHAIHVSGTNGTKRFDNPVLPFNDGVYFASTEKSNIIRGWIFGTTLDSKTQSLLIVNNATNVVIKVCEFQFCNDPFLGVYYHKNNKSWMESEFRVYSSANNCTFEYVSQPFLMDLEGKQGNFKNLREFVFKNIDGYFKIYSKHTPINLVRDLPQGFSALEPLVDLPIGINITRFQTLLALHRSYLTPGDSSSGWTAGAAAYYVGYLQPRTFLLKYNENGTITDAVDCALDPLSETKCTLKSFTVEKGIYQTSNFRVQPTESIVRFPNITNLCPFGEVFNATRFTSVYAWNRKRISNCVADYSVLYNSASFSTFKCYGVSPTKLNDLCFTNVYADSFVIRGDEVRQIAPGQTGKIADYNYKLPDDFTGCVIAWNSNNLDSKVGGNYNYLYRLFRKSNLKPFERDISTEIYQAGSTPCNGVEGFNCYFPLQSYGFQPTNGVGYQPYRVVVLSFELLHAPATVCGPKKSTNLVKNKCVNFNFNGLTGTGVLTESNKKFLPFQQFGRDIADTTDAVRDPQTLEILDITPCSFGGVSVITPGTNTSNQVAVLYQDVNCTEVPVAIHADQLTPTWRVYSTGSNVFQTRAGCLIGAEHVNNSYECDIPIGAGICASYQTQTNSPRRARSVASQSIIAYTMSLGAENSVAYSNNSIAIPTNFTISVTTEILPVSMTKTSVDCTMYICGDSTECSNLLLQYGSFCTQLNRALTGIAVEQDKNTQEVFAQVKQIYKTPPIKDFGGFNFSQILPDPSKPSKRSFIEDLLFNKVTLADAGFIKQYGDCLGDIAARDLICAQKFNGLTVLPPLLTDEMIAQYTSALLAGTITSGWTFGAGAALQIPFAMQMAYRFNGIGVTQNVLYENQKLIANQFNSAIGKIQDSLSSTASALGKLQDVVNQNAQALNTLVKQLSSNFGAISSVLNDILSRLDPPEAEVQIDRLITGRLQSLQTYVTQQLIRAAEIRASANLAATKMSECVLGQSKRVDFCGKGYQLMSFPQSAPHGVVFLNVTYVPAQEKNFTTAPAICNDGKAHFPREGVFVSNGTNWFVTQRNFYEPQIITTDNTFVSGNCDVVIGIVNNTVYDPLQPELDSFKEELDKYFKNHTSPDVDLGDISGINASVVNIQKEIDRLNEVAKNLNESLIDLQELGKYEQYIKGGSGYIPEAPRDGQAYVRKDGEWVLLSTFL

SEQ ID NO: 5950 - protein, 1241 aa, Artificial Sequence
  SARS-CoV-2/Portugal/PT0035/2020__EPI_ISL_418020 spike protein (1-1211)(K986P_V987P_ H1048Q_H1064N_ H1083N_H1101N) Foldon construct
MFVFLVLLPLVSSQCVNLTTRTQLPPAYTNSFTRGVYYPDKVFRSSVLHSTQDLFLPFFSNVTWFHAIHVSGTNGTKRFDNPVLPFNDGVYFASTEKSNIIRGWIFGTTLDSKTQSLLIVNNATNVVIKVCEFQFCNDPFLGVYYHKNNKSWMESEFRVYSSANNCTFEYVSQPFLMDLEGKQGNFKNLREFVFKNIDGYFKIYSKHTPINLVRDLPQGFSALEPLVDLPIGINITRFQTLLALHRSYLTPGDSSSGWTAGAAAYYVGYLQPRTFLLKYNENGTITDAVDCALDPLSETKCTLKSFTVEKGIYQTSNFRVQPTESIVRFPNITNLCPFGEVFNATRFASVYAWNRKRISNCVADYSVLYNSASFSTFKCYGVSPTKLNDLCFTNVYADSFVIRGDEVRQIAPGQTGKIADYNYKLPDDFTGCVIAWNSNNLDSKVGGNYNYLYRLFRKSNLKPFERDISTEIYQAGSTPCNGVEGFNCYFPLQSYGFQPTNGVGYQPYRVVVLSFELLHAPATVCGPKKSTNLVKNKCVNFNFNGLTGTGVLTESNKKFLPFQQFGRDIADTTDAVRDPQTLEILDITPCSFGGVSVITPGTNTSNQVAVLYQDVNCTEVPVAIHADQLTPTWRVYSTGSNVFQTRAGCLIGAEHVNNSYECDIPIGAGICASYQTQTNSPRRARSVASQSIIAYTMSLGAENSVAYSNNSIAIPTNFTISVTTEILPVSMTKTSVDCTMYICGDSTECSNLLLQYGSFCTQLNRALTGIAVEQDKNTQEVFAQVKQIYKTPPIKDFGGFNFSQILPDPSKPSKRSFIEDLLFNKVTLADAGFIKQYGDCLGDISARDLICAQKFNGLTVLPPLLTDEMIAQYTSALLAGTITSGWTFGAGAALQIPFAMQMAYRFNGIGVTQNVLYENQKLIANQFNSAIGKIQDSLSSTASALGKLQDVVNQNAQALNTLVKQLSSNFGAISSVLNDILSRLDPPEAEVQIDRLITGRLQSLQTYVTQQLIRAAEIRASANLAATKMSECVLGQSKRVDFCGKGYQLMSFPQSAPHGVVFLNVTYVPAQEKNFTTAPAICNDGKAHFPREGVFVSNGTNWFVTQRNFYEPQIITTDNTFVSGNCDVVIGIVNNTVYDPLQPELDSFKEELDKYFKNHTSPDVDLGDISGINASVVNIQKEIDRLNEVAKNLNESLIDLQELGKYEQYIKGGSGYIPEAPRDGQAYVRKDGEWVLLSTFL

SEQ ID NO: 5951 - protein, 1241 aa, Artificial Sequence
  SARS-CoV-2/USA/NY-NYUMC7/2020__EPI_ISL_418192 spike protein (1-1211)(K986P_V987P_ H1048Q_H1064N_ H1083N_H1101N) Foldon construct
MFVFLVLLPLVSSQCVNLTTRTQLPPAYTNSFTRGVYYPDKVFRSSVLHSTQDLFLPFFSNVTWFHAIHVSGTNGTKRFDNPVLPFNDGVYFASTEKSNIIRGWIFGTTLDSKTQSLLIVNNATNVVIKVCEFQFCNDPFLGVYHHKNNKSWMESEFRVYSSANNCTFEYVSQPFLMDLEGKQGNFKNLREFVFKNIDGYFKIYSKHTPINLVRDLPQGFSALEPLVDLPIGINITRFQTLLALHRSYLTPGDSSSGWTAGAAAYYVGYLQPRTFLLKYNENGTITDAVDCALDPLSETKCTLKSFTVEKGIYQTSNFRVQPTESIVRFPNITNLCPFGEVFNATRFASVYAWNRKRISNCVADYSVLYNSASFSTFKCYGVSPTKLNDLCFTNVYADSFVIRGDEVRQIAPGQTGKIADYNYKLPDDFTGCVIAWNSNNLDSKVGGNYNYLYRLFRKSNLKPFERDISTEIYQAGSTPCNGVEGFNCYFPLQSYGFQPTNGVGYQPYRVVVLSFELLHAPATVCGPKKSTNLVKNKCVNFNFNGLTGTGVLTESNKKFLPFQQFGRDIADTTDAVRDPQTLEILDITPCSFGGVSVITPGTNTSNQVAVLYQGVNCTEVPVAIHADQLTPTWRVYSTGSNVFQTRAGCLIGAEHVNNSYECDIPIGAGICASYQTQTNSPRRARSVASQSIIAYTMSLGAENSVAYSNNSIAIPTNFTISVTTEILPVSMTKTSVDCTMYICGDSTECSNLLLQYGSFCTQLNRALTGIAVEQDKNTQEVFAQVKQIYKTPPIKDFGGFNFSQILPDPSKPSKRSFIEDLLFNKVTLADAGFIKQYGDCLGDIAARDLICAQKFNGLTVLPPLLTDEMIAQYTSALLAGTITSGWTFGAGAALQIPFAMQMAYRFNGIGVTQNVLYENQKLIANQFNSAIGKIQDSLSSTASALGKLQDVVNQNAQALNTLVKQLSSNFGAISSVLNDILSRLDPPEAEVQIDRLITGRLQSLQTYVTQQLIRAAEIRASANLAATKMSECVLGQSKRVDFCGKGYQLMSFPQSAPHGVVFLNVTYVPAQEKNFTTAPAICNDGKAHFPREGVFVSNGTNWFVTQRNFYEPQIITTDNTFVSGNCDVVIGIVNNTVYDPLQPELDSFKEELDKYFKNHTSPDVDLGDISGINASVVNIQKEIDRLNEVAKNLNESLIDLQELGKYEQYIKGGSGYIPEAPRDGQAYVRKDGEWVLLSTFL

SEQ ID NO: 5952 - protein, 1241 aa, Artificial Sequence
  SARS-CoV-2/Iceland/189/2020__EPI_ISL_417709 spike protein (1-1211)(K986P_V987P_ H1048Q_H1064N_ H1083N_H1101N) Foldon construct
MFVFLVLLPLVSSQCVNLTTRTQLPPAYTNSFTRGVYYPDKVFRSSVLHSTQDLFLPFFSNVTWFHAIHVSGTNGTKRFDNPVLPFNDGVYFASTEKSNIIRGWIFGTTLDSKTQSLLIVNNATNVVIKVCEFQFCNDPFLGVYYHKNNKSWMESEFRVYSSANNCTFEYVSQPFLMDLEGKQGNFKNLREFVFKNIDGYFKIYSKHTPINLVRDLPQGFSALEPLVDLPIGINITRFQTLLALHRSYLTPGDSSSGWTAGAAAYYVGYLQPRTFLLKYNENGTITDAVDCALDPLSETKCTLKSFTVEKGIYQTSNFRVQPTESIVRFPNITNLCPFGEVFNATRFASVYAWNRKRISNCVADYSVLYNSASFSTFKCYGVSPTKLNDLCFTNVYADSFVIRGDEVRQIAPGQTGKIADYNYKLPDDFTGCVIAWNSNNLDSKVGGNYNYLYRLFRKSNLKPFERDISTEIYQAGSTPCNGVEGFNCYFPLQSYGFQPTNGVGYQPYRVVVLSFELLHAPATVCGPKKSTNLVKNKCVNFNFNGLTGTGVLTESNKKFLPFQQFGRDIADTTDAVRDPQTLEILDITPCSFGGVSVITPGTNTSNQVAVLYQGVNCTEVPVAIHADQLTPTWRVYSTGSNVFQTRAGCLIGAEHVNNSYECDIPIGAGICASYQTQTNSPRRARSVASQSIIAYTMSLGAENSVAYSNNSIAIPTNFTISVTTEILPVSMTKTSVDCTMYICGDSTECSNLLLQYGSFCTQLNRALTGIAVEQDKNTQEVFAQVKQIYKTPPIKDFGGFNFSQILPDPSKPSKRSFIEDLLFNKVTLADAGFTKQYGDCLGDIAARDLICAQKFNGLTVLPPLLTDEMIAQYTSALLAGTITSGWTFGAGAALQIPFAMQMAYRFNGIGVTQNVLYENQKLIANQFNSAIGKIQDSLSSTASALGKLQDVVNQNAQALNTLVKQLSSNFGAISSVLNDILSRLDPPEAEVQIDRLITGRLQSLQTYVTQQLIRAAEIRASANLAATKMSECVLGQSKRVDFCGKGYQLMSFPQSAPHGVVFLNVTYVPAQEKNFTTAPAICNDGKAHFPREGVFVSNGTNWFVTQRNFYEPQIITTDNTFVSGNCDVVIGIVNNTVYDPLQPELDSFKEELDKYFKNHTSPDVDLGDISGINASVVNIQKEIDRLNEVAKNLNESLIDLQELGKYEQYIKGGSGYIPEAPRDGQAYVRKDGEWVLLSTFL

SEQ ID NO: 5953 - protein, 1241 aa, Artificial Sequence
  SARS-CoV-2/Australia/NSW56/2020__EPI_ISL_417408 spike protein (1-1211)(K986P_V987P_ H1048Q_H1064N_ H1083N_H1101N) Foldon construct
MFVFLVLLPLVSSQCVNLTTRTQLPPAYTNSFTRGVYYPDKVFRSSVLHSTQDLFLPFFSNVTWFHAIHVSGTNGTKRFDNPVLPFNDGVYFASTEKSNIIRGWIFGTTLDSKTQSLLIVNNATNVVIKVCEFQFCNDPFLGVYYHKNNKSWMESEFRVYSSANNCTFEYVSQPFLMDLEGKQGNFKNLREFVFKNIDGYFKIYSKHTPINLVRDLPQGFSALEPLVDLPIGINITRFQTLLALHRSYLTPGDSSSGWTAGAAAYYVGYLQPRTFLLKYNENGTITDAVDCALDPLSETKCTLKSFTVEKGIYQTSNFRVQPTESIVRFPNITNLCPFGEVFNATRFASVYAWNRKRISNCVADYSVLYNSASFSTFKCYGVSPTKLNDLCFTNVYADSFVIRGDEVRQIAPGQTGKIADYNYKLPDDFTGCVIAWNSNNLDSKVGGNYNYLYRLFRKSNLKPFERDISTEIYQAGSTPCNGVEGFNCYFPLQSYGFQPTNGVGYQPYRVVVLSFELLHAPATVCGPKKSTNLVKNKCVNFNFNGLTGTGVLTESNKKFLPFQQFGRDIADTTDAVRDPQTLEILDITPCSFGGVSVITPGTNTSNQVAVLYQDVNCTEVPVAIHADQLTPTWRVYSTGSNVFQTRAGCLIGAEHVNNSYECDIPIGAGICASYQTQTNSPRRARSVASQSIIAYTMSLGAENSVAYSNNSIAIPTNFTISVTTEILPVSMTKTSVDCTMYICGDSTECSNLLLQYGSFCTQLNRALTGIAVEQDKNTQEVFAQVKQIYKTPPIKDFGGFNFSQILPDSSKPSKRSFIEDLLFNKVTLADAGFIKQYGDCLGDIAARDLICAQKFNGLTVLPPLLTDEMIAQYTSALLAGTITSGWTFGAGAALQIPFAMQMAYRFNGIGVTQNVLYENQKLIANQFNSAIGKIQDSLSSTASALGKLQDVVNQNAQALNTLVKQLSSNFGAISSVLNDILSRLDPPEAEVQIDRLITGRLQSLQTYVTQQLIRAAEIRASANLAATKMSECVLGQSKRVDFCGKGYQLMSFPQSAPHGVVFLNVTYVPAQEKNFTTAPAICNDGKAHFPREGVFVSNGTNWFVTQRNFYEPQIITTDNTFVSGNCDVVIGIVNNTVYDPLQPELDSFKEELDKYFKNHTSPDVDLGDISGINASVVNIQKEIDRLNEVAKNLNESLIDLQELGKYEQYIKGGSGYIPEAPRDGQAYVRKDGEWVLLSTFL

SEQ ID NO: 5954 - protein, 1241 aa, Artificial Sequence
  SARS-CoV-2/Iceland/280/2020__EPI_ISL_417608 spike protein (1-1211)(K986P_V987P_ H1048Q_H1064N_ H1083N_H1101N) Foldon construct
MFVFLVLLPLVSSQCVNLTTRTQLPPAYTNSFTRGVYYPDKVFRSSVLHSTQDLFLPFFSNVTWFHAIHVSGTNGTKRFDNPVLPFNDGVYFASTEKSNIIRGWIFGTTLDSKTQSLLIVNNATNVVIKVCEFQFCNDPFLGVYYHKNNKSWMESEFRVYSSANNCTFEYVSQPFLMDLEGKQGNFKNLREFVFKNIDGYFKIYSKHTPINLVRDLPQGFSALEPLVDLPIGINITRFQTLLALHRSYLTPGDSSSGWTAGAAAYYVGYLQPRTFLLKYNENGTITDAVDCALDPLSETKCTLKSFTVEKGIYQTSNFRVQPTESIVRFPNITNLCPFGEVFNATRFASVYAWNRKRISNCVADYSVLYNSASFSTFKCYGVSPTKLNDLCFTNVYADSFVIRGDEVRQIAPGQTGKIADYNYKLPDDFTGCVIAWNSNNLDSKVGGNYNYLYRLFRKSNLKPFERDISTEIYQAGSTPCNGVEGFNCYFPLQSYGFQPTNGVGYQPYRVVVLSFELLHAPATVCGPKKSTNLVKNKCVNFNFNGLTGTGVLTESNKKFLPFQQFGRDIADTTDAVRDPQTLEILDITPCSFGGVSVITPGTNTSNQVAVLYQGVNCTEVPVAIHADQLTPTWRVYSTGSNVFQTRAGCLIGAEHVNNSYECDIPIGAGICASYHTQTNSPRRARSVASQSIIAYTMSLGAENSVAYSNNSIAIPTNFTISVTTEILPVSMTKTSVDCTMYICGDSTECSNLLLQYGSFCTQLNRALTGIAVEQDKNTQEVFAQVKQIYKTPPIKDFGGFNFSQILPDPSKPSKRSFIEDLLFNKVTLADAGFIKQYGDCLGDIAARDLICAQKFNGLTVLPPLLTDEMIAQYTSALLAGTITSGWTFGAGAALQIPFAMQMAYRFNGIGVTQNVLYENQKLIANQFNSAIGKIQDSLSSTASALGKLQDVVNQNAQALNTLVKQLSSNFGAISSVLNDILSRLDPPEAEVQIDRLITGRLQSLQTYVTQQLIRAAEIRASANLAATKMSECVLGQSKRVDFCGKGYQLMSFPQSAPHGVVFLNVTYVPAQEKNFTTAPAICNDGKAHFPREGVFVSNGTNWFVTQRNFYEPQIITTDNTFVSGNCDVVIGIVNNTVYDPLQPELDSFKEELDKYFKNHTSPDVDLGDISGINASVVNIQKEIDRLNEVAKNLNESLIDLQELGKYEQYIKGGSGYIPEAPRDGQAYVRKDGEWVLLSTFL

SEQ ID NO: 5955 - protein, 1241 aa, Artificial Sequence; identical to SEQ ID NO: 5910
  SARS-CoV-2/Iceland/247/2020__EPI_ISL_417575 spike protein (1-1211)(K986P_V987P_ H1048Q_H1064N_ H1083N_H1101N) Foldon construct

SEQ ID NO: 5956 - protein, 1241 aa, Artificial Sequence
  SARS-CoV-2/Iceland/238/2020__EPI_ISL_417566 spike protein (1-1211)(K986P_V987P_ H1048Q_H1064N_ H1083N_H1101N) Foldon construct
MFVFLVLLPLVSSQCVNLTTRTQLPPAYTNSFTRGVYYPDKVFRSSVLHSTQDLFLPFFSNVTWFHAIHVSGTNGTKRFDNPVLPFNDGVYFASTEKSNIIRGWIFGTTLDSKTQSLLIVNNATNVVIKVCEFQFCNDPFLGVYYHKNNKSWMESEFRVYSSANNCTFEYVSQPFLMDLEGKQGNFKNLREFVFKNIDGYFKIYSKHTPINLVRDLPQGFSALEPLVDLPIGINITRFQTLLALHRSYLTPGDSSSGWTAGAAAYYVGYLQPRTFLLKYNENGTITDAVDCALDPLSETKCTLKSFTVEKGIYQTSNFRVQPTESIVRFPNITNLCPFGEVFNATRFASVYAWNRKRISNCVADYSVLYNSASFSTFKCYGVSPTKLNDLCFTNVYADSFVIRGDEVRQIAPGQTGKIADYNYKLPDDFTGCVIAWNSNNLDSKVGGNYNYLYRLFRKSNLKPFERDISTEIYQAGSTPCNGVEGFNCYFPLQSYGFQPTNGVGYQPYRVVVLSFELLHAPATVCGPKKSTNLVKNKCVNFNFNGLTGTGVLTESNKKFLPFQQFGRDIADTTDAVRDPQTLEILDITPCSFGGVSVITPGTNTSNQVAVLYQGVNCTEVPVAIHADQLTPTWRVYSTGSNVFQTRAGCLIGAEHVNNSYECDIPIGAGICASYQTQTNSPRRARSVASQSIIAYTMSLGAENSVAYSNNSIAIPTNFTISVTTEILPVSMTKTSVDCTMYICGDSTECSNLLLQYGSFCTQLNRALTGIAVEQDKNTQEVFAQVKQIYKTPPIKDFGGFNFSQILPDPSKPSKRSFIEDLLFNKVTLADVGFIKQYGDCLGDIAARDLICAQKFNGLTVLPPLLTDEMIAQYTSALLAGTITSGWTFGAGAALQIPFAMQMAYRFNGIGVTQNVLYENQKLIANQFNSAIGKIQDSLSSTASALGKLQDVVNQNAQALNTLVKQLSSNFGAISSVLNDILSRLDPPEAEVQIDRLITGRLQSLQTYVTQQLIRAAEIRASANLAATKMSECVLGQSKRVDFCGKGYQLMSFPQSAPHGVVFLNVTYVPAQEKNFTTAPAICNDGKAHFPREGVFVSNGTNWFVTQRNFYEPQIITTDNTFVSGNCDVVIGIVNNTVYDPLQPELDSFKEELDKYFKNHTSPDVDLGDISGINASVVNIQKEIDRLNEVAKNLNESLIDLQELGKYEQYIKGGSGYIPEAPRDGQAYVRKDGEWVLLSTFL

SEQ ID NO: 5957 - protein, 1241 aa, Artificial Sequence
  SARS-CoV-2/Greece/16/2020__EPI_ISL_418265 spike protein (1-1211)(K986P_V987P_ H1048Q_H1064N_ H1083N_H1101N) Foldon construct
MFVFLVLLPLVSSQCVNLTTRTQLPPAYTNSFTRGVYYPDKVFRSSVLHSTQDLFLPFFSNVTWFHAIHVSGTNGTKRFDNPVLPFNDGVYFASTEKSNIIRGWIFGTTLDSKTQSLLIVNNATNVVIKVCEFQFCNDPFLGVYYHKNNKSWMESEFRVYSSANNCTFEYVSQPFLMDLEGKQGNFKNLREFVFKNVDGYFKIYSKHTPINLVRDLPQGFSALEPLVDLPIGINITRFQTLLALHRSYLTPGDSSSGWTAGAAAYYVGYLQPRTFLLKYNENGTITDAVDCALDPLSETKCTLKSFTVEKGIYQTSNFRVQPTESIVRFPNITNLCPFGEVFNATRFASVYAWNRKRISNCVADYSVLYNSASFSTFKCYGVSPTKLNDLCFTNVYADSFVIRGDEVRQIAPGQTGKIADYNYKLPDDFTGCVIAWNSNNLDSKVGGNYNYLYRLFRKSNLKPFERDISTEIYQAGSTPCNGVEGFNCYFPLQSYGFQPTNGVGYQPYRVVVLSFELLHAPATVCGPKKSTNLVKNKCVNFNFNGLTGTGVLTESNKKFLPFQQFGRDIADTTDAVRDPQTLEILDITPCSFGGVSVITPGTNTSNQVAVLYQDVNCTEVPVAIHADQLTPTWRVYSTGSNVFQTRAGCLIGAEHVNNSYECDIPIGAGICASYQTQTNSPRRARSVASQSIIAYTMSLGAENSVAYSNNSIAIPTNFTISVTTEILPVSMTKTSVDCTMYICGDSTECSNLLLQYGSFCTQLNRALTGIAVEQDKNTQEVFAQVKQIYKTPPIKDFGGFNFSQILPDPSKPSKRSFIEDLLFNKVTLADAGFIKQYGDCLGDIAARDLICAQKFNGLTVLPPLLTDEMIAQYTSALLAGTITSGWTFGAGAALQIPFAMQMAYRFNGIGVTQNVLYENQKLIANQFNSAIGKIQDSLSSTASALGKLQDVVNQNAQALNTLVKQLSSNFGAISSVLNDILSRLDPPEAEVQIDRLITGRLQSLQTYVTQQLIRAAEIRASANLAATKMSECVLGQSKRVDFCGKGYQLMSFPQSAPHGVVFLNVTYVPAQEKNFTTAPAICNDGKAHFPREGVFVSNGTNWFVTQRNFYEPQIITTDNTFVSGNCDVVIGIVNNTVYDPLQPELDSFKEELDKYFKNHTSPDVDLGDISGINASVVNIQKEIDRLNEVAKNLNESLIDLQELGKYEQYIKGGSGYIPEAPRDGQAYVRKDGEWVLLSTFL

SEQ ID NO: 5958 - protein, 1241 aa, Artificial Sequence
  SARS-CoV-2/Iceland/319/2020__EPI_ISL_417648 spike protein (1-1211)(K986P_V987P_ H1048Q_H1064N_ H1083N_H1101N) Foldon construct
MFVFLVLLPLVSSQCVNLTTRTQLPPAYTNSFTRGVYYPDKVFRSSVLHSTQDLFLPFFSNVTWFHAIHVSGTNGTKRFDNPVLPFNDGVYFASTEKSNIIRGWIFGTTLDSKTQSLLIVNNATNVVIKVCEFQFCNDPFLGVYYHKNNKSWMESEFRVYSSANNCTFEYVSQPFLIDLEGKQGNFKNLREFVFKNIDGYFKIYSKHTPINLVRDLPQGFSALEPLVDLPIGINITRFQTLLALHRSYLTPGDSSSGWTAGAAAYYVGYLQPRTFLLKYNENGTITDAVDCALDPLSETKCTLKSFTVEKGIYQTSNFRVQPTESIVRFPNITNLCPFGEVFNATRFASVYAWNRKRISNCVADYSVLYNSASFSTFKCYGVSPTKLNDLCFTNVYADSFVIRGDEVRQIAPGQTGKIADYNYKLPDDFTGCVIAWNSNNLDSKVGGNYNYLYRLFRKSNLKPFERDISTEIYQAGSTPCNGVEGFNCYFPLQSYGFQPTNGVGYQPYRVVVLSFELLHAPATVCGPKKSTNLVKNKCVNFNFNGLTGTGVLTESNKKFLPFQQFGRDIADTTDAVRDPQTLEILDITPCSFGGVSVITPGTNTSNQVAVLYQGVNCTEVPVAIHADQLTPTWRVYSTGSNVFQTRAGCLIGAEHVNNSYECDIPIGAGICASYQTQTNSPRRARSVASQSIIAYTMSLGAENSVAYSNNSIAIPTNFTISVTTEILPVSMTKTSVDCTMYICGDSTECSNLLLQYGSFCTQLNRALTGIAVEQDKNTQEVFAQVKQIYKTPPIKDFGGFNFSQILPDPSKPSKRSFIEDLLFNKVTLADAGFIKQYGDCLGDIAARDLICAQKFNGLTVLPPLLTDEMIAQYTSALLAGTITSGWTFGAGAALQIPFAMQMAYRFNGIGVTQNVLYENQKLIANQFNSAIGKIQDSLSSTASALGKLQDVVNQNAQALNTLVKQLSSNFGAISSVLNDILSRLDPPEAEVQIDRLITGRLQSLQTYVTQQLIRAAEIRASANLAATKMSECVLGQSKRVDFCGKGYQLMSFPQSAPHGVVFLNVTYVPAQEKNFTTAPAICNDGKAHFPREGVFVSNGTNWFVTQRNFYEPQIITTDNTFVSGNCDVVIGIVNNTVYDPLQPELDSFKEELDKYFKNHTSPDVDLGDISGINASVVNIQKEIDRLNEVAKNLNESLIDLQELGKYEQYIKGGSGYIPEAPRDGQAYVRKDGEWVLLSTFL

SEQ ID NO: 5959 - protein, 1241 aa, Artificial Sequence
  SARS-CoV-2/Congo/94/2020__EPI_ISL_417947 spike protein (1-1211)(K986P_V987P_ H1048Q_H1064N_ H1083N_H1101N) Foldon construct
MFVFLVLLPLVSSQCVNLTTRTQLPPAYTNSFTRGVYYPDKVFRSSVLHSTQDLFLPFFSNVTWFHAIHVSGTNGTKRFDNPVLPFNDGVYFASTEKSNIIRGWIFGTTLDSKTQSLLIVNNATNVVIKVCEFQFCNDPFLGVYYHKNNKSWMESEFRVYSSANNCTFEYVSQPFLMDLEGKQGNFKNLREFVFKNIDGYFKIYSKHTPINLVRDLPQGFSALEPLVDLPIGINITRFQTLLALHRSYLTPGDSSSGWTAGAAAYYVGYLQPRTFLLKYNENGTITDAVDCALDPLSETKCTLKSFTVEKGIYQTSNFRVQPTESIVRFPNITNLCPFGEVFNATRFASVYAWNRKRISNCVADYSVLYNSASFSTFKCYGVSPTKLNDLCFTNVYADSFVIRGDEVRQIAPGQTGKIADYNYKLPDDFTGCVIAWNSNNLDSKVGGNYNYLYRLFRKSNLKPFERDISTEIYQAGSTPCNGVEGFNCYFPLQSYGFQPTNGVGYQPYRVVVLSFELLHAPATVCGPKKSTNLVKNKCVNFNFNGLTGTGVLTESNKKFLPFQQFGRDIADTTDAVRDPQTLEILDITPCSFGGVSVITPGTNTSNQVAVLYQGVNCTEVPVAIHADQLTPTWRVYSTGSNVFQTRAGCLIGAEHVNNSYECDIPIGAGICASYQTQTNSPRRARSVASQSIIAYTMSLGAENSVAYSNNSIAIPTNFTISVTTEILPVSMTKTSVDCTMYICGDSTECSNLLLQYGSFCTQLNRALTGIAVEQDKNTQEVFAQVKQIYKTPPIKDFGGFNFSQILPDPSKPSKRSFIEDILFNKVTLADAGFIKQYGDCLGDIAARDLICAQKFNGLTVLPPLLTDEMIAQYTSALLAGTITSGWTFGAGAALQIPFAMQMAYRFNGIGVTQNVLYENQKLIANQFNSAIGKIQDSLSSTASALGKLQDVVNQNAQALNTLVKQLSSNFGAISSVLNDILSRLDPPEAEVQIDRLITGRLQSLQTYVTQQLIRAAEIRASANLAATKMSECVLGQSKRVDFCGKGYQLMSFPQSAPHGVVFLNVTYVPAQEKNFTTAPAICNDGKAHFPREGVFVSNGTNWFVTQRNFYEPQIITTDNTFVSGNCDVVIGIVNNTVYDPLQPELDSFKEELDKYFKNHTSPDVDLGDISGINASVVNIQKEIDRLNEVAKNLNESLIDLQELGKYEQYIKGGSGYIPEAPRDGQAYVRKDGEWVLLSTFL

SEQ ID NO: 5960 - protein, 1241 aa, Artificial Sequence
  SARS-CoV-2/Congo/158/2020__EPI_ISL_417950 spike protein (1-1211)(K986P_V987P_ H1048Q_H1064N_ H1083N_H1101N) Foldon construct
MFVFLVLLPLVSSQCVNLTTRTQLPPAYTNSFTRGVYYPDKVFRSSVLHSTQDLFLPFFSNVTWFHAIHVSGTNGTKRFDNPVLPFNDGVYFASTEKSNIIRGWIFGTTLDSKTQSLLIVNNATNVVIKVCEFQFCNDPFLGVYYHKNNKSWMESEFRVYSSANNCTFEYVSQPFLMDLEGKQGNFKNLREFVFKNIDGYFKIYSKHTPINLVRDLPQGFSALEPLVDLPIGINITRFQTLLALHRSYLTPGDSSSGWTAGAAAYYVGYLQPRTFLLKYNENGTITDAVDCALDPLSETKCTLKSFTVEKGIYQTSNFRVQPTESIVRFPNITNLCPFGEVFNATRFASVYAWNRKRISNCVADYSVLYNSASFSTFKCYGVSPTKLNDLCFTNVYADSFVIRGDEVRQIAPGQTGKIADYNYKLPDDFTGCVIAWNSNNLDSKVGGNYNYLYRLFRKSNLKPFERDISTEIYQAGSTPCNGVEGFNCYFPLQSYGFQPTNGVGYQPYRVVVLSFELLHAPATVCGPKKSTNLVKNKCVNFNFNGLTGTGVLTESNKKFLPFQQFGRDIADTTDAVRDPQTLEILDITPCSFGGVSVITPGTNTSNQVAVLYQDVNCTEVPVAIHADQLTPTWRVYSTGSNVFQTRAGCLIGAEHVNNSYECDIPIGAGICASYQTQTNSPRRARSVASQSIIAYTMSLGAENSVAYSNNSIAIPTNFTISVTTEILPVSMTKTSVDCTMYICGDSTECSNLLLQYGSFCTQLNRALTGIAVEQDKNTQEVFAQVKQIYKTPPIKDFGGFNFSQILPDPSKPSKRSFIEDLLFNKVTLADAGFIKQYGDCLGDIAARDLICAQKFNGLTVLPPLLTDEMIAQYTSALLAGTITSGWTFGAGAALQIPFAMQMAYRFNGIGVTQNVLYENQKLIANQFNSAIGKIQDSLSSTASALGKLQDVVNQNAQALNTLVKQLSSNFGAISSVLNDILSRLDPPEAEVQIDRLITGRLQSLQTYVTQQLIRAAEIRASANLAATKMSECVLGQSKRVDFCGKGYQLMSFPQSAPHGVVFLNVTYVPAQEKNFTTAPAICNDGKAHFPREGVFVSNGTNWFVTQRNFYEPQIITTDNTFLSGNCDVVIGIVNNTVYDPLQPELDSFKEELDKYFKNHTSPDVDLGDISGINASVVNIQKEIDRLNEVAKNLNESLIDLQELGKYEQYIKGGSGYIPEAPRDGQAYVRKDGEWVLLSTFL

SEQ ID NO: 5961 - protein, 1241 aa, Artificial Sequence
  SARS-CoV-2/USA/UT-00034/2020__EPI_ISL_417977 spike protein (1-1211)(K986P_V987P_ H1048Q_H1064N_ H1083N_H1101N) Foldon construct
MFVFLVLLPLVSSQCVNLTTRTQLPPAYTNSFTRGVYYPDKVFRSSVLHSTQDLFLPFFSNVTWFHAIHVSGTNGTKRFDNPVLPFNDGVYFASTEKSNIIRGWIFGTTLDSKTQSLLIVNNATNVVIKVCEFQFCNDPFLGVYYYKNNKSWMESEFRVYSSANNCTFEYVSQPFLMDLEGKQGNFKNLREFVFKNIDGYFKIYSKHTPINLVRDLPQGFSALEPLVDLPIGINITRFQTLLALHRSYLTPGDSSSGWTAGAAAYYVGYLQPRTFLLKYNENGTITDAVDCALDPLSETKCTLKSFTVEKGIYQTSNFRVQPTESIVRFPNITNLCPFGEVFNATRFASVYAWNRKRISNCVADYSVLYNSASFSTFKCYGVSPTKLNDLCFTNVYADSFVIRGDEVRQIAPGQTGKIADYNYKLPDDFTGCVIAWNSNNLDSKVGGNYNYLYRLFRKSNLKPFERDISTEIYQAGSTPCNGVEGFNCYFPLQSYGFQPTNGVGYQPYRVVVLSFELLHAPATVCGPKKSTNLVKNKCVNFNFNGLTGTGVLTESNKKFLPFQQFGRDIADTTDAVRDPQTLEILDITPCSFGGVSVITPGTNTSNQVAVLYQGVNCTEVPVAIHADQLTPTWRVYSTGSNVFQTRAGCLIGAEHVNNSYECDIPIGAGICASYQTQTNSPRRARSVASQSIIAYTMSLGAENSVAYSNNSIAIPTNFTISVTTEILPVSMTKTSVDCTMYICGDSTECSNLLLQYGSFCTQLNRALTGIAVEQDKNTQEVFAQVKQIYKTPPIKDFGGFNFSQILPDPSKPSKRSFIEDLLFNKVTLADAGFIKQYGDCLGDIAARDLICAQKFNGLTVLPPLLTDEMIAQYTSALLAGTITSGWTFGAGAALQIPFAMQMAYRFNGIGVTQNVLYENQKLIANQFNSAIGKIQDSLSSTASALGKLQDVVNQNAQALNTLVKQLSSNFGAISSVLNDILSRLDPPEAEVQIDRLITGRLQSLQTYVTQQLIRAAEIRASANLAATKMSECVLGQSKRVDFCGKGYQLMSFPQSAPHGVVFLNVTYVPAQEKNFTTAPAICNDGKAHFPREGVFVSNGTNWFVTQRNFYEPQIITTDNTFVSGNCDVVIGIVNNTVYDPLQPELDSFKEELDKYFKNHTSPDVDLGDISGINASVVNIQKEIDRLNEVAKNLNESLIDLQELGKYEQYIKGGSGYIPEAPRDGQAYVRKDGEWVLLSTFL

SEQ ID NO: 5962 - protein, 1241 aa, Artificial Sequence
  SARS-CoV-2/USA/UT-00033/2020__EPI_ISL_417976 spike protein (1-1211)(K986P_V987P_ H1048Q_H1064N_ H1083N_H1101N) Foldon construct
MFVFLVLLPLVSSQCVNLTTRTQLPPAYTNSFTRGVYYPDKVFRSSVLHSTQDLFLPFFSNVTWFHAIHVSGTNGTKRFDNPVLPFNDGVYFASTEKSNIIRGWIFGTTLDSKTQSLLIVNNATNVVIKVCEFQFCNDPFLGVYYHKNNKSWMESEFRVYSSANNCTFEYVSQPFLMDLEGKQGNFKNLREFVFKNIDGYFKIYSKHTPINLVRDLPQGFSALEPLVDLPIGINITRFQTLLALHRSYLTPGDSSSGLTAGAAAYYVGYLQPRTFLLKYNENGTITDAVDCALDPLSETKCTLKSFTVEKGIYQTSNFRVQPTESIVRFPNITNLCPFGEVFNATRFASVYAWNRKRISNCVADYSVLYNSASFSTFKCYGVSPTKLNDLCFTNVYADSFVIRGDEVRQIAPGQTGKIADYNYKLPDDFTGCVIAWNSNNLDSKVGGNYNYLYRLFRKSNLKPFERDISTEIYQAGSTPCNGVEGFNCYFPLQSYGFQPTNGVGYQPYRVVVLSFELLHAPATVCGPKKSTNLVKNKCVNFNFNGLTGTGVLTESNKKFLPFQQFGRDIADTTDAVRDPQTLEILDITPCSFGGVSVITPGTNTSNQVAVLYQGVNCTEVPVAIHADQLTPTWRVYSTGSNVFQTRAGCLIGAEHVNNSYECDIPIGAGICASYQTQTNSPRRARSVASQSIIAYTMSLGAENSVAYSNNSIAIPTNFTISVTTEILPVSMTKTSVDCTMYICGDSTECSNLLLQYGSFCTQLNRALTGIAVEQDKNTQEVFAQVKQIYKTPPIKDFGGFNFSQILPDPSKPSKRSFIEDLLFNKVTLADAGFIKQYGDCLGDIAARDLICAQKFNGLTVLPPLLTDEMIAQYTSALLAGTITSGWTFGAGAALQIPFAMQMAYRFNGIGVTQNVLYENQKLIANQFNSAIGKIQDSLSSTASALGKLQDVVNQNAQALNTLVKQLSSNFGAISSVLNDILSRLDPPEAEVQIDRLITGRLQSLQTYVTQQLIRAAEIRASANLAATKMSECVLGQSKRVDFCGKGYQLMSFPQSAPHGVVFLNVTYVPAQEKNFTTAPAICNDGKAHFPREGVFVSNGTNWFVTQRNFYEPQIITTDNTFVSGNCDVVIGIVNNTVYDPLQPELDSFKEELDKYFKNHTSPDVDLGDISGINASVVNIQKEIDRLNEVAKNLNESLIDLQELGKYEQYIKGGSGYIPEAPRDGQAYVRKDGEWVLLSTFL

SEQ ID NO: 5963 - protein, 1241 aa, Artificial Sequence
  SARS-CoV-2/USA/WI-13/2020__EPI_ISL_417516 spike protein (1-1211)(K986P_V987P_ H1048Q_H1064N_ H1083N_H1101N) Foldon construct
MFVFLVLLPLVSSQCVNLTTRTQLPPAYTNSFTRGVYYPDKVFRSSVLHSTQDLFLPFFSNVTWFHAIHVSGTNGTKRFDNPVLPFNDGVYFASTEKSNIIRGWIFGTTLDSKTQSLLIVNNATNVVIKVCEFQFCNDPFLGVYYHKNNKSWMESEFRVYSSANNCTFEYVSQPFLMDLEGKQGNFKNLREFVFKNIDGYFKIYSKHTPINLVRDLPQGFSALEPLVDLPIGINITRFQTLLALHRSYLTPGDSSSGWTAGAAAYYVGYLQPRTFLLKYNENGTITDAVDCALDPLSETKCTLKSFTVEKGIYQTSNFRVLPTESIVRFPNITNLCPFGEVFNATRFASVYAWNRKRISNCVADYSVLYNSASFSTFKCYGVSPTKLNDLCFTNVYADSFVIRGDEVRQIAPGQTGKIADYNYKLPDDFTGCVIAWNSNNLDSKVGGNYNYLYRLFRKSNLKPFERDISTEIYQAGSTPCNGVEGFNCYFPLQSYGFQPTNGVGYQPYRVVVLSFELLHAPATVCGPKKSTNLVKNKCVNFNFNGLTGTGVLTESNKKFLPFQQFGRDIADTTDAVRDPQTLEILDITPCSFGGVSVITPGTNTSNQVAVLYQGVNCTEVPVAIHADQLTPTWRVYSTGSNVFQTRAGCLIGAEHVNNSYECDIPIGAGICASYQTQTNSPRRARSVASQSIIAYTMSLGAENSVAYSNNSIAIPTNFTISVTTEILPVSMTKTSVDCTMYICGDSTECSNLLLQYGSFCTQLNRALTGIAVEQDKNTQEVFAQVKQIYKTPPIKDFGGFNFSQILPDPSKPSKRSFIEDLLFNKVTLADAGFIKQYGDCLGDIAARDLICAQKFNGLTVLPPLLTDEMIAQYTSALLAGTITSGWTFGAGAALQIPFAMQMAYRFNGIGVTQNVLYENQKLIANQFNSAIGKIQDSLSSTASALGKLQDVVNQNAQALNTLVKQLSSNFGAISSVLNDILSRLDPPEAEVQIDRLITGRLQSLQTYVTQQLIRAAEIRASANLAATKMSECVLGQSKRVDFCGKGYQLMSFPQSAPHGVVFLNVTYVPAQEKNFTTAPAICNDGKAHFPREGVFVSNGTNWFVTQRNFYEPQIITTDNTFVSGNCDVVIGIVNNTVYDPLQPELDSFKEELDKYFKNHTSPDVDLGDISGINASVVNIQKEIDRLNEVAKNLNESLIDLQELGKYEQYIKGGSGYIPEAPRDGQAYVRKDGEWVLLSTFL

SEQ ID NO: 5964 - protein, 1240 aa, Artificial Sequence
  SARS-CoV-2/India/1-27/2020__EPI_ISL_413522 spike protein (1-1210)(K985P_V986P_ H1047Q_H1063N_ H1082N_H1100N) Foldon construct
MFVFLVLLPLVSSQCVNLTTRTQLPPAYTNSFTRGVYYPDKVFRSSVLHSTQDLFLPFFSNVTWFHAIHVSGTNGTKRFDNPVLPFNDGVYFASTEKSNIIRGWIFGTTLDSKTQSLLIVNNATNVVIKVCEFQFCNDPFLGVYHKNNKSWMESEFRVYSSANNCTFEYVSQPFLMDLEGKQGNFKNLREFVFKNIDGYFKIYSKHTPINLVRDLPQGFSALEPLVDLPIGINITRFQTLLALHRSYLTPGDSSSGWTAGAAAYYVGYLQPRTFLLKYNENGTITDAVDCALDPLSETKCTLKSFTVEKGIYQTSNFRVQPTESIVRFPNITNLCPFGEVFNATRFASVYAWNRKRISNCVADYSVLYNSASFSTFKCYGVSPTKLNDLCFTNVYADSFVIRGDEVIQIAPGQTGKIADYNYKLPDDFTGCVIAWNSNNLDSKVGGNYNYLYRLFRKSNLKPFERDISTEIYQAGSTPCNGVEGFNCYFPLQSYGFQPTNGVGYQPYRVVVLSFELLHAPATVCGPKKSTNLVKNKCVNFNFNGLTGTGVLTESNKKFLPFQQFGRDIADTTDAVRDPQTLEILDITPCSFGGVSVITPGTNTSNQVAVLYQDVNCTEVPVAIHADQLTPTWRVYSTGSNVFQTRAGCLIGAEHVNNSYECDIPIGAGICASYQTQTNSPRRARSVASQSIIAYTMSLGAENSVAYSNNSIAIPTNFTISVTTEILPVSMTKTSVDCTMYICGDSTECSNLLLQYGSFCTQLNRALTGIAVEQDKNTQEVFAQVKQIYKTPPIKDFGGFNFSQILPDPSKPSKRSFIEDLLFNKVTLADAGFIKQYGDCLGDIAARDLICAQKFNGLTVLPPLLTDEMIAQYTSALLAGTITSGWTFGAGAALQIPFAMQMAYRFNGIGVTQNVLYENQKLIANQFNSAIGKIQDSLSSTASALGKLQDVVNQNAQALNTLVKQLSSNFGAISSVLNDILSRLDPPEAEVQIDRLITGRLQSLQTYVTQQLIRAAEIRASANLAATKMSECVLGQSKRVDFCGKGYQLMSFPQSAPHGVVFLNVTYVPAQEKNFTTAPAICNDGKAHFPREGVFVSNGTNWFVTQRNFYEPQIITTDNTFVSGNCDVVIGIVNNTVYDPLQPELDSFKEELDKYFKNHTSPDVDLGDISGINASVVNIQKEIDRLNEVAKNLNESLIDLQELGKYEQYIKGGSGYIPEAPRDGQAYVRKDGEWVLLSTFL

SEQ ID NO: 5965 - protein, 1235 aa, Artificial Sequence
  SARS-CoV-2/pangolin/Guangxi/P4L/2017__EPI_ISL_410538 spike protein (1-1205)(K980P_V981P_ H1042Q_H1058N_ H1077N_H1095N) Foldon construct
MFVFLFVLPLVSSQCVNLTTRTGIPPGYTNSSTRGVYYPDKVFRSSILHLTQDLFLPFFSNVTWFNTINYQGGFKKFDNPVLPFNDGVYFASTEKSNIIRGWIFGTTLDARTQSLLIVNNATNVVIKVCEFQFCTDPFLGVYYHNNNKTWVENEFRVYSSANNCTFEYISQPFLMDLEGKQGNFKNLREFVFKNVDGYFKIYSKHTPIDLVRDLPRGFAALEPLVDLPIGINITRFQTLLALHRSYLTPGNLESGWTTGAAAYYVGYLQQRTFLLSYNQNGTITDAVDCSLDPLSETKCTLKSLTVEKGIYQTSNFRVQPTISIVRFPNITNLCPFGEVFNASKFASVYAWNRKRISNCVADYSVLYNSTSFSTFKCYGVSPTKLNDLCFTNVYADSFVVKGDEVRQIAPGQTGVIADYNYKLPDDFTGCVIAWNSVKQDALTGGNYGYLYRLFRKSKLKPFERDISTEIYQAGSTPCNGQVGLNCYYPLERYGFHPTTGVNYQPFRVVVLSFELLNGPATVCGPKLSTTLVKDKCVNFNFNGLTGTGVLTTSKKQFLPFQQFGRDISDTTDAVRDPQTLEILDITPCSFGGVSVITPGTNTSNQVAVLYQDVNCTEVPMAIHAEQLTPAWRVYSAGANVFQTRAGCLVGAEHVNNSYECDIPVGAGICASYHSMSSLRSVNQRSIIAYTMSLGAENSVAYSNNSIAIPTNFTISVTTEILPVSMTKTSVDCTMYICGDSIECSNLLLQYGSFCTQLNRALTGIAVEQDKNTQEVFAQVKQIYKTPPIKDFGGFNFSQILPDPSKPSKRSFIEDLLFNKVTLADAGFIKQYGDCLGDIAARDLICAQKFNGLTVLPPLLTDEMIAQYTSALLAGTITSGWTFGAGAALQIPFAMQMAYRFNGIGVTQNVLYENQKLIANQFNSAIGKIQDSLSSTASALGKLQDVVNQNAQALNTLVKQLSSNFGAISSVLNDILSRLDPPEAEVQIDRLITGRLQSLQTYVTQQLIRAAEIRASANLAATKMSECVLGQSKRVDFCGKGYQLMSFPQSAPHGVVFLNVTYVPAQEKNFTTAPAICNEGKAHFPREGVFVSNGTNWFITQRNFYEPQIITTDNTFVSGSCDVVIGIVNNTVYDPLQPELDSFKEELDKYFKNHTSPDVDLGDISGINASVVNIQKEIDRLNEVAKNLNESPIDLQELGKYEQYIKGGSGYIPEAPRDGQAYVRKDGEWVLLSTFL

SEQ ID NO: 5966 - protein, 1235 aa, Artificial Sequence
  SARS-CoV-2/pangolin/Guangxi/P5L/2017__EPI_ISL_410540 spike protein (1-1205)(K980P_V981P_ H1042Q_H1058N_ H1077N_H1095N) Foldon construct
MFVFLFVLPLVSSQCVNLTTRTGIPPGYTNSSTRGVYYPDKVFRSSILHLTQDLFLPFFSNVTWFNTINYQGGFKKFDNPVLPFNDGVYFASTEKSNIIRGWIFGTTLDARTQSLLIVNNATNVVIKVCEFQFCTDPFLGVYYHNNNKTWVENEFRVYSSANNCTFEYISQPFLMDLEGKQGNFKNLREFVFKNVDGYFKIYSKHTPIDLVRDLPRGFAALEPLVDLPIGINITRFQTLLALHRSYLTPGKLESGWTTGAAAYYVGYLQQRTFLLSYNQNGTITDAVDCSLDPLSETKCTLKSLTVEKGIYQTSNFRVQPTISIVRFPNITNLCPFGEVFNASKFASVYAWNRKRISNCVADYSVLYNSTSFSTFKCYGVSPTKLNDLCFTNVYADSFVVKGDEVRQIAPGQTGVIADYNYKLPDDFTGCVIAWNSVKQDALTGGNYGYLYRLFRKSKLKPFERDISTEIYQAGSTPCNGQVGLNCYYPLERYGFHPTTGVNYQPFRVVVLSFELLNGPATVCGPKLSTTLVKDKCVNFNFNGLTGTGVLTTSKKQFLPFQQFGRDISDTTDAVRDPQTLEILDITPCSFGGVSVITPGTNTSNQVAVLYQDVNCTEVPMAIHAEQLTPAWRVYSAGANVFQTRAGCLVGAEHVNNSYECDIPVGAGICASYHSMSSFRSVNQRSIIAYTMSLGAENSVAYSNNSIAIPTNFTISVTTEILPVSMTKTSVDCTMYICGDSIECSNLLLQYGSFCTQLNRALTGIAVEQDKNTQEVFAQVKQIYKTPPIKDFGGFNFSQILPDPSKPSKRSFIEDLLFNKVTLADAGFIKQYGDCLGDIAARDLICAQKFNGLTVLPPLLTDEMIAQYTSALLAGTITSGWTFGAGAALQIPFAMQMAYRFNGIGVTQNVLYENQKLIANQFNSAIGKIQDSLSSTASALGKLQDVVNQNAQALNTLVKQLSSNFGAISSVLNDILSRLDPPEAEVQIDRLITGRLQSLQTYVTQQLIRAAEIRASANLAATKMSECVLGQSKRVDFCGKGYQLMSFPQSAPHGVVFLNVTYVPAQEKNFTTAPAICNEGKAHFPREGVFVSNGTNWFITQRNFYEPQIITTDNTFVSGSCDVVIGIVNNTVYDPLQPELDSFKEELDKYFKNHTSPDVDLGDISGINASVVNIQKEIDRLNEVAKNLNESLIDLQELGKYEQYIKGGSGYIPEAPRDGQAYVRKDGEWVLLSTFL

SEQ ID NO: 5967 - protein, 1235 aa, Artificial Sequence
  SARS-CoV-2/pangolin/Guangxi/P5E/2017__EPI_ISL_410541 spike protein (1-1205)(K980P_V981P_ H1042Q_H1058N_ H1077N_H1095N) Foldon construct
MFVFLFVLPLVSSQCVNLTTRTGIPPGYTNSSTRGVYYPDKVFRSSILHLTQDLFLPFFSNVTWFNTITYQGGSKKFDNPVLPFNDGVYFASTEKSNIIRGWIFGTTLDARTQSLLIVNNATNVVIKVCEFQFCTDPFLGVYYHNNNKTWVENEFRVYSSANNCTFEYISQPFLMDLEGKQGNFKNLREFVFKNVDGYFKIYSKHTPIDLVRDLPRGFAALEPLVDLPIGINITRFQTLLALHRSYLTPGKLESGWTTGAAAYYVGYLQQRTFLLSYNQNGTITDAVDCSLDPLSETKCTLKSLTVEKGIYQTSNFRVQPTISIVRFPNITNLCPFGEVFNASKFASVYAWNRKRISNCVADYSVLYNSTSFSTFKCYGVSPTKLNDLCFTNVYADSFVVKGDEVRQIAPGQTGVIADYNYKLPDDFTGCVIAWNSVKQDALTGDNYGYLYRLFRKSKLKPFERDISTEIYQAGSTPCNGQVGLNCYYPLERYGFHPTTGVNYQPFRVVVLSFELLNGPATVCGPKLSTTLVKDKCVNFNFNGLTGTGVLTTSKKQFLPFQQFGRDISDTTDAVRDPQTLEILDITPCSFGGVSVITPGTNTSNQVAVLYQDVNCTEVPMAIHAEQLTPAWRVYSAGANVFQTRAGCLVGAEHVNNSYECDIPVGAGICASYHSMSSFRSVNQRSIIAYTMSLGAENSVAYSNNSIAIPTNFTISVTTEILPVSMTKTSVDCTMYICGDSIECSNLLLQYGSFCTQLNRALTGIAVEQDKNTQEVFAQVKQIYKTPPIKDFGGFNFSQILPDPSKPSKRSFIEDLLFNKVTLADAGFIKQYGDCLGDIAARDLICAQKFNGLTVLPPLLTDEMIAQYTSALLAGTITSGWTFGAGAALQIPFAMQMAYRFNGIGVTQNVLYENQKLIANQFNSAIGKIQDSLSSTASALGKLQDVVNQNAQALNTLVKQLSSNFGAISSVLNDILSRLDPPEAEVQIDRLITGRLQSLQTYVTQQLIRAAEIRASANLAATKMSECVLGQSKRVDFCGKGYQLMSFPQSAPHGVVFLNVTYVPAQEKNFTTAPAICNEGKAHFPREGVFVSNGTNWFITQRNFYEPQIITTDNTFVSGSCDVVIGIVNNTVYDPLQPELDSFKEELDKYFKNHTSPDVDLGDISGINASVVNIQKEIDRLNEVAKNLNESLIDLQELGKYEQYIKGGSGYIPEAPRDGQAYVRKDGEWVLLSTFL

SEQ ID NO: 5968 - protein, 1233 aa, Artificial Sequence
  SARS-CoV-2/pangolin/Guangxi/P1E/2017__EPI_ISL_410539 spike protein (1-1203)(K978P_V979P_ H1040Q_H1056N_ H1075N_H1093N) Foldon construct
MFVFLFVLPLVSSQCVNLTTRTGIQPGYTNSSTRGVYYPDKVFRSSILHLTQDLFLPFFSNVTWFNTINYQGGFKKFDNPVLPFNDGVYFASTEKSNIIRGWIFGTTLDARTQSLLIVNNATNVVIKVCEFQFCTDPFLGVYYHNNNKTWVENEFRVYSSANNCTFEYISQPFLMDLEGKQGNFKNLREFVFKNVDGYFKIYSKHTPIDLVRDLPRGFAALEPLVDLPIGINITRFQTLLALHRSYLTPGKLESGWTTGAAAYYVGYLQQRTFLLSYNQNGTITDAVDCSLDPLSETKCTLKSLTVEKGIYQTSNFRVQPTISIVRFPNITNLCPFGEVFNASKFASVYAWNRKRISNCVADYSVLYNSTSFSTFKCYGVSPTKLNDLCFTNVYADSFVVKGDEVRQIAPGQTGVIADYNYKLPDDFTGCVIAWNSVKQDALTGGNYLYRLFRKSKLKPFERDISTEIYQAGSTPCNGQVGLNCYYPLERYGFHPTTGVNYQPFRVVVLSFELLNGPATVCGPKLSTTLVKDKCVNFNFNGLTGTGVLTTSKKQFLPFQQFGRDISDTTDAVRDPQTLEILDITPCSFGGVSVITPGTNTSNQVAVLYQDVNCTEVPMAIHAEQLTPAWRVYSAGANVFQTRAGCLVGAEHVNNSYECDIPVGAGICASYHSMSSLRSVNQRSIIAYTMSLGAENSVAYSNNSIAIPTNFTISVTTEILPVSMTKTSVDCTMYICGDSIECSNLLLQYGSFCTQLNRALTGIAVEQDKNTQEVFAQVKQIYKTPPIKDFGGFNFSQILPDPSKPSKRSFIEDLLFNKVTLADAGFIKQYGDCLGDIAARDLICAQKFNGLTVLPPLLTDEMIAQYTSALLAGTITSGWTFGAGAALQIPFAMQMAYRFNGIGVTQNVLYENQKLIANQFNSAIGKIQDSLSSTASALGKLQDVVNQNAQALNTLVKQLSSNFGAISSVLNDILSRLDPPEAEVQIDRLITGRLQSLQTYVTQQLIRAAEIRASANLAATKMSECVLGQSKRVDFCGKGYQLMSFPQSAPHGVVFLNVTYVPAQEKNFTTAPAICNEGKAHFPREGVFVSNGTNWFITQRNFYEPQIITTDNTFVSGSCDVVIGIVNNTVYDPLQPELDSFKEELDKYFKNHTSPDVDLGDISGINASVVNIQKEIDRLNEVAKNLNESLIDLQELGKYEQYIKGGSGYIPEAPRDGQAYVRKDGEWVLLSTFL

SEQ ID NO: 5969 - protein, 1241 aa, Artificial Sequence
  SARS-CoV-2/Wuhan/WIV05/2019__EPI_ISL_402128 spike protein (1-1211)(I712C_T1077C) Foldon construct
MFVFLVLLPLVSSQCVNLTTRTQLPPAYTNSFTRGVYYPDKVFRSSVLHSTQDLFLPFFSNVTWFHAIHVSGTNGTKRFDNPVLPFNDGVYFASTEKSNIIRGWIFGTTLDSKTQSLLIVNNATNVVIKVCEFQFCNDPFLGVYYHKNNKSWMESEFRVYSSANNCTFEYVSQPFLMDLEGKQGNFKNLREFVFKNIDGYFKIYSKHTPINLVRDLPQGFSALEPLVDLPIGINITRFQTLLALHRSYLTPGDSSSGWTAGAAAYYVGYLQPRTFLLKYNENGTITDAVDCALDPLSETKCTLKSFTVEKGIYQTSNFRVQPTESIVRFPNITNLCPFGEVFNATRFASVYAWNRKRISNCVADYSVLYNSASFSTFKCYGVSPTKLNDLCFTNVYADSFVIRGDEVRQIAPGQTGKIADYNYKLPDDFTGCVIAWNSNNLDSKVGGNYNYLYRLFRKSNLKPFERDISTEIYQAGSTPCNGVEGFNCYFPLQSYGFQPTNGVGYQPYRVVVLSFELLHAPATVCGPKKSTNLVKNKCVNFNFNGLTGTGVLTESNKKFLPFQQFGRDIADTTDAVRDPQTLEILDITPCSFGGVSVITPGTNTSNQVAVLYQDVNCTEVPVAIHADQLTPTWRVYSTGSNVFQTRAGCLIGAEHVNNSYECDIPIGAGICASYQTQTNSPRRARSVASQSIIAYTMSLGAENSVAYSNNSCAIPTNFTISVTTEILPVSMTKTSVDCTMYICGDSTECSNLLLQYGSFCTQLNRALTGIAVEQDKNTQEVFAQVKQIYKTPPIKDFGGFNFSQILPDPSKPSKRSFIEDLLFNKVTLADAGFIKQYGDCLGDIAARDLICAQKFNGLTVLPPLLTDEMIAQYTSALLAGTITSGWTFGAGAALQIPFAMQMAYRFNGIGVTQNVLYENQKLIANQFNSAIGKIQDSLSSTASALGKLQDVVNQNAQALNTLVKQLSSNFGAISSVLNDILSRLDKVEAEVQIDRLITGRLQSLQTYVTQQLIRAAEIRASANLAATKMSECVLGQSKRVDFCGKGYHLMSFPQSAPHGVVFLHVTYVPAQEKNFTCAPAICHDGKAHFPREGVFVSNGTHWFVTQRNFYEPQIITTDNTFVSGNCDVVIGIVNNTVYDPLQPELDSFKEELDKYFKNHTSPDVDLGDISGINASVVNIQKEIDRLNEVAKNLNESLIDLQELGKYEQYIKGGSGYIPEAPRDGQAYVRKDGEWVLLSTFL

SEQ ID NO: 5970 - protein, 1237 aa, Artificial Sequence
  SARS-CoV-2/bat/Yunnan/RaTG13/2013__EPI_ISL_402131 spike protein (1-1207)(I708C_T1073C) Foldon construct
MFVFLVLLPLVSSQCVNLTTRTQLPPAYTNSSTRGVYYPDKVFRSSVLHLTQDLFLPFFSNVTWFHAIHVSGTNGIKRFDNPVLPFNDGVYFASTEKSNIIRGWIFGTTLDSKTQSLLIVNNATNVVIKVCEFQFCNDPFLGVYYHKNNKSWMESEFRVYSSANNCTFEYVSQPFLMDLEGKQGNFKNLREFVFKNIDGYFKIYSKHTPINLVRDLPPGFSALEPLVDLPIGINITRFQTLLALHRSYLTPGDSSSGWTAGAAAYYVGYLQPRTFLLKYNENGTITDAVDCALDPLSETKCTLKSFTVEKGIYQTSNFRVQPTDSIVRFPNITNLCPFGEVFNATTFASVYAWNRKRISNCVADYSVLYNSTSFSTFKCYGVSPTKLNDLCFTNVYADSFVITGDEVRQIAPGQTGKIADYNYKLPDDFTGCVIAWNSKHIDAKEGGNFNYLYRLFRKANLKPFERDISTEIYQAGSKPCNGQTGLNCYYPLYRYGFYPTDGVGHQPYRVVVLSFELLNAPATVCGPKKSTNLVKNKCVNFNFNGLTGTGVLTESNKKFLPFQQFGRDIADTTDAVRDPQTLEILDITPCSFGGVSVITPGTNASNQVAVLYQDVNCTEVPVAIHADQLTPTWRVYSTGSNVFQTRAGCLIGAEHVNNSYECDIPIGAGICASYQTQTNSRSVASQSIIAYTMSLGAENSVAYSNNSCAIPTNFTISVTTEILPVSMTKTSVDCTMYICGDSTECSNLLLQYGSFCTQLNRALTGIAVEQDKNTQEVFAQVKQIYKTPPIKDFGGFNFSQILPDPSKPSKRSFIEDLLFNKVTLADAGFIKQYGDCLGDIAARDLICAQKFNGLTVLPPLLTDEMIAQYTSALLAGTITSGWTFGAGAALQIPFAMQMAYRFNGIGVTQNVLYENQKLIANQFNSAIGKIQDSLSSTASALGKLQDVVNQNAQALNTLVKQLSSNFGAISSVLNDILSRLDKVEAEVQIDRLITGRLQSLQTYVTQQLIRAAEIRASANLAATKMSECVLGQSKRVDFCGKGYHLMSFPQSAPHGVVFLHVTYVPAQEKNFTCAPAICHDGKAHFPREGVFVSNGTHWFVTQRNFYEPQIITTDNTFVSGSCDVVIGIVNNTVYDPLQPELDSFKEELDKYFKNHTSPDVDLGDISGINASVVNIQKEIDRLNEVAKNLNESLIDLQELGKYEQYIKGGSGYIPEAPRDGQAYVRKDGEWVLLSTFL

SEQ ID NO: 5971 - protein, 1241 aa, Artificial Sequence
  SARS-CoV-2/Wuhan/HBCDC-HB-01/2019__EPI_ISL_402132 spike protein (1-1211)(I712C_T1077C) Foldon construct
MFVFLVLLPLVSSQCVNLTTRTQLPPAYTNSITRGVYYPDKVFRSSVLHSTQDLFLPFFSNVTWFHAIHVSGTNGTKRFDNPVLPFNDGVYFASTEKSNIIRGWIFGTTLDSKTQSLLIVNNATNVVIKVCEFQFCNDPFLGVYYHKNNKSWMESEFRVYSSANNCTFEYVSQPFLMDLEGKQGNFKNLREFVFKNIDGYFKIYSKHTPINLVRDLPQGFSALEPLVDLPIGINITRFQTLLALHRSYLTPGDSSSGWTAGAAAYYVGYLQPRTFLLKYNENGTITDAVDCALDPLSETKCTLKSFTVEKGIYQTSNFRVQPTESIVRFPNITNLCPFGEVFNATRFASVYAWNRKRISNCVADYSVLYNSASFSTFKCYGVSPTKLNDLCFTNVYADSFVIRGDEVRQIAPGQTGKIADYNYKLPDDFTGCVIAWNSNNLDSKVGGNYNYLYRLFRKSNLKPFERDISTEIYQAGSTPCNGVEGFNCYFPLQSYGFQPTNGVGYQPYRVVVLSFELLHAPATVCGPKKSTNLVKNKCVNFNFNGLTGTGVLTESNKKFLPFQQFGRDIADTTDAVRDPQTLEILDITPCSFGGVSVITPGTNTSNQVAVLYQDVNCTEVPVAIHADQLTPTWRVYSTGSNVFQTRAGCLIGAEHVNNSYECDIPIGAGICASYQTQTNSPRRARSVASQSIIAYTMSLGAENSVAYSNNSCAIPTNFTISVTTEILPVSMTKTSVDCTMYICGDSTECSNLLLQYGSFCTQLNRALTGIAVEQDKNTQEVFAQVKQIYKTPPIKDFGGFNFSQILPDPSKPSKRSFIEDLLFNKVTLADAGFIKQYGDCLGDIAARDLICAQKFNGLTVLPPLLTDEMIAQYTSALLAGTITSGWTFGAGAALQIPFAMQMAYRFNGIGVTQNVLYENQKLIANQFNSAIGKIQDSLSSTASALGKLQDVVNQNAQALNTLVKQLSSNFGAISSVLNDILSRLDKVEAEVQIDRLITGRLQSLQTYVTQQLIRAAEIRASANLAATKMSECVLGQSKRVDFCGKGYHLMSFPQSAPHGVVFLHVTYVPAQEKNFTCAPAICHDGKAHFPREGVFVSNGTHWFVTQRNFYEPQIITTDNTFVSGNCDVVIGIVNNTVYDPLQPELDSFKEELDKYFKNHTSPDVDLGDISGINASVVNIQKEIDRLNEVAKNLNESLIDLQELGKYEQYIKGGSGYIPEAPRDGQAYVRKDGEWVLLSTFL

SEQ ID NO: 5972 - protein, 1241 aa, Artificial Sequence
  SARS-CoV-2/Guangdong/20SF028/2020__EPI_ISL_403936 spike protein (1-1211)(I712C_T1077C) Foldon construct
MFVFLVLLPLVSSQCVNLTTRTQLPPAYTNSFTRGVYYPDKVFRSSVLYSTQDLFLPFFSNVTWFHAIHVSGTNGTKRFDNPVLPFNDGVYFASTEKSNIIRGWIFGTTLDSKTQSLLIVNNATNVVIKVCEFQFCNDPFLGVYYHKNNKSWMESEFRVYSSANNCTFEYVSQPFLMDLEGKQGNFKNLREFVFKNIDGYFKIYSKHTPINLVRDLPQGFSALEPLVDLPIGINITRFQTLLALHRSYLTPGDSSSGWTAGAAAYYVGYLQPRTFLLKYNENGTITDAVDCALDPLSETKCTLKSFTVEKGIYQTSNFRVQPTESIVRFPNITNLCPFGEVFNATRFASVYAWNRKRISNCVADYSVLYNSASFSTFKCYGVSPTKLNDLCFTNVYADSFVIRGDEVRQIAPGQTGKIADYNYKLPDDFTGCVIAWNSNNLDSKVGGNYNYLYRLFRKSNLKPFERDISTEIYQAGSTPCNGVEGFNCYFPLQSYGFQPTNGVGYQPYRVVVLSFELLHAPATVCGPKKSTNLVKNKCVNFNFNGLTGTGVLTESNKKFLPFQQFGRDIADTTDAVRDPQTLEILDITPCSFGGVSVITPGTNTSNQVAVLYQDVNCTEVPVAIHADQLTPTWRVYSTGSNVFQTRAGCLIGAEHVNNSYECDIPIGAGICASYQTQTNSPRRARSVASQSIIAYTMSLGAENSVAYSNNSCAIPTNFTISVTTEILPVSMTKTSVDCTMYICGDSTECSNLLLQYGSFCTQLNRALTGIAVEQDKNTQEVFAQVKQIYKTPPIKDFGGFNFSQILPDPSKPSKRSFIEDLLFNKVTLADAGFIKQYGDCLGDIAARDLICAQKFNGLTVLPPLLTDEMIAQYTSALLAGTITSGWTFGAGAALQIPFAMQMAYRFNGIGVTQNVLYENQKLIANQFNSAIGKIQDSLSSTASALGKLQDVVNQNAQALNTLVKQLSSNFGAISSVLNDILSRLDKVEAEVQIDRLITGRLQSLQTYVTQQLIRAAEIRASANLAATKMSECVLGQSKRVDFCGKGYHLMSFPQSAPHGVVFLHVTYVPAQEKNFTCAPAICHDGKAHFPREGVFVSNGTHWFVTQRNFYEPQIITTDNTFVSGNCDVVIGIVNNTVYDPLQPELDSFKEELDKYFKNHTSPDVDLGDISGINASVVNIQKEIDRLNEVAKNLNESLIDLQELGKYEQYIKGGSGYIPEAPRDGQAYVRKDGEWVLLSTFL

SEQ ID NO: 5973 - protein, 1241 aa, Artificial Sequence
  SARS-CoV-2/Shenzhen/SZTH-001/2020__EPI_ISL_406592 spike protein (1-1211)(I712C_T1077C) Foldon construct
MFVFLVLLPLVSSQCVNLTTRTQLPPAYTNSFTRGVYYPDKVFRSSVLHSTQDLFLPFFSNVTWFHAIHVSGTNGTKRFDNPVLPFNDGVYFASTEKSNIIRGWIFGTTLDSKTQSLLIVNNATNVVIKVCEFQFCNDPFLGVYYHKNNKSWMESEFRVYSSANNCTFEYVSQPFLMDLEGKQGNFKNLREFVFKNIDGYFKIYSKHTPINLVRDLPQGFSALEPLVDLPIGINITRFQTLLALHRSYLTPGDSSSGWTAGAAAYYVGYLQPRTFLLKYNENGTITDAVDCALDPLSETKCTLKSFTVEKGIYQTSNFRVQPTESIVRFPNITNLCPFGEVFNATRFASVYAWNRKRISNCVADYSVLYNSASFSTFKCYGVSPTKLNDLCFTNVYADSFVIRGDEVRQIAPGQTGKIADYNYKLPDDFTGCVIAWNSNNLDSKVGGNYNYLYRLFRKSNLKPFERDISTEIYQAGSTPCNGVEGFNCYFPLQSYGFQPTNGVGYQPYRVVVLSFELLHAPATVCGPKKSTNLVKNKCVNFNFNGLTGTGVLTESNKKFLPFQQFGRDIADTTDAVRDPQTLEILDITPCSFGGVSVITPGTNTSNQVAVLYQDVNCTEVPVAIHADQLTPTWRVYSTGSNVFQTRAGCLIGAEHVNNSYECDIPIGAGICASYQTQTNSPRRARSVASQSIIAYTMSLGAENSVAYSNNSCAIPTNFTISVTTEILPVSMTKTSVDCTMYICGDSTECSNLLLQYGSFCTQLNRALTGIAVEQDKNTQEVFAQVKQIYKTPPIKDFGGFNFSQILPDPSKPSKRSFIEDLLFNKVTLADAGFIKQYGDCLGDIAARDLICAQKFNGLTVLPPLLTDEMIAQYTSALLAGTITSGWTFGAGAALQIPFAMQMAYRFNGIGVTQNVLYENQKLIANQFNSAIGKIQDSLSSTASALGKLQDVVNQNAQALNTLVKQLSSNFGAISSVLNDILSRLDKVEAEVQIDRLITGRLQSLQTYVTQQLIRAAEIRASANLAATKMSECVLGQSKRVDFCGKGYHLMSFPQSAPHGVVFLHVTYVPAQEKNFTCAPAICHDGKAHFPREGVFVSNGTHWFVTQRNFYEPQIITTDNTFVSGNCDVLIGIVNNTVYDPLQPELDSFKEELDKYFKNHTSPDVDLGDISGINASVVNIQKEIDRLNEVAKNLNESLIDLQELGKYEQYIKGGSGYIPEAPRDGQAYVRKDGEWVLLSTFL

SEQ ID NO: 5974 - protein, 1241 aa, Artificial Sequence
  SARS-CoV-2/Shenzhen/SZTH-004/2020__EPI_ISL_406595 spike protein (1-1211)(I712C_T1077C) Foldon construct
MFVFLVLLPLVSSQCVNLTTRTQLPPAYTNSFTRGVYYPDKVFRSSVLHSTQDLFLPFFSNVTWFHAIHVSGTNGTKRFDNPVLPFNDGVYFASTEKSNIIRGWIFGTTLDSKTQSLLIVNNATNVVIKVCEFQFCNDPFLGVYYHKNNKSWMESEFRVYSSANNCTFEYVSQPFLMDLEGKQGNFKNLREFVFKNIDGYFKIYSKHTPINLVRDLPQGFSALEPLVDLPIGINITRFQTLLALHRSYLTPGDSSSGWTAGAAAYYVGYLQPRTFLLKYNENGTITDAVDCALDPLSETKCTLKSFTVEKGIYQTSNFRVQPTESIVRFPNITNLCPFGEVFNATRFASVYAWDRKRISNCVAYYSVLYNSASFSTFKCYGVSPTKLNDLCFTNVYADSFVIRGDEVRQIAPGQTGKIADYNYKLPDDFTGCVIAWNSNNLDSKVGGNYNYLYRLFRKSNLKPFERDISTEIYQAGSTPCNGVEGFNCYFPLQSYGFQPTNGVGYQPYRVVVLSFELLHAPATVCGPKKSTNLVKNKCVNFNFNGLTGTGVLTESNKKFLPFQQFGRDIADTTDAVRDPQTLEILDITPCSFGGVSVITPGTNTSNQVAVLYQDVNCTEVPVAIHADQLTPTWRVYSTGSNVFQTRAGCLIGAEHVNNSYECDIPIGAGICASYQTQTNSPRRARSVASQSIIAYTMSLGAENSVAYSNNSCAIPTNFTISVTTEILPVSMTKTSVDCTMYICGDSTECSNLLLQYGSFCTQLNRALTGIAVEQDKNTQEVFAQVKQIYKTPPIKDFGGFNFSQILPDPSKPSKRSFIEDLLFNKVTLADAGFIKQYGDCLGDIAARDLICAQKFNGLTVLPPLLTDEMIAQYTSALLAGTITSGWTFGAGAALQIPFAMQMAYRFNGIGVTQNVLYENQKLIANQFNSAIGKIQDSLSSTASALGKLQDVVNQNAQALNTLVKQLSSNFGAISSVLNDILSRLDKVEAEVQIDRLITGRLQSLQTYVTQQLIRAAEIRASANLAATKMSECVLGQSKRVDFCGKGYHLMSFPQSAPHGVVFLHVTYVPAQEKNFTCAPAICHDGKAHFPREGVFVSNGTHWFVTQRNFYEPQIITTDNTFVSGNCDVVIGIVNNTVYDPLQPELDSFKEELDKYFKNHTSPDVDLGDISGINASVVNIQKEIDRLNEVAKNLNESLIDLQELGKYEQYIKGGSGYIPEAPRDGQAYVRKDGEWVLLSTFL

SEQ ID NO: 5975 - protein, 1241 aa, Artificial Sequence
  SARS-CoV-2/France/IDF0372/2020__EPI_ISL_406596 spike protein (1-1211)(I712C_T1077C) Foldon construct
MFVFLVLLPLVSSQCVNLTTRTQLPPAYTNSFTRGVYYPDKVFRSSVLHSTQDLFLPFFSNVTWFHAIHVSGTNGTKRFDNPVLPFNDGVYFASTEKSNIIRGWIFGTTLDSKTQSLLIVNNATNVVIKVCEFQFCNDPFLGVYYHKNNKSWMESEFRVYSSANNCTFEYVSQPFLMDLEGKQGNFKNLREFVFKNIDGYFKIYSKHTPINLVRDLPQGFSALEPLVDLPIGINITRFQTLLALHRSYLTPGDSSSGWTAGAAAYYVGYLQPRTFLLKYNENGTITDAVDCALDPLSETKCTLKSFTVEKGIYQTSNFRVQPTESIVRFPNITNLCPFGEVFNATRFASVYAWNRKRISNCVADYSFLYNSASFSTFKCYGVSPTKLNDLCFTNVYADSFVIRGDEVRQIAPGQTGKIADYNYKLPDDFTGCVIAWNSNNLDSKVGGNYNYLYRLFRKSNLKPFERDISTEIYQAGSTPCNGVEGFNCYFPLQSYGFQPTNGVGYQPYRVVVLSFELLHAPATVCGPKKSTNLVKNKCVNFNFNGLTGTGVLTESNKKFLPFQQFGRDIADTTDAVRDPQTLEILDITPCSFGGVSVITPGTNTSNQVAVLYQDVNCTEVPVAIHADQLTPTWRVYSTGSNVFQTRAGCLIGAEHVNNSYECDIPIGAGICASYQTQTNSPRRARSVASQSIIAYTMSLGAENSVAYSNNSCAIPTNFTISVTTEILPVSMTKTSVDCTMYICGDSTECSNLLLQYGSFCTQLNRALTGIAVEQDKNTQEVFAQVKQIYKTPPIKDFGGFNFSQILPDPSKPSKRSFIEDLLFNKVTLADAGFIKQYGDCLGDIAARDLICAQKFNGLTVLPPLLTDEMIAQYTSALLAGTITSGWTFGAGAALQIPFAMQMAYRFNGIGVTQNVLYENQKLIANQFNSAIGKIQDSLSSTASALGKLQDVVNQNAQALNTLVKQLSSNFGAISSVLNDILSRLDKVEAEVQIDRLITGRLQSLQTYVTQQLIRAAEIRASANLAATKMSECVLGQSKRVDFCGKGYHLMSFPQSAPHGVVFLHVTYVPAQEKNFTCAPAICHDGKAHFPREGVFVSNGTHWFVTQRNFYEPQIITTDNTFVSGNCDVVIGIVNNTVYDPLQPELDSFKEELDKYFKNHTSPDVDLGDISGINASVVNIQKEIDRLNEVAKNLNESLIDLQELGKYEQYIKGGSGYIPEAPRDGQAYVRKDGEWVLLSTFL

SEQ ID NO: 5976 - protein, 1241 aa, Artificial Sequence
  SARS-CoV-2/Australia/VIC01/2020__EPI_ISL_406844 spike protein (1-1211)(I712C_T1077C) Foldon construct
MFVFLVLLPLVSSQCVNLTTRTQLPPAYTNSFTRGVYYPDKVFRSSVLHSTQDLFLPFFSNVTWFHAIHVSGTNGTKRFDNPVLPFNDGVYFASTEKSNIIRGWIFGTTLDSKTQSLLIVNNATNVVIKVCEFQFCNDPFLGVYYHKNNKSWMESEFRVYSSANNCTFEYVSQPFLMDLEGKQGNFKNLREFVFKNIDGYFKIYSKHTPINLVRDLPQGFSALEPLVDLPIGINITRFQTLLALHRRYLTPGDSSSGWTAGAAAYYVGYLQPRTFLLKYNENGTITDAVDCALDPLSETKCTLKSFTVEKGIYQTSNFRVQPTESIVRFPNITNLCPFGEVFNATRFASVYAWNRKRISNCVADYSVLYNSASFSTFKCYGVSPTKLNDLCFTNVYADSFVIRGDEVRQIAPGQTGKIADYNYKLPDDFTGCVIAWNSNNLDSKVGGNYNYLYRLFRKSNLKPFERDISTEIYQAGSTPCNGVEGFNCYFPLQSYGFQPTNGVGYQPYRVVVLSFELLHAPATVCGPKKSTNLVKNKCVNFNFNGLTGTGVLTESNKKFLPFQQFGRDIADTTDAVRDPQTLEILDITPCSFGGVSVITPGTNTSNQVAVLYQDVNCTEVPVAIHADQLTPTWRVYSTGSNVFQTRAGCLIGAEHVNNSYECDIPIGAGICASYQTQTNSPRRARSVASQSIIAYTMSLGAENSVAYSNNSCAIPTNFTISVTTEILPVSMTKTSVDCTMYICGDSTECSNLLLQYGSFCTQLNRALTGIAVEQDKNTQEVFAQVKQIYKTPPIKDFGGFNFSQILPDPSKPSKRSFIEDLLFNKVTLADAGFIKQYGDCLGDIAARDLICAQKFNGLTVLPPLLTDEMIAQYTSALLAGTITSGWTFGAGAALQIPFAMQMAYRFNGIGVTQNVLYENQKLIANQFNSAIGKIQDSLSSTASALGKLQDVVNQNAQALNTLVKQLSSNFGAISSVLNDILSRLDKVEAEVQIDRLITGRLQSLQTYVTQQLIRAAEIRASANLAATKMSECVLGQSKRVDFCGKGYHLMSFPQSAPHGVVFLHVTYVPAQEKNFTCAPAICHDGKAHFPREGVFVSNGTHWFVTQRNFYEPQIITTDNTFVSGNCDVVIGIVNNTVYDPLQPELDSFKEELDKYFKNHTSPDVDLGDISGINASVVNIQKEIDRLNEVAKNLNESLIDLQELGKYEQYIKGGSGYIPEAPRDGQAYVRKDGEWVLLSTFL

SEQ ID NO: 5977 - protein, 1241 aa, Artificial Sequence
  SARS-CoV-2/Germany/BavPat1/2020__EPI_ISL_406862 spike protein (1-1211)(I712C_T1077C) Foldon construct
MFVFLVLLPLVSSQCVNLTTRTQLPPAYTNSFTRGVYYPDKVFRSSVLHSTQDLFLPFFSNVTWFHAIHVSGTNGTKRFDNPVLPFNDGVYFASTEKSNIIRGWIFGTTLDSKTQSLLIVNNATNVVIKVCEFQFCNDPFLGVYYHKNNKSWMESEFRVYSSANNCTFEYVSQPFLMDLEGKQGNFKNLREFVFKNIDGYFKIYSKHTPINLVRDLPQGFSALEPLVDLPIGINITRFQTLLALHRSYLTPGDSSSGWTAGAAAYYVGYLQPRTFLLKYNENGTITDAVDCALDPLSETKCTLKSFTVEKGIYQTSNFRVQPTESIVRFPNITNLCPFGEVFNATRFASVYAWNRKRISNCVADYSVLYNSASFSTFKCYGVSPTKLNDLCFTNVYADSFVIRGDEVRQIAPGQTGKIADYNYKLPDDFTGCVIAWNSNNLDSKVGGNYNYLYRLFRKSNLKPFERDISTEIYQAGSTPCNGVEGFNCYFPLQSYGFQPTNGVGYQPYRVVVLSFELLHAPATVCGPKKSTNLVKNKCVNFNFNGLTGTGVLTESNKKFLPFQQFGRDIADTTDAVRDPQTLEILDITPCSFGGVSVITPGTNTSNQVAVLYQGVNCTEVPVAIHADQLTPTWRVYSTGSNVFQTRAGCLIGAEHVNNSYECDIPIGAGICASYQTQTNSPRRARSVASQSIIAYTMSLGAENSVAYSNNSCAIPTNFTISVTTEILPVSMTKTSVDCTMYICGDSTECSNLLLQYGSFCTQLNRALTGIAVEQDKNTQEVFAQVKQIYKTPPIKDFGGFNFSQILPDPSKPSKRSFIEDLLFNKVTLADAGFIKQYGDCLGDIAARDLICAQKFNGLTVLPPLLTDEMIAQYTSALLAGTITSGWTFGAGAALQIPFAMQMAYRFNGIGVTQNVLYENQKLIANQFNSAIGKIQDSLSSTASALGKLQDVVNQNAQALNTLVKQLSSNFGAISSVLNDILSRLDKVEAEVQIDRLITGRLQSLQTYVTQQLIRAAEIRASANLAATKMSECVLGQSKRVDFCGKGYHLMSFPQSAPHGVVFLHVTYVPAQEKNFTCAPAICHDGKAHFPREGVFVSNGTHWFVTQRNFYEPQIITTDNTFVSGNCDVVIGIVNNTVYDPLQPELDSFKEELDKYFKNHTSPDVDLGDISGINASVVNIQKEIDRLNEVAKNLNESLIDLQELGKYEQYIKGGSGYIPEAPRDGQAYVRKDGEWVLLSTFL

SEQ ID NO: 5978 - protein, 1241 aa, Artificial Sequence
  SARS-CoV-2/Wuhan/HBCDC-HB-02/2020__EPI_ISL_412978 spike protein (1-1211)(I712C_T1077C) Foldon construct
MFVFLVLLPLVSSQCVNLTTRTQLPPAYTNSFTRGVYYPDKVFRSSVLHSTQDLFLPFFSNVTWFHAIHVSGTNGTKRFDNPVLPFNDGVYFASTEKSNIIRGWIFGTTLDSKTQSLLIVNNATNVVIKVCEFQFCNDPFLGVYYHKNNKSWMESEFRVYSSANNCTFEYVSQPFLMDLEGKQGNFKNLREFVFKNIDGYFKIYSKHTPINLVRDLPQGFSALEPLVDLPIGINITRFQTLLALHRSYLTPGDSSSGWTAGAAAYYVGYLQPRTFLLKYNENGTITDAVDCALDPLSETKCTLKSFTVEKGIYQTSNFRVQPTESIVRFPNITNLCPFGEVFNATRFASVYAWNRKRISNCVADYSVLYNSASFSTFKCYGVSPTKLNDLCFTNVYADSFVIRGDEVRQIAPGQTGKIADYNYKLPDDFTGCVIAWNSNNLDSKVGGNYNYLYRLFRKSNLKPFERDISTEIYQAGSTPCNGVEGFNCYFPLQSYGFQPTNGVGYQPYRVVVLSFELLHAPATVCGPKKSTNLVKNKCVNFNFNGLTGTGVLTESNKKFLPFQQFGRDIADTTDAVRDPQTLEILDITPCSFGGVSVITPGTNTSNQVAVLYQDVNCTEVPVAIHADQLTPTWRVYSTGSNVFQTRAGCLIGAEHVNNSYECDIPIGAGICASYQTQTNSPRRARSVASQSIIAYTMSLGAENSVAYSNNSCAIPTNFTISVTTEILPVSMTKTSVDCTMYICGDSTECSNFLLQYGSFCTQLNRALTGIAVEQDKNTQEVFAQVKQIYKTPPIKDFGGFNFSQILPDPSKPSKRSFIEDLLFNKVTLADAGFIKQYGDCLGDIAARDLICAQKFNGLTVLPPLLTDEMIAQYTSALLAGTITSGWTFGAGAALQIPFAMQMAYRFNGIGVTQNVLYENQKLIANQFNSAIGKIQDSLSSTASALGKLQDVVNQNAQALNTLVKQLSSNFGAISSVLNDILSRLDKVEAEVQIDRLITGRLQSLQTYVTQQLIRAAEIRASANLAATKMSECVLGQSKRVDFCGKGYHLMSFPQSAPHGVVFLHVTYVPAQEKNFTCAPAICHDGKAHFPREGVFVSNGTHWFVTQRNFYEPQIITTDNTFVSGNCDVVIGIVNNTVYDPLQPELDSFKEELDKYFKNHTSPDVDLGDISGINASVVNIQKEIDRLNEVAKNLNESLIDLQELGKYEQYIKGGSGYIPEAPRDGQAYVRKDGEWVLLSTFL

SEQ ID NO: 5979 - protein, 1241 aa, Artificial Sequence
  SARS-CoV-2/Australia/QLD02/2020__EPI_ISL_407896 spike protein (1-1211)(I712C_T1077C) Foldon construct
MFVFLVLLPLVSSQCVNLTTRTQLPPAYTNSFTRGVYYPDKVFRSSVLHSTQDLFLPFFSNVTWFHAIHVSGTNGTKRFDNPVLPFNDGVYFASTEKSNIIRGWIFGTTLDSKTQSLLIVNNATNVVIKVCEFQFCNDPFLGVYYHKNNKSWMESEFRVYSSANNCTFEYVSQPFLMDLEGKQGNFKNLREFVFKNIDGYFKIYSKHTPINLVRDLPQGFSALEPLVDLPIGINITRFQTLLALHRSYLTPGDSSSGWTAGAAAYYVGYLQPRTFLLKYNENGTITDAVDCALDPLSETKCTLKSFTVEKGIYQTSNFRVQPTESIVRFPNITNLCPFGEVFNATRFASVYAWNRKRISNCVADYSVLYNSASFSTFKCYGVSPTKLNDLCFTNVYADSFVIRGDEVRQIAPGQTGKIADYNYKLPDDFTGCVIAWNSNNLDSKVGGNYNYLYRLFRKSNLKPFERDISTEIYQAGSTPCNGVEGFNCYFPLQSYGFQPTNGVGYQPYRVVVLSFELLHAPATVCGPKKSTNLVKNKCVNFNFNGLTGTGVLTESNKKFLPFQQFGRDIADTTDAVRDPQTLEILDITPCSFGGVSVITPGTNTSNQVAVLYQDVNCTEVPVAIHADQLTPTWRVYSTGSNVFQTRAGCLIGAEHVNNSYECDIPIGAGICASYQTQTNSPRRARSVASQSIIAYTMSLGAENSVAYSNNSCAIPTNFTISVTTEILPVSMTKTSVDCTMYICGDSTECSNLLLQYGSFCTQLNRALTGIAVEQDKNTQEVFAQVKQIYKTPPIKDFGGFNFSQILPDPSKPSKRSFIEDLLFNKVTLADAGFIKQYGDCLGDIAARDLICAQKFNGLTVLPPLLTDEMIAQYTSALLAGTITSGWTFGAGAALQIPFAMQMAYRFNGIGVTQNVLYENQKLIANQFNSAIGKIQDSLSSTASALGKLQDVVNQNAQALNTLVKQLSSNFGAISSVLNDILSRLDKVEAEVQIDRLITGRLQSLQTYVTQQLIRAAEIRASANLAATKMSECVLGQSKRVDFCGKGYHLMSFPQSAPHGVVFLHVTYVPAQEKNFTCAPAICHDGKAHFPREGVFVSNGTHWFVTQRNFYEPQIITTDNTFVSGNCDVVIGIVNNTVYDPLQLELDSFKEELDKYFKNHTSPDVDLGDISGINASVVNIQKEIDRLNEVAKNLNESLIDLQELGKYEQYIKGGSGYIPEAPRDGQAYVRKDGEWVLLSTFL

SEQ ID NO: 5980 - protein, 1241 aa, Artificial Sequence
  SARS-CoV-2/India/1-31/2020__EPI_ISL_413523 spike protein (1-1211)(I712C_T1077C) Foldon construct
MFVFLVLLPLVSSQCVNLTTRTQLPPAYTNSFTRGVYYPDKVFRSSVLHSTQDLFLPFFSNVTWFHAIHVSGTNGTKRFDNPVLPFNDGVYFASTEKSNIIRGWIFGTTLDSKTQSLLIVNNATNVVIKVCEFQFCNDPFLGVYYHKNNKSWMESEFRVYSSANNCTFEYVSQPFLMDLEGKQGNFKNLREFVFKNIDGYFKIYSKHTPINLVRDLPQGFSALEPLVDLPIGINITRFQTLLALHRSYLTPGDSSSGWTAGAAAYYVGYLQPRTFLLKYNENGTITDAVDCALDPLSETKCTLKSFTVEKGIYQTSNFRVQPTESIVRFPNITNLCPFGEVFNATRFASVYAWNRKRISNCVADYSVLYNSASFSTFKCYGVSPTKLNDLCFTNVYADSFVIRGDEVRQIAPGQTGKIADYNYKLPDDFTGCVIAWNSNNLDSKVGGNYNYLYRLFRKSNLKPFERDISTEIYQAGSTPCNGVEGFNCYFPLQSYGFQPTNGVGYQPYRVVVLSFELLHAPATVCGPKKSTNLVKNKCVNFNFNGLTGTGVLTESNKKFLPFQQFGRDIADTTDAVRDPQTLEILDITPCSFGGVSVITPGTNTSNQVAVLYQDVNCTEVPVAIHADQLTPTWRVYSTGSNVFQTRAGCLIGAEHVNNSYECDIPIGAGICASYQTQTNSPRRARSVASQSIIAYTMSLGAENSVAYSNNSCAIPTNFTISVTTEILPVSMTKTSVDCTMYICGDSTECSNLLLQYGSFCTQLNRALTGIAVEQDKNTQEVFAQVKQIYKTPPIKDFGGFNFSQILPDPSKPSKRSFIEDLLFNKVTLADAGFIKQYGDCLGDIAARDLICAQKFNGLTVLPPLLTDEMIAQYTSALLAGTITSGWTFGAGAALQIPFAMQMAYRFNGIGVTQNVLYENQKLIANQFNSVIGKIQDSLSSTASALGKLQDVVNQNAQALNTLVKQLSSNFGAISSVLNDILSRLDKVEAEVQIDRLITGRLQSLQTYVTQQLIRAAEIRASANLAATKMSECVLGQSKRVDFCGKGYHLMSFPQSAPHGVVFLHVTYVPAQEKNFTCAPAICHDGKAHFPREGVFVSNGTHWFVTQRNFYEPQIITTDNTFVSGNCDVVIGIVNNTVYDPLQPELDSFKEELDKYFKNHTSPDVDLGDISGINASVVNIQKEIDRLNEVAKNLNESLIDLQELGKYEQYIKGGSGYIPEAPRDGQAYVRKDGEWVLLSTFL

SEQ ID NO: 5981 - protein, 1241 aa, Artificial Sequence
  SARS-CoV-2/Guangdong/GD2020087-P0008/2020__EPI_ISL_413863 spike protein (1-1211)(I712C_T1077C) Foldon construct
MFVFLVLLPLVSSQCVNLTTRTQLPPAYTNSFTRGVYYPDKVFRSSVLHSTQDLFLPFFSNVTWFHAIHVSGTNGTKRFDNPVLPFNDGVYFASTEKSNIIRGWIFGTTLDSKTQSLLIVNNATNVVIKVCEFQFCNDPFLGVYYHKNNKSWMESEFRVYSSANNCTFEYVSQPFLMDLEGKQGNFKNLREFVFKNIDGYFKIYSKHTPINLVRDLPQGFSALEPLVDLPIGINITRFQTLLALHRSYLTPGDSSSGWTAGAAAYYVGYLQPRTFLLKYNENGTITDAVDCALDPLSETKCTLKSFTVEKGIYQTSNFRVQPTESIVRFPNITNLCPFGEVFNATRFASVYAWNRKRISNCVADYSVLYNSASFSTFKCYGVSPTKLNDLCFTNVYADSFVIRGDEVREIAPGQTGKIADYNYKLPDDFTGCVIAWNSNNLDSKVGGNYNYLYRLFRKSNLKPFERDISTEIYQAGSTPCNGVEGFNCYFPLQSYGFQPTNGVGYQPYRVVVLSFELLHAPATVCGPKKSTNLVKNKCVNFNFNGLTGTGVLTESNKKFLPFQQFGRDIADTTDAVRDPQTLEILDITPCSFGGVSVITPGTNTSNQVAVLYQDVNCTEVPVAIHADQLTPTWRVYSTGSNVFQTRAGCLIGAEHVNNSYECDIPIGAGICASYQTQTNSPRRARSVASQSIIAYTMSLGAENSVAYSNNSCAIPTNFTISVTTEILPVSMTKTSVDCTMYICGDSTECSNLLLQYGSFCTQLNRALTGIAVEQDKNTQEVFAQVKQIYKTPPIKDFGGFNFSQILPDPSKPSKRSFIEDLLFNKVTLADAGFIKQYGDCLGDIAARDLICAQKFNGLTVLPPLLTDEMIAQYTSALLAGTITSGWTFGAGAALQIPFAMQMAYRFNGIGVTQNVLYENQKLIANQFNSAIGKIQDSLSSTASALGKLQDVVNQNAQALNTLVKQLSSNFGAISSVLNDILSRLDKVEAEVQIDRLITGRLQSLQTYVTQQLIRAAEIRASANLAATKMSECVLGQSKRVDFCGKGYHLMSFPQSAPHGVVFLHVTYVPAQEKNFTCAPAICHDGKAHFPREGVFVSNGTHWFVTQRNFYEPQIITTDNTFVSGNCDVVIGIVNNTVYDPLQPELDSFKEELDKYFKNHTSPDVDLGDISGINASVVNIQKEIDRLNEVAKNLNESLIDLQELGKYEQYIKGGSGYIPEAPRDGQAYVRKDGEWVLLSTFL

SEQ ID NO: 5982 - protein, 1241 aa, Artificial Sequence
  SARS-CoV-2/Sweden/01/2020__EPI_ISL_411951 spike protein (1-1211)(I712C_T1077C) Foldon construct
MFVFLVLLPLVSSQCVNLTTRTQLPPAYTNSFTRGVYYPDKVFRSSVLHSTQDLFLPFFSNVTWFHAIHVSGTNGTKRFDNPVLPFNDGVYFASTEKSNIIRGWIFGTTLDSKTQSLLIVNNATNVVIKVCEFQFCNDPFLGVYYHKNNKSWMESEFRVYSSANNCTFEYVSQPFLMDLEGKQGNFKNLREFVFKNIDGYFKIYSKHTPINLVRDLPQGFSALEPLVDLPIGINITRFQTLLALHRSYLTPGDSSSGWTAGAAAYYVGYLQPRTFLLKYNENGTITDAVDCALDPLSETKCTLKSFTVEKGIYQTSNFRVQPTESIVRFPNITNLCPFGEVFNATRFASVYAWNRKRISNCVADYSVLYNSASFSTFKCYGVSPTKLNDLCFTNVYADSFVIRGDEVRQIAPGQTGKIADYNYKLPDDFTGCVIAWNSNNLDSKVGGNYNYLYRLFRKSNLKPFERDISTEIYQAGSTPCNGVEGFNCYFPLQSYGFQPTNGVGYQPYRVVVLSFELLHAPATVCGPKKSTNLVKNKCVNFNFNGLTGTGVLTESNKKFLPFQQFGRDIADTTDAVRDPQTLEILDITPCSFGGVSVITPGTNTSNQVAVLYQDVNCTEVPVAIHADQLTPTWRVYSTGSNVFQTRAGCLIGAEHVNNSYECDIPIGAGICASYQTQTNSPRRARSVASQSIIAYTMSLGAENSVAYSNNSCAIPTNFTISVTTEILPVSMTKTSVDCTMYICGDSTECSNLLLQYGSFCTQLNRALTGIAVEQDKNTQEVFAQVKQIYKTPPIKDCGGFNFSQILPDPSKPSKRSFIEDLLFNKVTLADAGFIKQYGDCLGDIAARDLICAQKFNGLTVLPPLLTDEMIAQYTSALLAGTITSGWTFGAGAALQIPFAMQMAYRFNGIGVTQNVLYENQKLIANQFNSAIGKIQDSLSSTASALGKLQDVVNQNAQALNTLVKQLSSNFGAISSVLNDILSRLDKVEAEVQIDRLITGRLQSLQTYVTQQLIRAAEIRASANLAATKMSECVLGQSKRVDFCGKGYHLMSFPQSAPHGVVFLHVTYVPAQEKNFTCAPAICHDGKAHFPREGVFVSNGTHWFVTQRNFYEPQIITTDNTFVSGNCDVVIGIVNNTVYDPLQPELDSFKEELDKYFKNHTSPDVDLGDISGINASVVNIQKEIDRLNEVAKNLNESLIDLQELGKYEQYIKGGSGYIPEAPRDGQAYVRKDGEWVLLSTFL

SEQ ID NO: 5983 - protein, 1241 aa, Artificial Sequence
  SARS-CoV-2/Tianmen/HBCDC-HB-07/2020__EPI_ISL_412983 spike protein (1-1211)(I712C_T1077C) Foldon construct
MFVFLVLLPLVSSQCVNLTTRTQLPPAYTNSFTRGVYYPDKVFRSSVLHSTQDLFLPFFSNVTWFHAIHVSGTNGTKRFDNPVLPFNDGVYFASTEKSNIIRGWIFGTTLDSKTQSLLIVNNATNVVIKVCEFQFCNDPFLGVYYHKNNKSWMESEFRVYSSANNCTFEYVSQPFLMDLEGKQGNFKNLREFVFKNIDGYFKIYSKHTPINLVRDLPQGFSALEPLVDLPIGINITRFQTLLALHRSYLTPGDSSSGWTAGAAAYYVGYLQPRTFLLKYNENGTITDAVDCALDPLSETKCTLKSFTVEKGIYQTSNFRVQPTESIVRFPNITNLCPFGEVFNATRFASVYAWNRKRISNCVADYSVLYNSASFSTFKCYGVSPTKLNDLCFTNVYADSFVIRGDEVRQIAPGQTGKIADYNYKLPDDFTGCVIAWNSNNLDSKVGGNYNYLYRLFRKSNLKPFERDISTEIYQAGSTPCNGVEGFNCYFPLQSYGFQPTNGVGYQPYRVVVLSFELLHAPATVCGPKKSTNLVKNKCVNFNFNGLTGTGVLTESNKKFLPFQQFGRDIADTTDAVRDPQTLEILDITPCSFGGVSVITPGTNTSNQVAVLYQDLNCTEVPVAIHADQLTPTWRVYSTGSNVFQTRAGCLIGAEHVNNSYECDIPIGAGICASYQTQTNSPRRARSVASQSIIAYTMSLGAENSVAYSNNSCAIPTNFTISVTTEILPVSMTKTSVDCTMYICGDSTECSNLLLQYGSFCTQLNRALTGIAVEQDKNTQEVFAQVKQIYKTPPIKDFGGFNFSQILPDPSKPSKRSFIEDLLFNKVTLADAGFIKQYGDCLGDIAARDLICAQKFNGLTVLPPLLTDEMIAQYTSALLAGTITSGWTFGAGAALQIPFAMQMAYRFNGIGVTQNVLYENQKLIANQFNSAIGKIQDSLSSTASALGKLQDVVNQNAQALNTLVKQLSSNFGAISSVLNDILSRLDKVEAEVQIDRLITGRLQSLQTYVTQQLIRAAEIRASANLAATKMSECVLGQSKRVDFCGKGYHLMSFPQSAPHGVVFLHVTYVPAQEKNFTCAPAICHDGKAHFPREGVFVSNGTHWFVTQRNFYEPQIITTDNTFVSGNCDVVIGIVNNTVYDPLQPELDSFKEELDKYFKNHTSPDVDLGDISGINASVVNIQKEIDRLNEVAKNLNESLIDLQELGKYEQYIKGGSGYIPEAPRDGQAYVRKDGEWVLLSTFL

SEQ ID NO: 5984 - protein, 1241 aa, Artificial Sequence
  SARS-CoV-2/Hong Kong/case42_VM20002493/2020__EPI_ISL_414527 spike protein (1-1211)(I712C_T1077C) Foldon construct
MFVFLVLLPLVSSQCVNLTTRTQLPPAYTNSFTRGVYYPDKVFRSSVLHSTQDLFLPFFSNVTWFHAIHVSGTNGTKRFDNPVLPFNDGVYFASTEKSNIIRGWIFGTTLDSKTQSLLIVNNATNVVIKVCEFQFCNDPFLGVYYHKNNKSWMESEFRVYSSANNCTFEYVSQPFLMDLEGKQGNFKNLREFVFKNIDGYFKIYSKHTPINLVRDLPQGFSALEPLVDLPIGINITRFQTLLALHRSYLTPGDSSSGWTAGAAAYYVGYLQPRTFLLKYNENGTITDAVDCALDPLSETKCTLKSFTVEKGIYQTSNFRVQPTESIVRFPNITNLCPFGEVFNATRFASVYAWNRKRISNCVADYSVLYNSASFSTFKCYGVSPTKLNDLCFTNVYADSFVIRGDEVRQIAPGQTGKIADYNYKLPDDFTGCVIAWNSNNLDSKVGGNYNYLYRLFRKSNLKPFERDISTEIYQAGSTPCNGVEGFNCYFPLQSYGFQPTNGVGYQPYRVVVLSFELLHAPATVCGPKKSTNLVKNKCVNFNFNGLTGTGVLTESNKKFLPFQQFGRDIADTTDAVRDPQTLEILDITPCSFGGVSVITPGTNTSNQVAVLYQDVNCTEVPVAIHADQLTPTWRVYSTGSNVFQTRAGCLIGAEHVNNSYECDIPIGAGICASYQTQTNSPRRARSVASQSIIAYTMSLGAENSVAYSNNSCAIPTNFAISVTTEILPVSMTKTSVDCTMYICGDSTECSNLLLQYGSFCTQLNRALTGIAVEQDKNTQEVFAQVKQIYKTPPIKDFGGFNFSQILPDPSKPSKRSFIEDLLFNKVTLADAGFIKQYGDCLGDIAARDLICAQKFNGLTVLPPLLTDEMIAQYTSALLAGTITSGWTFGAGAALQIPFAMQMAYRFNGIGVTQNVLYENQKLIANQFNSAIGKIQDSLSSTASALGKLQDVVNQNAQALNTLVKQLSSNFGAISSVLNDILSRLDKVEAEVQIDRLITGRLQSLQTYVTQQLIRAAEIRASANLAATKMSECVLGQSKRVDFCGKGYHLMSFPQSAPHGVVFLHVTYVPAQEKNFTCAPAICHDGKAHFPREGVFVSNGTHWFVTQRNFYEPQIITTDNTFVSGNCDVVIGIVNNTVYDPLQPELDSFKEELDKYFKNHTSPDVDLGDISGINASVVNIQKEIDRLNEVAKNLNESLIDLQELGKYEQYIKGGSGYIPEAPRDGQAYVRKDGEWVLLSTFL

SEQ ID NO: 5985 - protein, 1241 aa, Artificial Sequence
  SARS-CoV-2/USA/CruiseA-23/2020__EPI_ISL_414482 spike protein (1-1211)(I712C_T1077C) Foldon construct
MFVFLVLLPLVSSQCVNLTTRTQLPPAYTNSFTRGVYYPDKVFRSSVLHSTQDLFLPFFSNVTWFHAIHVSGTNGTKRFDNPVLPFNDGVYFASTEKSNIIRGWIFGTTLDSKTQSLLIVNNATNVVIKVCEFQFCNDPFLGVYYHKNNKSWMESEFRVYSSANNCTFEYVSQPFLMDLEVKQGNFKNLREFVFKNIDGYFKIYSKHTPINLVRDLPQGFSALEPLVDLPIGINITRFQTLLALHRSYLTPGDSSSGWTAGAAAYYVGYLQPRTFLLKYNENGTITDAVDCALDPLSETKCTLKSFTVEKGIYQTSNFRVQPTESIVRFPNITNLCPFGEVFNATRFASVYAWNRKRISNCVADYSVLYNSASFSTFKCYGVSPTKLNDLCFTNVYADSFVIRGDEVRQIAPGQTGKIADYNYKLPDDFTGCVIAWNSNNLDSKVGGNYNYLYRLFRKSNLKPFERDISTEIYQAGSTPCNGVEGFNCYFPLQSYGFQPTNGVGYQPYRVVVLSFELLHAPATVCGPKKSTNLVKNKCVNFNFNGLTGTGVLTESNKKFLPFQQFGRDIADTTDAVRDPQTLEILDITPCSFGGVSVITPGTNTSNQVAVLYQDVNCTEVPVAIHADQLTPTWRVYSTGSNVFQTRAGCLIGAEHVNNSYECDIPIGAGICASYQTQTNSPRRARSVASQSIIAYTMSLGAENSVAYSNNSCAIPTNFTISVTTEILPVSMTKTSVDCTMYICGDSTECSNLLLQYGSFCTQLNRALTGIAVEQDKNTQEVFAQVKQIYKTPPIKDFGGFNFSQILPDPSKPSKRSFIEDLLFNKVTLADAGFIKQYGDCLGDIAARDLICAQKFNGLTVLPPLLTDEMIAQYTSALLAGTITSGWTFGAGAALQIPFAMQMAYRFNGIGVTQNVLYENQKLIANQFNSAIGKIQDSLSSTASALGKLQDVVNQNAQALNTLVKQLSSNFGAISSVLNDILSRLDKVEAEVQIDRLITGRLQSLQTYVTQQLIRAAEIRASANLAATKMSECVLGQSKRVDFCGKGYHLMSFPQSAPHGVVFLHVTYVPAQEKNFTCAPAICHDGKAHFPREGVFVSNGTHWFVTQRNFYEPQIITTDNTFVSGNCDVVIGIVNNTVYDPLQPELDSFKEELDKYFKNHTSPDVDLGDISGINASVVNIQKEIDRLNEVAKNLNESLIDLQELGKYEQYIKGGSGYIPEAPRDGQAYVRKDGEWVLLSTFL

SEQ ID NO: 5986 - protein, 1241 aa, Artificial Sequence
  SARS-CoV-2/Hong Kong/case85_VM20002868/2020__EPI_ISL_414519 spike protein (1-1211)(I712C_T1077C) Foldon construct
MFVFLVLVPLVSSQCVNLTTRTQLPPAYTNSFTRGVYYPDKVFRSSVLHSTQDLFLPFFSNVTWFHAIHVSGTNGTKRFDNPVLPFNDGVYFASTEKSNIIRGWIFGTTLDSKTQSLLIVNNATNVVIKVCEFQFCNDPFLGVYYHKNNKSWMESEFRVYSSANNCTFEYVSQPFLMDLEGKQGNFKNLREFVFKNIDGYFKIYSKHTPINLVRDLPQGFSALEPLVDLPIGINITRFQTLLALHRSYLTPGDSSSGWTAGAAAYYVGYLQPRTFLLKYNENGTITDAVDCALDPLSETKCTLKSFTVEKGIYQTSNFRVQPTESIVRFPNITNLCPFGEVFNATRFASVYAWNRKRISNCVADYSVLYNSASFSTFKCYGVSPTKLNDLCFTNVYADSFVIRGDEVRQIAPGQTGKIADYNYKLPDDFTGCVIAWNSNNLDSKVGGNYNYLYRLFRKSNLKPFERDISTEIYQAGSTPCNGVEGFNCYFPLQSYGFQPTNGVGYQPYRVVVLSFELLHAPATVCGPKKSTNLVKNKCVNFNFNGLTGTGVLTESNKKFLPFQQFGRDIADTTDAVRDPQTLEILDITPCSFGGVSVITPGTNTSNQVAVLYQDVNCTEVPVAIHADQLTPTWRVYSTGSNVFQTRAGCLIGAEHVNNSYECDIPIGAGICASYQTQTNSPRRARSVASQSIIAYTMSLGAENSVAYSNNSCAIPTNFTISVTTEILPVSMTKTSVDCTMYICGDSTECSNLLLQYGSFCTQLNRALTGIAVEQDKNTQEVFAQVKQIYKTPPIKDFGGFNFSQILPDPSKPSKRSFIEDLLFNKVTLADAGFIKQYGDCLGDIAARDLICAQKFNGLTVLPPLLTDEMIAQYTSALLAGTITSGWTFGAGAALQIPFAMQMAYRFNGIGVTQNVLYENQKLIANQFNSAIGKIQDSLSSTASALGKLQDVVNQNAQALNTLVKQLSSNFGAISSVLNDILSRLDKVEAEVQIDRLITGRLQSLQTYVTQQLIRAAEIRASANLAATKMSECVLGQSKRVDFCGKGYHLMSFPQSAPHGVVFLHVTYVPAQEKNFTCAPAICHDGKAHFPREGVFVSNGTHWFVTQRNFYEPQIITTDNTFVSGNCDVVIGIVNNTVYDPLQPELDSFKEELDKYFKNHTSPDVDLGDISGINASVVNIQKEIDRLNEVAKNLNESLIDLQELGKYEQYIKGGSGYIPEAPRDGQAYVRKDGEWVLLSTFL

SEQ ID NO: 5987 - protein, 1241 aa, Artificial Sequence; identical to SEQ ID NO: 5977
  SARS-CoV-2/England/200990660/2020__EPI_ISL_414523 spike protein (1-1211)(I712C_T1077C) Foldon construct

SEQ ID NO: 5988 - protein, 1241 aa, Artificial Sequence
  SARS-CoV-2/Australia/NSW09/2020__EPI_ISL_413595 spike protein (1-1211)(I712C_T1077C) Foldon construct
MFVFLVLLPLVSSQCVNLTTRTQLPPAYTNSFTRGVYYPDKVFRSSVLHSTQDLFLPFFSNVTWFHAIHVSGTNGTKRFDNPVLPFNDGVYFASTEKSNIIRGWIFGTTLDSKTQSLLIVNNATNVVIKVCEFQFCNDPFLGVYYHKNNKSWMESEFRVYSSANNCTFEYVSQPFLMDLEGKQGNFKNLREFVFKNIDGYFKIYSKHTPINLVRDLPQGFSALEPLVDLPIGINITRFQTLLALHRSYLTPGDSSSGWTAGAAAYYVGYLQPRTFLLKYNENGTITDAVDCALDPLSETKCTLKSFTVEKGIYQTSNFRVQPTESIVRFPNITNLCPFGEVFNATRFASVYAWNRKRISNCVADYSVLYNSASFSTFKCYGVSPTKLNDLCFTNVYADSFVIRGDEVRQIAPGQTGKIADYNYKLPDDFTGCVIAWNSNNLDSKVGGNYNYLYRLFRKSNLKPFERDISTEIYQAGSTPCNGVEGFNCYFPLQSYGFQPTNGVGYQPYRVVVLSFELLHAPATVCGPKKSTNLVKNKCVNFNFNGLTGTGVLTESNKKFLPFQQFGRDIADTTDAVRDPQTLEILDITPCSFGGVSVITPGTNTSNQVAVLYQDVNCTEVPVAIHADQLTPTWRVYSTGSNVFQTRAGCLIGAEHVNNSYECDIPIGAGICASYQTQTNSPRRARSVASQSIIAYTMSLGAENSVAYSNNSCAIPTNFTISVTTEILPVSMTKTSVDCTMYICGDSTECSNLLLQYGSFCTQLNRALTGIAVEQDKNTQEVFAQVKQIYKTPPIKDFGGFNFSQILPDPSKPSKRSFIEDLLFNKVTLADAGFIKQYGDCLGDIAARDLICAQKFNGLTVLPPLLTDEMIAQYTSALLAGTITSGWTFGAGAALQIPFAMQMAYRFNGIGVTQNVLYENQKLIANQFNSAIGKIQDSLSFTASALGKLQDVVNQNAQALNTLVKQLSSNFGAISSVLNDILSRLDKVEAEVQIDRLITGRLQSLQTYVTQQLIRAAEIRASANLAATKMSECVLGQSKRVDFCGKGYHLMSFPQSAPHGVVFLHVTYVPAQEKNFTCAPAICHDGKAHFPREGVFVSNGTHWFVTQRNFYEPQIITTDNTFVSGNCDVVIGIVNNTVYDPLQPELDSFKEELDKYFKNHTSPDVDLGDISGINASVVNIQKEIDRLNEVAKNLNESLIDLQELGKYEQYIKGGSGYIPEAPRDGQAYVRKDGEWVLLSTFL

SEQ ID NO: 5989 - protein, 1241 aa, Artificial Sequence; identical to SEQ ID NO: 5969
  SARS-CoV-2/Australia/NSW10/2020__EPI_ISL_413596 spike protein (1-1211)(I712C_T1077C) Foldon construct

SEQ ID NO: 5990 - protein, 1241 aa, Artificial Sequence
  SARS-CoV-2/Switzerland/1000477797/2020__EPI_ISL_413023 spike protein (1-1211)(I712C_T1077C) Foldon construct
MFVFLVLLPLVSSQCVNLTTRTQLPPAYTNSFTRGVYYPDKVFRSSVLHSTQDLFLPFFSNVTWFHAIHVSGTNGTKRFDNPVLPFNDGVYFASTEKSNIIRGWIFGTTLDSKTQSLLIVNNATNVVIKVCEFQFCNDPFLGVYYHKNNKSWMESEFRVYSSANNCTFEYVSQPFLMDLEGKQGNFKNLREFVFKNIDGYFNIYSKHTPINLVRDLPQGFSALEPLVDLPIGINITRFQTLLALHRSYLTPGDSSSGWTAGAAAYYVGYLQPRTFLLKYNENGTITDAVDCALDPLSETKCTLKSFTVEKGIYQTSNFRVQPTESIVRFPNITNLCPFGEVFNATRFASVYAWNRKRISNCVADYSVLYNSASFSTFKCYGVSPTKLNDLCFTNVYADSFVIRGDEVRQIAPGQTGKIADYNYKLPDDFTGCVIAWNSNNLDSKVGGNYNYLYRLFRKSNLKPFERDISTEIYQAGSTPCNGVEGFNCYFPLQSYGFQPTNGVGYQPYRVVVLSFELLHAPATVCGPKKSTNLVKNKCVNFNFNGLTGTGVLTESNKKFLPFQQFGRDIADTTDAVRDPQTLEILDITPCSFGGVSVITPGTNTSNQVAVLYQGVNCTEVPVAIHADQLTPTWRVYSTGSNVFQTRAGCLIGAEHVNNSYECDIPIGAGICASYQTQTNSPRRARSVASQSIIAYTMSLGAENSVAYSNNSCAIPTNFTISVTTEILPVSMTKTSVDCTMYICGDSTECSNLLLQYGSFCTQLNRALTGIAVEQDKNTQEVFAQVKQIYKTPPIKDFGGFNFSQILPDPSKPSKRSFIEDLLFNKVTLADAGFIKQYGDCLGDIAARDLICAQKFNGLTVLPPLLTDEMIAQYTSALLAGTITSGWTFGAGAALQIPFAMQMAYRFNGIGVTQNVLYENQKLIANQFNSAIGKIQDSLSSTASALGKLQDVVNQNAQALNTLVKQLSSNFGAISSVLNDILSRLDKVEAEVQIDRLITGRLQSLQTYVTQQLIRAAEIRASANLAATKMSECVLGQSKRVDFCGKGYHLMSFPQSAPHGVVFLHVTYVPAQEKNFTCAPAICHDGKAHFPREGVFVSNGTHWFVTQRNFYEPQIITTDNTFVSGNCDVVIGIVNNTVYDPLQPELDSFKEELDKYFKNHTSPDVDLGDISGINASVVNIQKEIDRLNEVAKNLNESLIDLQELGKYEQYIKGGSGYIPEAPRDGQAYVRKDGEWVLLSTFL

SEQ ID NO: 5991 - protein, 1241 aa, Artificial Sequence
  SARS-CoV-2/Belgium/BA-02291/2020__EPI_ISL_415159 spike protein (1-1211)(I712C_T1077C) Foldon construct
MFVFLVLLPLVSSQCVNLTTRTQLPPAYTNSFTRGVYYPDKVFRSSVLHSTQDLFLPFFSNVTWFHAIHVSGTNGTKRFDNPVLPFNDGVYFASTEKSNIIRGWIFGTTLDSKTQSLLIVNNATNVVIKVCEFQFCNDPFLGVYYHKNNKSWMESEFRVYSSANNCTFEYVSQPFLMDLEGKQGNFKNLREFVFKNIDGYFKIYSKHTPINLVRDLPQGFSALEPLVDLPIGINITRFQTLLALHRSYLTPGDSSSGWTAGAAAYYVGYLQPRTFLLKYNENGTITDAVDCALDPLSETKCTLKSFTVEKGIYQTSNFRVQPTESIVRFPNITNLCPFGEVFNATRFASVYAWNRKRISNCVADYSVLYNSASFSTFKCYGVSPTKLNDLCFTNVYADSFVIRGDEVRQIAPGQTGKIADYNYKLPDDFTGCVIAWNSNNLDSKVGGNYNYLYRLFRRSNLKPFERDISTEIYQAGSTPCNGVEGFNCYFPLQSYGFQPTNGVGYQPYRVVVLSFELLPAPATVCGPKKSTNLVKNKCVNFNFNGLTGTGVLTESNKKFLPFQQFGRDIADTTDAVRDPQTLEILDITPCSFGGVSVITPGTNTSNQVAVLYQGVNCTEVPVAIHADQLTPTWRVYSTGSNVFQTRAGCLIGAEHVNNSYECDIPIGAGICASYQTQTNSPRRARSVASQSIIAYTMSLGAENSVAYSNNSCAIPTNFTISVTTEILPVSMTKTSVDCTMYICGDSTECSNLLLQYGSFCTQLNRALTGIAVEQDKNTQEVFAQVKQIYKTPPIKDFGGFNFSQILPDPSKPSKRSFIEDLLFNKVTLADAGFIKQYGDCLGDIAARDLICAQKFNGLTVLPPLLTDEMIAQYTSALLAGTITSGWTFGAGAALQIPFAMQMAYRFNGIGVTQNVLYENQKLIANQFNSAIGKIQDSLSSAAPALGKLQDVVNQNAQALNTLVKQLSSNFGAISSVLNDILSRLDKVEAEVQIDRLITGRLQSLQTYVTQQLIRAAEIRASANLAATKMSECVLGQSKRVDFCGKGYHLMSFPQSAPHGVVFLHVTYVPAQEKNFTCAPAICHDGKAHFPREGVFVSNGTHWFVTQRNFYEPQIITTDNTFVSGNCDVVIGIVNNTVYDPLQPELDSFKEELDKYFKNHTSPDVDLGDISGINASVVNIQKEIDRLNEVAKNLNESLIDLQELGKYEQYIKGGSGYIPEAPRDGQAYVRKDGEWVLLSTFL

SEQ ID NO: 5992 - protein, 1241 aa, Artificial Sequence
  SARS-CoV-2/USA/WA8-UW5/2020__EPI_ISL_413486 spike protein (1-1211)(I712C_T1077C) Foldon construct
MFVFLVLLPLVSSQCVNLTTRTQLPPAYTNSFTRGVYYPDKVFRSSVLHSTQDLFLPFFSNVTWFHAIHVSGTNGTKRFDNPVLPFNDGVYFASTEKSNIIRGWIFGTTLDSKTQSLLIVNNATNVVIKVCEFQFCNDPFLGVYYHKNNKSWMESEFRVYSSANNCTFEYVSQPFLMDLEGKQGNFKNLREFVFKNIDGYFKIYSKHTPINLVRDLPQGFSALEPLVDLPIGINITRFQTLLALHRSYLTPGDSSSGWTAGAAAYYVGYLQPRTFLLKYNENGTITDAVDCALDPLSETKCTLKSFTVEKGIYQTSNFRVQPTESIVRFPNITNLCPFGEVFNATRFASVYAWNRKRISNCVADYSVLYNSASFSTFKCYGVSPTKLNDLCFTNVYADSFVIRGDEVRQIAPGQTGKIADYNYKLPDDFTGCVIAWNSNNLDSKVGGNYNYLYRLFRKSNLKPFERDISTEIYQAGSTPCNGVEGFNCYFPLQSYGFQPTNGVGYQPYRVVVLSFELLHAPATVCGPKKSTNLVKNKCVNFNFNGLTGTGVLTESNKKFLPFQQFGRDIADTTDAVRDPQTLEILDITPCSFGGVSVITPGTNTSNQVAVLYQDVNCTEVPVAIHADQLTPTWRVYSTGSNVFQTRAGCLIGAEYVNNSYECDIPIGAGICASYQTQTNSPRRARSVASQSIIAYTMSLGAENSVAYSNNSCAIPTNFTISVTTEILPVSMTKTSVDCTMYICGDSTECSNLLLQYGSFCTQLNRALTGIAVEQDKNTQEVFAQVKQIYKTPPIKDFGGFNFSQILPDPSKPSKRSFIEDLLFNKVTLADAGFIKQYGDCLGDIAARDLICAQKFNGLTVLPPLLTDEMIAQYTSALLAGTITSGWTFGAGAALQIPFAMQMAYRFNGIGVTQNVLYENQKLIANQFNSAIGKIQDSLSSTASALGKLQDVVNQNAQALNTLVKQLSSNFGAISSVLNDILSRLDKVEAEVQIDRLITGRLQSLQTYVTQQLIRAAEIRASANLAATKMSECVLGQSKRVDFCGKGYHLMSFPQSAPHGVVFLHVTYVPAQEKNFTCAPAICHDGKAHFPREGVFVSNGTHWFVTQRNFYEPQIITTDNTFVSGNCDVVIGIVNNTVYDPLQPELDSFKEELDKYFKNHTSPDVDLGDISGINASVVNIQKEIDRLNEVAKNLNESLIDLQELGKYEQYIKGGSGYIPEAPRDGQAYVRKDGEWVLLSTFL

SEQ ID NO: 5993 - protein, 1241 aa, Artificial Sequence
  SARS-CoV-2/England/20102000506/2020__EPI_ISL_415147 spike protein (1-1211)(I712C_T1077C) Foldon construct
MFVFLVLLPLVSSQCVNLTTRTQLPPAYTNSFTRGVYYPDKVFRSSVLHSTQDLFLPFFSNVTWFHAIHVSGTNGTKRFDNPVLPFNDGVYFASTEKSNIIRGWIFGTTLDSKTQSLLIVNNATNVVIKVCEFQFCNDPFLGVYYHKNNKSWMESEFRVYSSANNCTFEYVSQPFLMDLEGKQGNFKNLREFVFKNIDGYFKIYSKHTPINLVRDLPQGFSALEPLVDLPIGINITRFQTLLALHRSYLTPGDSSSGWTAGAAAYYVGYLQPRTFLLKYNENGTITDAVDCALDPLSETKCTLKSFTVEKGIYQTSNFRVQPTESIVRFPNITNLCPFGEVFNATRFASVYAWNRKRISNCVADYSVLYNSASFSTFKCYGVSPTKLNDLCFTNVYADSFVIRGDEVRQIAPGQTGKIADYNYKLPDDFTGCVIAWNSNNLDSKVGGNYNYLYRLFRKSNLKPFERDISTEIYQAGSTPCNGVEGFNCYFPLQSYGFQPTNGVGYQPYRVVVLSFELLHAPATVCGPKKSTNLVKNKCVNFNFNGLTGTGVLTESNKKFLPFQQFGRDIADTTDAVRDPQTLEILDITPCSFGGVSVITPGTNTSNQVAVLYQGVNCTEVPVAIHADQLTPTWRVYSTGSNVFQTRAGCLIGAEHVNNSYECDIPIGAGICASYQTQTNSPRRARSVASQSIIAYTMSLGAENSVAYSNNSCAIPTNFTISVTTEILPVSMTKTSVDCTMYICGDSTECSNLLLQYGSFCTQLNRALTGIAVEQDKNTQEVFAQVKQIYKTPPIKDFGGFNFSQILPDPSKPSKRSFIEDLLFNKVTLADAGFIKQYGYCLGDIAARDLICAQKFNGLTVLPPLLTDEMIAQYTSALLAGTITSGWTFGAGAALQIPFAMQMAYRFNGIGVTQNVLYENQKLIANQFNSAIGKIQDSLSSTASALGKLQDVVNQNAQALNTLVKQLSSNFGAISSVLNDILSRLDKVEAEVQIDRLITGRLQSLQTYVTQQLIRAAEIRASANLAATKMSECVLGQSKRVDFCGKGYHLMSFPQSAPHGVVFLHVTYVPAQEKNFTCAPAICHDGKAHFPREGVFVSNGTHWFVTQRNFYEPQIITTDNTFVSGNCDVVIGIVNNTVYDPLQPELDSFKEELDKYFKNHTSPDVDLGDISGINASVVNIQKEIDRLNEVAKNLNESLIDLQELGKYEQYIKGGSGYIPEAPRDGQAYVRKDGEWVLLSTFL

SEQ ID NO: 5994 - protein, 1241 aa, Artificial Sequence
  SARS-CoV-2/Belgium/VAG-03013/2020__EPI_ISL_415155 spike protein (1-1211)(I712C_T1077C) Foldon construct
MFVFLVLLPLVSSQCVNLTTRTQLPPAYTNSFTRGVYYPDKVFRSSVLHSTQDLFLPFFSNVTWFHAIHVSGTNGTKRFDNPVLPFNDGVYFASTEKSNIIRGWIFGTTLDSKTQSLLIVNNATNVVIKVCEFQFCNDPFLGVYYHKNNKSWMESEFRVYSSANNCTFEYVSQPFLMDLEGKQGNFKNLREFVFKNIDGYFKIYSKHTPINLVRDLPQGFSALEPLVDLPIGINITRFQTLLALHRSYLTPGDSSSGWTAGAAAYYVGYLQPRTFLLKYNENGTITDAVDCALDPLSETKCTLKSFTVEKGIYQTSNFRVQPTESIVRFPNITNLCPFGEVFNATRFASVYAWNRKRISNCVADYSVLYNSASFSTFKCYGVSPTKLNDLCFTNVYADSFVIRGDEVRQIAPGQTGKIADYNYKLPDDFTGCVIAWNSNNLDSKVGGNYNYLYRLFRKSNLKPFERDISTEIYQAGSTPCNGVEGFNCYFPLQSYGFQPTNGVGYQPYRVVVLSFELLHAPATVCGPKKSTNLVKNKCVNFNFNGLTGTGVLTESNKKFLPFQQFGRDIADTTDAVRDPQTLEILDITPCSFGGVSVITPGTNTSNQVAVLYQGVNCTEVPVAIHADQLTPTWRVYSTGSNVFQTRAGCLIGAEHVNNSYECDIPIGAGICASYQTQTNSPRRARSVASQSIIAYTMSLGAENSVAYSNNSCAIPTNFTISVTTEILPVSMTKTSVDCTMYICGDSTECSNLLLQYGSFCTQLNRALTGIAVEQDKNTQEVFAQVKQIYKTPPIKDFGGFNFSQILPDPSKPSKRSFIEDLLFNKVTLADAGFIKQYGDCLGDIAARDLICAQKFNGLTVLPPLLTDEMIAQYTSALLAGTITSGWTFGAGAALQIPFAMQMAYRFNGIGVTQNVLYENQKLIANQFNSAIGKIQDSLSSTATALGKLQDVVNQNAQALNTLVKQLSSNFGAISSVLNDILSRLDKVEAEVQIDRLITGRLQSLQTYVTQQLIRAAEIRASANLAATKMSECVLGQSKRVDFCGKGYHLMSFPQSAPHGVVFLHVTYVPAQEKNFTCAPAICHDGKAHFPREGVFVSNGTHWFVTQRNFYEPQIITTDNTFVSGNCDVVIGIVNNTVYDPLQPELDSFKEELDKYFKNHTSPDVDLGDISGINASVVNIQKEIDRLNEVAKNLNESLIDLQELGKYEQYIKGGSGYIPEAPRDGQAYVRKDGEWVLLSTFL

SEQ ID NO: 5995 - protein, 1241 aa, Artificial Sequence
  SARS-CoV-2/Belgium/BC-03016/2020__EPI_ISL_415157 spike protein (1-1211)(I712C_T1077C) Foldon construct
MFVFLVLLPLVSSQCVNLTTRTQLPPAYTNSFTRGVYYPDKVFRSSVLHSTQDLFLPFFSNVTWFHAIHVSGTNGTKRFDNPVLPFNDGVYFASTEKSNIIRGWIFGTTLDSKTQSLLIVNNATNVVIKVCEFQFCNDPFLGVYYHKNNKSWMESEFRVYSSANNCTFEYVSQPFLMDLEGKQGNFKNLREFVFKNIDGYFKIYSKHTPINLVRDLPQGFSALEPLVDLPIGINITRFQTLLALHRSYLTPGDSSSGWTAGAAAYYVGYLQPRTFLLKYNENGTITDAVDCALDPLSETKCTLKSFTVEKGIYQTSNFRVQPTESIVRFPNITNLCPFGEVFNATRFASVYAWNRKRISNCVADYSVLYNSASFSTFKCYGVSPTKLNDLCFTNVYADSFVIRGDEVRQIAPGQTGKIADYNYKLPDDFTGCVIAWNSNNLDSKVGGNYNYLYRLFRKSNLKPFERDISTEIYQAGSTPCNGVEGFNCYFPLQSYGFQPTNGVGYQPYRVVVLSFELLHAPATVCGPKKSTNLVKNKCVNFNFNGLTGTGVLTESNKKFLPFQQFGRDIADTTDAVRDPQTLEILDITPCSFGGVSVITPGTNTSNQVAVLYQGVNCTEVPVAIHADQLTPTWRVYSTGSNVFQTRAGCLIGAEHVNNSYECDIPIGAGICASYQTQTNSPRRARSVASQSIIAYTMSLGAENSVAYSNNSCAIPTNFTISVTTEILPVSMTKTSVDCTMYICGDSTECSNLLLQYGSFCTQLNRALTGIAVEQDKNTQEVFAQVKQIYKTPPIKDFGGFNFSQILPDPSKPSKRSFIEDLLFNKVTLADAGFIKQYGDCLGDIAARDLICAQKFNGLTVLPPLLTDEMIAQYTSALLAGTITSGWTFGAGAALQIPFAMQMAYRFNGIGVTQNVLYENQKLIANQFNSAIGKIQDSLSSTAPALGKLQDVVNQNAQALNTLVKQLSSNFGAISSVLNDILSRLDKVEAEVQIDRLITGRLQSLQTYVTQQLIRAAEIRASANLAATKMSECVLGQSKRVDFCGKGYHLMSFPQSAPHGVVFLHVTYVPAQEKNFTCAPAICHDGKAHFPREGVFVSNGTHWFVTQRNFYEPQIITTDNTFVSGNCDVVIGIVNNTVYDPLQPELDSFKEELDKYFKNHTSPDVDLGDISGINASVVNIQKEIDRLNEVAKNLNESLIDLQELGKYEQYIKGGSGYIPEAPRDGQAYVRKDGEWVLLSTFL

SEQ ID NO: 5996 - protein, 1241 aa, Artificial Sequence
  SARS-CoV-2/Germany/BavPat3/2020__EPI_ISL_414521 spike protein (1-1211)(I712C_T1077C) Foldon construct
MFVFLVLLPLVSSQCVNLTTRTQLPPAYTNSFTRGVYYPDKVFRSSVLHSTQDLFLPFFSNVTWFHAIHVSGTNGTKRFDNPVLPFNDGVYFASTEKSNIIRGWIFGTTLDSKTQSLLIVNNATNVVIKVCEFQFCNDPFLGVYYHKNNKSWMESEFRVYSSANNCTFEYVSQPFLMDLEGKQGNFKNLREFVFKNIDGYFKIYSKHTPINLVRDLPQGFSALEPLVDLPIGINITRFQTLLALHRSYLTPGDSSSGWTAGAAAYYVGYLQPRTFLLKYNENGTITDAVDCALDPLSETKCTLKSFTVEKGIYQTSNFRVQPTESIVRFPNITNLCPFGEVFNATRFASVYAWNRKRISNCVADYSVLYNSASFSTFKCYGVSPTKLNDLCFTNVYADSFVIRGDEVRQIAPGQTGKIADYNYKLPDDFTGCVIAWNSNNLDSKVGGNYNYLYRLFRKSNLKPFERDISTEIYQAGSTPCNGVEGFNCYFPLQSYGFQPTNGVGYQPYRVVVLSFELLHAPATVCGPKKSTNLVKNKCVNFNFNGLTGTGVLTESNKKFLPFQQFGRDIADTTDAVRDPQTLEILDITPCSFGGVSVITPGTNTSNQVAVLYQDVNCTEVPVAIHADQLTPTWRVYSTGSNVFQTRAGCLIGAEHVNNSYECDIPIGAGICASYQTQTNSPRRARSVASQSIIAYTMSLGAENSVAYSNNSCAIPTNFTISVTTEILPVSMTKTSVDCTMYICGDSTECSNLLLQYGSFCTQLNRALTGIAVEQDKNTQQVFAQVKQIYKTPPIKDFGGFNFSQILPDPSKPSKRSFIEDLLFNKVTLADAGFIKQYGDCLGDIAARDLICAQKFNGLTVLPPLLTDEMIAQYTSALLAGTITSGWTFGAGAALQIPFAMQMAYRFNGIGVTQNVLYENQKLIANQFNSAIGKIQDSLSSTASALGKLQDVVNQNAQALNTLVKQLSSNFGAISSVLNDILSRLDKVEAEVQIDRLITGRLQSLQTYVTQQLIRAAEIRASANLAATKMSECVLGQSKRVDFCGKGYHLMSFPQSAPHGVVFLHVTYVPAQEKNFTCAPAICHDGKAHFPREGVFVSNGTHWFVTQRNFYEPQIITTDNTFVSGNCDVVIGIVNNTVYDPLQPELDSFKEELDKYFKNHTSPDVDLGDISGINASVVNIQKEIDRLNEVAKNLNESLIDLQELGKYEQYIKGGSGYIPEAPRDGQAYVRKDGEWVLLSTFL

SEQ ID NO: 5997 - protein, 1241 aa, Artificial Sequence
  SARS-CoV-2/France/HF1805/2020__EPI_ISL_414628 spike protein (1-1211)(I712C_T1077C) Foldon construct
MFVFLVLLPLVSSQCVNLTTRTQLPPAYTNSFTRGVYYPDKVFRSSVLHSTQDLFLPFFSNVTWFHAIHVSGTNGTKRFDNPVLPFNDGVYFASTEKSNIIRGWIFGTTLDSKTQSLLIVNNATNVVIKVCEFQFCNDPFLGVYYHKNNKSWMESEFRVYSSANNCTFEYVSQPFLMDLEGKQGNFKNLREFVFKNIDGYFKIYSKHTPINLVRDLPQGFSALEPLVDLPIGINITRFQTLLALHRSYLTPGDSSSGWTAGAAAYYVGYLQPRTFLLKYNENGTITDAVDCALDPLSETKCTLKSFTVEKGIYQTSNFRVQPTESIVRFPNITNLCPFGEVFNATRFASVYAWNRKRISNCVADYSVLYNSASFSTFKCYGVSPTKLNDLCFTNVYADSFVIRGDEVRQIAPGQTGKIADYNYKLPDDFTGCVIAWNSNNLDSKVGGNYNYLYRLFRKSNLKPFERDISTEIYQAGSTPCNGVEGFNCYFPLQSYGFQPTNGVGYQPYRVVVLSFELLHAPATVCGPKKSTNLVKNKCVNFNFNGLTGTGVLTESNKKFLPFQQFGRDIADTTDAVRDPQTLEILDITPCSFGGVSVITPGTNTSNQVAVLYQGVNCTEVPVAIHADQLTPTWRVYSTGSNVFQTRAGCLIGAEHVNNSYECDIPIGAGICASYQTQTNSPRRARSVASQSIIAYTMSLGAENSVAYSNNSCAIPTNFTISVTTEILPVSMTKTSVDCTMYICGDSTECSNLLLQYGSFCTQLNRALTGIAVEQDKNTQEVFAQVKQIYKTPPIKDFGGFNFSQILPDPSKPSKRSFIEDLLFNKVTLADAGFIKQYGDCLGDIAARDLICAQKFNGLTVLPPLLTDEMIAQYTSALLAGTITSGWTFGAGAALQIPFAMQMAYRFNGIGVTQNVLYENQKLIANQFNSAIGKIQDSLSSTASALGKLQDVVNQNAQALNTLVKQLSSNFGAISSVLNDILSRLDKVEAEVQIDRLITGRLQSLQTYVTQQLIRAAEIRASANLAATKMSECVLGQSKRVDFCGKGYHLMSFPQSAPHGVVFLHVTYVPAQEKNFTCAPAICHDGKAHFPREGVFVSNGTHWFVTQRNFYEPQIITTDNTFVSGNCDVVIGVVNNTVYDPLQPELDSFKEELDKYFKNHTSPDVDLGDISGINASVVNIQKEIDRLNEVAKNLNESLIDLQELGKYEQYIKGGSGYIPEAPRDGQAYVRKDGEWVLLSTFL

SEQ ID NO: 5998 - protein, 1241 aa, Artificial Sequence
  SARS-CoV-2/Netherlands/ZuidHolland_9/2020__EPI_ISL_414445 spike protein (1-1211)(I712C_T1077C) Foldon construct
MFVFLVLLPLVSSQCVNLTTRTQLPPAYTNSFTRGVYYPDKVFRSSVLHSTQDLFLPFFSNVTWFHAIHVSGTNGTKRFDNPVLPFNDGVYFASTEKSNIIRGWIFGTTLDSKTQSLLIVNNATNVVIKVCEFQFCNDPFLGVYYHKNNKSWMESEFRVYSSANNCTFEYVSQPFLMDLEGKQGNFKNLREFVFKNIDGYFKIYSKHTPINLVRDLPQGFSALEPLVDLPIGINITRFQTLLALHRSYLTPGDSSSGWTAGAAAYYVGYLQPRTFLLKYNENGTITDAVDCALDPLSETKCTLKSFTVEKGIYQTSNFRVQPTESIVRFPNITNLCPFGEVFNATRFASVYAWNRKRISNCVADYSVLYNSASFSTFKCYGVSPTKLNDLCFTNVYADSFVIRGDEVRQIAPGQTGKIADYNYKLPDDFTGCVIAWNSNNLDSKVGGNYNYLYRLFRKSNLKPFERDISTEIYQAGSTPCNGVEGFNCYFPLQSYGFQPTNGVGYQPYRVVVLSFELLHAPATVCGPKKSTNLVKNKCVNFNFNGLTGTGVLTESNKKFLPFQQFGRDIADTTDAVRDPQTLEILDITPCSFGGVSVITPGTNTSNQVAVLYQGVNCTEVPVAIHADQLTPTWRVYSTGSNVFQTRAGCLIGAEHVNNSYECDIPIGAGICASYQTQTNSPRRARSVASQSIIAYTMSLGAENSVAYSNNSCAIPTNFTISVTTEILPVSMTKTSVDCTMYICGDSTECSNLLLQYGSFCTQLNRALTGIAVEQDKNTQEVFAQVKQIYKTPPIKDFGGFNFSQILPDPSKPSKRSFIEDLLFNKVTLADAGFIKQYGDCLGDIAARDLICVQKFNGLTVLPPLLTDEMIAQYTSALLAGTITSGWTFGAGAALQIPFAMQMAYRFNGIGVTQNVLYENQKLIANQFNSAIGKIQDSLSSTASALGKLQDVVNQNAQALNTLVKQLSSNFGAISSVLNDILSRLDKVEAEVQIDRLITGRLQSLQTYVTQQLIRAAEIRASANLAATKMSECVLGQSKRVDFCGKGYHLMSFPQSAPHGVVFLHVTYVPAQEKNFTCAPAICHDGKAHFPREGVFVSNGTHWFVTQRNFYEPQIITTDNTFVSGNCDVVIGIVNNTVYDPLQPELDSFKEELDKYFKNHTSPDVDLGDISGINASVVNIQKEIDRLNEVAKNLNESLIDLQELGKYEQYIKGGSGYIPEAPRDGQAYVRKDGEWVLLSTFL

SEQ ID NO: 5999 - protein, 1241 aa, Artificial Sequence
  SARS-CoV-2/Finland/FIN03032020A/2020__EPI_ISL_413602 spike protein (1-1211)(I712C_T1077C) Foldon construct
MFVFLVLLPLVSSQCVNLTTRTQLPPAYTNSFTRGVYYPDKVFRSSVLHSTQDLFLPFFSNVTWFHAIHVSGTNGTKRFDNPVLPFNDGVYFASTEKSNIIRGWIFGTTLDSKTQSLLIVNNATNVVIKVCEFQFCNDPFLGVYYHKNNKSWMESEFRVYSSANNCTFEYVSQPFLMDLEGKQGNFKNLREFVFKNIDGYFKIYSKHTPINLVRDLPQGFSALEPLVDLPIGINITRFQTLLALHRSYLTPGDSSSGWTAGAAAYYVGYLQPRTFLLKYNENGTITDAVDCALDPLSETKCTLKSFTVEKGIYQTSNFRVQPTESIVRFPNITNLCPFGEVFNATRFASVYAWNRKRISNCVADYSVLYNSASFSTFKCYGVSPTKLNDLCFTNVYADSFVIRGDEVRQIAPGQTGKIADYNYKLPDDFTGCVISWNSNNLDSKVGGNYNYLYRLFRKSNLKPFERDISTEIYQAGSTPCNGVEGFNCYFPLQSYGFQPTNGVGYQPYRVVVLSFELLHAPATVCGPKKSTNLVKNKCVNFNFNGLTGTGVLTESNKKFLPFQQFGRDIADTTDAVRDPQTLEILDITPCSFGGVSVITPGTNTSNQVAVLYQGVNCTEVPVAIHADQLTPTWRVYSTGSNVFQTRAGCLIGAEHVNNSYECDIPIGAGICASYQTQTNSPRRARSVASQSIIAYTMSLGAENSVAYSNNSCAIPTNFTISVTTEILPVSMTKTSVDCTMYICGDSTECSNLLLQYGSFCTQLNRALTGIAVEQDKNTQEVFAQVKQIYKTPPIKDFGGFNFSQILPDPSKPSKRSFIEDLLFNKVTLADAGFIKQYGDCLGDIAARDLICAQKFNGLTVLPPLLTDEMIAQYTSALLAGTITSGWTFGAGAALQIPFAMQMAYRFNGIGVTQNVLYENQKLIANQFNSAIGKIQDSLSSTASALGKLQDVVNQNAQALNTLVKQLSSNFGAISSVLNDILSRLDKVEAEVQIDRLITGRLQSLQTYVTQQLIRAAEIRASANLAATKMSECVLGQSKRVDFCGKGYHLMSFPQSAPHGVVFLHVTYVPAQEKNFTCAPAICHDGKAHFPREGVFVSNGTHWFVTQRNFYEPQIITTDNTFVSGNCDVVIGIVNNTVYDPLQPELDSFKEELDKYFKNHTSPDVDLGDISGINASVVNIQKEIDRLNEVAKNLNESLIDLQELGKYEQYIKGGSGYIPEAPRDGQAYVRKDGEWVLLSTFL

SEQ ID NO: 6000 - protein, 1241 aa, Artificial Sequence
  SARS-CoV-2/France/GE1977/2020__EPI_ISL_414632 spike protein (1-1211)(I712C_T1077C) Foldon construct
MFVFLVLLPLVSSQCVNLTTRTQLPPAYTNSFTRGVYYPDKVFRSSVLHSTQDLFLPFFSNVTWFHAIHVSGTNGTKRFDNPVLPFNDGVYFASTEKSNIIRGWIFGTTLDSKTQSLLIVNNATNVVIKVCEFQFCNDPFLGVYYHKNNKSWMESEFRVYSSANNCTFEYVSQPFLMDLEGKQGNFKNLREFVFKNIDGYFKIYSKHTPINLVRDLPQGFSALEPLVDLPIGINITRFQTLLALHRSYLTPGDSSSGWTAGAAAYYVGYLQPRTFLLKYNENGTITDAVDCALDPLSETKCTLKSFTVEKGIYQTSNFRVQPTESIVRFPNITNLCPFGEVFNATRFASVYAWNRKRISNCVADYSVLYNSASFSTFKCYGVSPTKLNDLCFTNVYADSFVIRGDEVRQIAPGQTGKIADYNYKLPDDFTGCVIAWNSNNLDSKVGGNYNYLYRLFRKSNLKPFERDISTEIYQAGSTPCNGVEGFNCYFPLQSYGFQPTNGVGYQPYRVVVLSFELLHAPATVCGPKKSTNLVKNKCVNFNFNGLTGTGVLTESNKKFLPFQQFGRDIADTTDAVRDPQTLEILDITPCSFGGVSVITPGTNTSNQVAVLYQGVNCTEVPVAIHADQLTPTWRVYSTGSNVFQTRAGCLIGAEHVNNSYECDIPIGAGICASYQTQTNSPRRARSVASQSIIAYTMSLGAENSVAYSNNSCAIPTNFTISVTTEILPVSMTKTSVDCTMYICGDSTECSNLLLQYGSFCTQLNRALTGIAVEQDKNTQEVFAQVKQIYKTPPIKDFGGFNFSQILPDPSKPSKRSFIEDLLFNKVTLADAGFIKQYGDCLGDIAARDLICAQKFNGLTVLPPLLTDEMIAQYTSALLAGTITSGWTFGAGAALQIPFAMQMAYRFNGIGVTQNVLYENQKLIANQFNSAIGKIQDSLFSTASALGKLQDVVNQNAQALNTLVKQLSSNFGAISSVLNDILSRLDKVEAEVQIDRLITGRLQSLQTYVTQQLIRAAEIRASANLAATKMSECVLGQSKRVDFCGKGYHLMSFPQSAPHGVVFLHVTYVPAQEKNFTCAPAICHDGKAHFPREGVFVSNGTHWFVTQRNFYEPQIITTDNTFVSGNCDVVIGIVNNTVYDPLQPELDSFKEELDKYFKNHTSPDVDLGDISGINASVVNIQKEIDRLNEVAKNLNESLIDLQELGKYEQYIKGGSGYIPEAPRDGQAYVRKDGEWVLLSTFL

SEQ ID NO: 6001 - protein, 1241 aa, Artificial Sequence
  SARS-CoV-2/Finland/FIN-313/2020__EPI_ISL_414641 spike protein (1-1211)(I712C_T1077C) Foldon construct
MFVFLVLLPLVSSQCVNLTTRTQLPPAYTNSFTRGVYYPDKVFRSSVLHSTQDLFLPFFSNVTWFHAIHVSGTNGTKRFDNPVLPFNDGVYFASTEKSNIIRGWIFGTTLDSKTQSLLIVNNATNVVIKVCEFQFCNDPFLGVYYHKNNKSWMESEFRVYSSANNCTFEYVSQPFLMDLEGKQGNFKNLREFVFKNIDGYFKIYSKHTPINLVRDLPQGFSALEPLVDLPIGINITRFKTLLALHRSYLTPGDSSSGWTAGAAAYYVGYLQPRTFLLKYNENGTITDAVDCALDPLSETKCTLKSFTVEKGIYQTSNFRVQPTESIVRFPNITNLCPFGEVFNATRFASVYAWNRKRISNCVADYSVLYNSASFSTFKCYGVSPTKLNDLCFTNVYADSFVIRGDEVRQIAPGQTGKIADYNYKLPDDFTGCVIAWNSNNLDSKVGGNYNYLYRLFRKSNLKPFERDISTEIYQAGSTPCNGVEGFNCYFPLQSYGFQPTNGVGYQPYRVVVLSFELLHAPATVCGPKKSTNLVKNKCVNFNFNGLTGTGVLTESNKKFLPFQQFGRDIADTTDAVRDPQTLEILDITPCSFGGVSVITPGTNTSNQVAVLYQGVNCTEVPVAIHADQLTPTWRVYSTGSNVFQTRAGCLIGAEHVNNSYECDIPIGAGICASYQTQTNSPRRARSVASQSIIAYTMSLGAENSVAYSNNSCAIPTNFTISVTTEILPVSMTKTSVDCTMYICGDSTECSNLLLQYGSFCTQLNRALTGIAVEQDKNTQEVFAQVKQIYKTPPIKDFGGFNFSQILPDPSKPSKRSFIEDLLFNKVTLADAGFIKQYGDCLGDIAARDLICAQKFNGLTVLPPLLTDEMIAQYTSALLAGTITSGWTFGAGAALQIPFAMQMAYRFNGIGVTQNVLYENQKLIANQFNSAIGKIQDSLSSTASALGKLQDVVNQNAQALNTLVKQLSSNFGAISSVLNDILSRLDKVEAEVQIDRLITGRLQSLQTYVTQQLIRAAEIRASANLAATKMSECVLGQSKRVDFCGKGYHLMSFPQSAPHGVVFLHVTYVPAQEKNFTCAPAICHDGKAHFPREGVFVSNGTHWFVTQRNFYEPQIITTDNTFVSGNCDVVIGIVNNTVYDPLQPELDSFKEELDKYFKNHTSPDVDLGDISGINASVVNIQKEIDRLNEVAKNLNESLIDLQELGKYEQYIKGGSGYIPEAPRDGQAYVRKDGEWVLLSTFL

SEQ ID NO: 6002 - protein, 1241 aa, Artificial Sequence
  SARS-CoV-2/Netherlands/ZuidHolland_2/2020__EPI_ISL_414556 spike protein (1-1211)(I712C_T1077C) Foldon construct
MFVFLVLLPLVSSQCVNLTTRTQLPPAYTNSFTRGVYYPDKVFRSSVLHSTQDLFLPFFSNVTWFHAIHVSGTNGTKRFDNPVLPFNDGVYFASTEKSNIIRGWIFGTTLDSKTQSLLIVNNATNVVIKVCEFQFCNDPFLGVYYHKNNKSWMESEFRVYSSANNCTFEYVSQPFLMDLEGKQGNFKNLREFVFKNIDGYFKIYSKHTPINLVRDLPQGFSALEPLVDLPIGINITRFQTLLALHRSYLTPGDSSSGWTAGAAAYYVGYLQPRTFLLKYNENGTITDAVDCALDPLSETKCTLKSFTVEKGIYQTSNFRVQPTESIVRFPNITNLCPFGEVFNATRFASVYAWNRKRISNCVADYSVLYNSASFSTFKCYGVSPTKLNDLCFTNVYADSFVIRGDEVRQIAPGQTGKIADYNYKLPDDFTGCVIAWNSNNLDSKVGGNYNYLYRLFRKSNLKPFERDISTEIYQAGSTPCNGVEGFNCYFPLQSYGFQPTNGVGYQPYRVVVLSFELLHAPATVCGPKKSTNLVKNKCVNFNFNGLTGTGVLTESNKKFLPFQQFGRDIADTTDAVRDPQTLEILDITPCSFGGVSVITPGTNTSNQVAVLYQGVNCTEVPVAIHADQLTPTWRVYSTGSNVFQTRAGCLIGAEHVNNSYECDIPIGAGICASYQTQTNSPRRARSVASQSIIAYTMSLGAENSVAYSNNSCAIPTNFTISVTTEILPVSMTKTSVDCTMYICGDSTECSNLLLQYGSFCTQLNRALTGIALEQDKNTQEVFAQVKQIYKTPPIKDFGGFNFSQILPDPSKPSKRSFIEDLLFNKVTLADAGFIKQYGDCLGDIAARDLICAQKFNGLTVLPPLLTDEMIAQYTSALLAGTITSGWTFGAGAALQIPFAMQMAYRFNGIGVTQNVLYENQKLIANQFNSAIGKIQDSLSSTASALGKLQDVVNQNAQALNTLVKQLSSNFGAISSVLNDILSRLDKVEAEVQIDRLITGRLQSLQTYVTQQLIRAAEIRASANLAATKMSECVLGQSKRVDFCGKGYHLMSFPQSAPHGVVFLHVTYVPAQEKNFTCAPAICHDGKAHFPREGVFVSNGTHWFVTQRNFYEPQIITTDNTFVSGNCDVVIGIVNNTVYDPLQPELDSFKEELDKYFKNHTSPDVDLGDISGINASVVNIQKEIDRLNEVAKNLNESLIDLQELGKYEQYIKGGSGYIPEAPRDGQAYVRKDGEWVLLSTFL

SEQ ID NO: 6003 - protein, 1241 aa, Artificial Sequence
  SARS-CoV-2/USA/WA-UW31/2020__EPI_ISL_414618 spike protein (1-1211)(I712C_T1077C) Foldon construct
MFVFLVLLPLVSSQCVNLTTRTQLPPAYTNSFTRGVYYPDKVFRSSVLHSTQDLFLPFFSNVTWFHAIHVSGTNGTKRFDNPVLPFNDGVYFASTEKSNIIRGWIFGTTLDSKTQSLLIVNNATNVVIKVCEFQFCNDPFLGVYYHKNNKSWMESEFRVYSSANNCTFEYVSQPFLMDLEGKQGNFKNLREFVFKNIDGYFKIYSKHTPINLVRDLPQGFSALEPLVDLPIGINITRFQTLLALHRSYLTPGDSSSGWTAGAAAYYVGYLQPRTFLLKYNENGTITDAVDCALDPLSETKCTLKSFTVEKGIYQTSNFRVQPTESIVRFPNITNLCPFGEVFNATRFASVYAWNRKRISNCVADYSVLYNSASFSTFKCYGVSPTKLNDLCFTNVYADSFVIRGDEVRQIAPGQTGKIADYNYKLPDDFTGCVIAWNSNNLDSKVGGNYNYLYRLFRKSNLKPFERDISTEIYQAGSTPCNGAEGFNCYFPLQSYGFQPTNGVGYQPYRVVVLSFELLHAPATVCGPKKSTNLVKNKCVNFNFNGLTGTGVLTESNKKFLPFQQFGRDIADTTDAVRDPQTLEILDITPCSFGGVSVITPGTNTSNQVAVLYQDVNCTEVPVAIHADQLTPTWRVYSTGSNVFQTRAGCLIGAEHVNNSYECDIPIGAGICASYQTQTNSPRRARSVASQSIIAYTMSLGAENSVAYSNNSCAIPTNFTISVTTEILPVSMTKTSVDCTMYICGDSTECSNLLLQYGSFCTQLNRALTGIAVEQDKNTQEVFAQVKQIYKTPPIKDFGGFNFSQILPDPSKPSKRSFIEDLLFNKVTLADAGFIKQYGDCLGDIAARDLICAQKFNGLTVLPPLLTDEMIAQYTSALLAGTITSGWTFGAGAALQIPFAMQMAYRFNGIGVTQNVLYENQKLIANQFNSAIGKIQDSLSSTASALGKLQDVVNQNAQALNTLVKQLSSNFGAISSVLNDILSRLDKVEAEVQIDRLITGRLQSLQTYVTQQLIRAAEIRASANLAATKMSECVLGQSKRVDFCGKGYHLMSFPQSAPHGVVFLHVTYVPAQEKNFTCAPAICHDGKAHFPREGVFVSNGTHWFVTQRNFYEPQIITTDNTFVSGNCDVVIGIVNNTVYDPLQPELDSFKEELDKYFKNHTSPDVDLGDISGINASVVNIQKEIDRLNEVAKNLNESLIDLQELGKYEQYIKGGSGYIPEAPRDGQAYVRKDGEWVLLSTFL

SEQ ID NO: 6004 - protein, 1241 aa, Artificial Sequence
  SARS-CoV-2/South Korea/SNU01/2020__EPI_ISL_411929 spike protein (1-1211)(I712C_T1077C) Foldon construct
MFVFLVLLPLVSSQCVNLTTRTQLPPAYTNSFTRGVYYPDKVFRSSVLHSTQDLFLPFFSNVTWFHAIHVSGTNGTKRFDNPVLPFNDGVYFASTEKSNIIRGWIFGTTLDSKTQSLLIVNNATNVVIKVCEFQFCNDPFLGVYYHKNNKSWMESEFRVYSSANNCTFEYVSQPFLMDLEGKQGNFKNLREFVFKNIDGYFKIYSKHTPINLVRDLPQGFWALEPLVDLPIGINITRFQTLLALHRSYLTPGDSSSGWTAGAAAYYVGYLQPRTFLLKYNENGTITDAVDCALDPLSETKCTLKSFTVEKGIYQTSNFRVQPTESIVRFPNITNLCPFGEVFNATRFASVYAWNRKRISNCVADYSVLYNSASFSTFKCYGVSPTKLNDLCFTNVYADSFVIRGDEVRQIAPGQTGKIADYNYKLPDDFTGCVIAWNSNNLDSKVGGNYNYLYRLFRKSNLKPFERDISTEIYQAGSTPCNGVEGFNCYFPLQSYGFQPTNGVGYQPYRVVVLSFELLHAPATVCGPKKSTNLVKNKCVNFNFNGLTGTGVLTESNKKFLPFQQFGRDIADTTDAVRDPQTLEILDITPCSFGGVSVITPGTNTSNQVAVLYQDVNCTEVPVAIHADQLTPTWRVYSTGSNVFQTRAGCLIGAEHVNNSYECDIPIGAGICASYQTQTNSPRRARSVASQSIIAYTMSLGAENSVAYSNNSCAIPTNFTISVTTEILPVSMTKTSVDCTMYICGDSTECSNLLLQYGSFCTQLNRALTGIAVEQDKNTQEVFAQVKQIYKTPPIKDFGGFNFSQILPDPSKPSKRSFIEDLLFNKVTLADAGFIKQYGDCLGDIAARDLICAQKFNGLTVLPPLLTDEMIAQYTSALLAGTITSGWTFGAGAALQIPFAMQMAYRFNGIGVTQNVLYENQKLIANQFNSAIGKIQDSLSSTASALGKLQDVVNQNAQALNTLVKQLSSNFGAISSVLNDILSRLDKVEAEVQIDRLITGRLQSLQTYVTQQLIRAAEIRASANLAATKMSECVLGQSKRVDFCGKGYHLMSFPQSAPHGVVFLHVTYVPAQEKNFTCAPAICHDGKAHFPREGVFVSNGTHWFVTQRNFYEPQIITTDNTFVSGNCDVVIGIVNNTVYDPLQPELDSFKEELDKYFKNHTSPDVDLGDISGINASVVNIQKEIDRLNEVAKNLNESLIDLQELGKYEQYIKGGSGYIPEAPRDGQAYVRKDGEWVLLSTFL

SEQ ID NO: 6005 - protein, 1241 aa, Artificial Sequence
  SARS-CoV-2/China/WF0004/2020__EPI_ISL_413694 spike protein (1-1211)(I712C_T1077C) Foldon construct
MFVFLVLLPLVSSQCVNLTTRTQLPPAYTNSFTRGVYYPDKVFRSSVLHSTQDLFLPFFSNVTWFHAIHVSGTNGTKRFDNPVLPFNDGVYFASTEKSNIIRGWIFGTTLDSKTQSLLIVNNATNVVIKVCEFQFCNDPFLGVYYHKNNKSWTESEFRVYSSANNCTFEYVSQPFLMDLEGKQGNFKNLREFVFKNIDGYFKIYSKHTPINLVRDLPQGFSALEPLVDLPIGINITRFQTLLALHRSYLTPGDSSSGWTAGAAAYYVGYLQPRTFLLKYNENGTITDAVDCALDPLSETKCTLKSFTVEKGIYQTSNFRVQPTESIVRFPNITNLCPFGEVFNATRFASVYAWNRKRISNCVADYSVLYNSASFSTFKCYGVSPTKLNDLCFTNVYADSFVIRGDEVRQIAPGQTGKIADYNYKLPDDFTGCVIAWNSNNLDSKVGGNYNYLYRLFRKSNLKPFERDISTEIYQAGSTPCNGVEGFNCYFPLQSYGFQPTNGVGYQPYRVVVLSFELLHAPATVCGPKKSTNLVKNKCVNFNFNGLTGTGVLTESNKKFLPFQQFGRDIADTTDAVRDPQTLEILDITPCSFGGVSVITPGTNTSNQVAVLYQDVNCTEVPVAIHADQLTPTWRVYSTGSNVFQTRAGCLIGAEHVNNSYECDIPIGAGICASYQTQTNSPRRARSVASQSIIAYTMSLGAENSVAYSNNSCAIPTNFTISVTTEILPVSMTKTSVDCTMYICGDSTECSNLLLQYGSFCTQLNRALTGIAVEQDKNTQEVFAQVKQIYKTPPIKDFGGFNFSQILPDPSKPSKRSFIEDLLFNKVTLADAGFIKQYGDCLGDIAARDLICAQKFNGLTVLPPLLTDEMIAQYTSALLAGTITSGWTFGAGAALQIPFAMQMAYRFNGIGVTQNVLYENQKLIANQFNSAIGKIQDSLSSTASALGKLQDVVNQNAQALNTLVKQLSSNFGAISSVLNDILSRLDKVEAEVQIDRLITGRLQSLQTYVTQQLIRAAEIRASANLAATKMSECVLGQSKRFDFCGKGYHLMSFPQSAPHGVVFLHVTYVPAQEKNFTCAPAICHDGKAHFPREGVFVSNGTHWFVTQRNFYEPQIITTDNTFVSGNCDVVIGIVNNTVYDPLQPELDSFKEELDKYFKNHTSPDVDLGDISGINASVVNIQKEIDRLNEVAKNLNESLIDLQELGKYEQYIKGGSGYIPEAPRDGQAYVRKDGEWVLLSTFL

SEQ ID NO: 6006 - protein, 1241 aa, Artificial Sequence
  SARS-CoV-2/China/WF0028/2020__EPI_ISL_413791 spike protein (1-1211)(I712C_T1077C) Foldon construct
MFVFLVLLPLVSSQCVNLTTRTQLPPAYTNSFTRGVYYPDKVFRSSVLHSTQDLFLPFFSNVTWFHAIHVSGTNGTKRFDNPVLPFNDGVYFASTEKSNIIRGWIFGTTLDSKTQSLLIVNNATNVVIKVCEFQFCNDPFLGVYYHKNNKSWMESEFRVYSSANNCTFEYVSQPFLMDLEGKQGNFKNLREFVFKNIDGYFKIYSKHTPINLVRDLPQGFSALEPLVDLPIGINITRFQTLLALHRSYLTPGDSSSGWTAGAAAYYVGYLQPRTFLLKYNENGTITDAVDCALDPLSETKCTLKSFTVEKGIYQTSNFRVQPTESIVRFPNITNLCPFGEVFNATRFASVYAWNRKRISNCVADYSVLYNSASFSTFKCYGVSPTKLNDLCFTNVYADSFVIRGDEVRQIAPGQTGKIADYNYKLPDDFTGCVIAWNSNNLDSKVGGNYNYLYRLFRKSNLKPFERDISTEIYQAGSTPCNGVEGFNCYFPLQSYGFQPTNGVGYQPYRVVVLSFELLHAPATVCGPKKSTNLVKNKCVNFNFNGLTGTGVLTESNKKFLPFQQFGRDIADTTDAVRDPQTLEILDITPCSFGGVSVITPGTNTSNQVAVLYQDVNCTEVPVAIHADQLTPTWRVYSTGSNVFQTRAGCLIGAEHVNNSYECDIPIGAGICASYQTQTNSPRRARSVASQSIIAYTMSLGAENSVAYSNNSCAIPTNFTISVTTEILPVSMTKTSVDCTMYICGDSTECSNLLLQYGSFCTQLNRALTGIAVEQDKNTQEVFAQVKQIYKTPPIKDFGGFNFSQILPDPSKPSKRSFIEDLLFNKVTLADAGFIKQYGDCLGDIAARDLICAQKFNGLTVLPPLLTDEMIAQYTSALLAGTITSGWTFGAGAALQIPFAMQMAYRFNGIGVTQNVLYENQKLIANQFNSAIGKIQDSLSSTASALGKLQDVVNQNAQALNTLVKQLSSNFGAISSVLNDILSRLDKVEAEVQIDRLITGRLQSLQTYVTQQLIRAAEIRASANLAATKMSECVLGQSKRVDFCGKGYHLMSFPQSAPHGVVFLHVTYVPAQEKNFTCAPAICHDGKAHFPREGVFVSNGTHWFVTQRNFYEPQIITTDNTFVSGNCDVVIGIVNNTVYDPLQPELESFKEELDKYFKNHTSPDVDLGDISGINASVVNIQKEIDRLNEVAKNLNESLIDLQELGKYEQYIKGGSGYIPEAPRDGQAYVRKDGEWVLLSTFL

SEQ ID NO: 6007 - protein, 1241 aa, Artificial Sequence
  SARS-CoV-2/2019-nCoV/USA-CruiseA-18/2020__MT159716.1 spike protein (1-1211)(I712C_T1077C) Foldon construct
MFVFLVLLPLVSSQCVNLTTRTQLPPAYTNSFTRGVYYPDKVFRSSVLHSTQDLFLPFFSNVTWFHAIHVSGTNGTKRFDNPVLPFNDGVYFASTEKSNIIRGWIFGTTLDSKTQSLLIVNNATNVVIKVCEFQFCNDPFLGVYYHKNNKSWMESELRVYSSANNCTFEYVSQPFLMDLEGKQGNFKNLREFVFKNIDGYFKIYSKHTPINLVRDLPQGFSALEPLVDLPIGINITRFQTLLALHRSYLTPGDSSSGWTAGAAAYYVGYLQPRTFLLKYNENGTITDAVDCALDPLSETKCTLKSFTVEKGIYQTSNFRVQPTESIVRFPNITNLCPFGEVFNATRFASVYAWNRKRISNCVADYSVLYNSASFSTFKCYGVSPTKLNDLCFTNVYADSFVIRGDEVRQIAPGQTGKIADYNYKLPDDFTGCVIAWNSNNLDSKVGGNYNYLYRLFRKSNLKPFERDISTEIYQAGSTPCNGVEGFNCYFPLQSYGFQPTNGVGYQPYRVVVLSFELLHAPATVCGPKKSTNLVKNKCVNFNFNGLTGTGVLTESNKKFLPFQQFGRDIADTTDAVRDPQTLEILDITPCSFGGVSVITPGTNTSNQVAVLYQDVNCTEVPVAIHADQLTPTWRVYSTGSNVFQTRAGCLIGAEHVNNSYECDIPIGAGICASYQTQTNSPRRARSVASQSIIAYTMSLGAENSVAYSNNSCAIPTNFTISVTTEILPVSMTKTSVDCTMYICGDSTECSNLLLQYGSFCTQLNRALTGIAVEQDKNTQEVFAQVKQIYKTPPIKDFGGFNFSQILPDPSKPSKRSFIEDLLFNKVTLADAGFIKQYGDCLGDIAARDLICAQKFNGLTVLPPLLTDEMIAQYTSALLAGTITSGWTFGAGAALQIPFAMQMAYRFNGIGVTQNVLYENQKLIANQFNSAIGKIQDSLSSTASALGKLQDVVNQNAQALNTLVKQLSSNFGAISSVLNDILSRLDKVEAEVQIDRLITGRLQSLQTYVTQQLIRAAEIRASANLAATKMSECVLGQSKRVDFCGKGYHLMSFPQSAPHGVVFLHVTYVPAQEKNFTCAPAICHDGKAHFPREGVFVSNGTHWFVTQRNFYEPQIITTDNTFVSGNCDVVIGIVNNTVYDPLQPELDSFKEELDKYFKNHTSPDVDLGDISGINASVVNIQKEIDRLNEVAKNLNESLIDLQELGKYEQYIKGGSGYIPEAPRDGQAYVRKDGEWVLLSTFL

SEQ ID NO: 6008 - protein, 1241 aa, Artificial Sequence
  SARS-CoV-2/SARS-CoV-2/Yunnan-01/human/2020/CHN__MT049951.1 spike protein (1-1211)(I712C_T1077C) Foldon construct
MFVFLVLLPLVSSQCVNLTTRTQLPPANTNSFTRGVYYPDKVFRSSVLHSTQDLFLPFFSNVTWFHAIHVSGTNGTKRFDNPVLPFNDGVYFASTEKSNIIRGWIFGTTLDSKTQSLLIVNNATNVVIKVCEFQFCNDPFLGVYYHKNNKSWMESEFRVYSSANNCTFEYVSQPFLMDLEGKQGNFKNLREFVFKNIDGYFKIYSKHTPINLVRDLPQGFSALEPLVDLPIGINITRFQTLLALHRSYLTPGDSSSGWTAGAAAYYVGYLQPRTFLLKYNENGTITDAVDCALDPLSETKCTLKSFTVEKGIYQTSNFRVQPTESIVRFPNITNLCPFGEVFNATRFASVYAWNRKRISNCVADYSVLYNSASFSTFKCYGVSPTKLNDLCFTNVYADSFVIRGDEVRQIAPGQTGKIADYNYKLPDDFTGCVIAWNSNNLDSKVGGNYNYLYRLFRKSNLKPFERDISTEIYQAGSTPCNGVEGFNCYFPLQSYGFQPTNGVGYQPYRVVVLSFELLHAPATVCGPKKSTNLVKNKCVNFNFNGLTGTGVLTESNKKFLPFQQFGRDIADTTDAVRDPQTLEILDITPCSFGGVSVITPGTNTSNQVAVLYQDVNCTEVPVAIHADQLTPTWRVYSTGSNVFQTRAGCLIGAEHVNNSYECDIPIGAGICASYQTQTNSPRRARSVASQSIIAYTMSLGAENSVAYSNNSCAIPTNFTISVTTEILPVSMTKTSVDCTMYICGDSTECSNLLLQYGSFCTQLNRALTGIAVEQDKNTQEVFAQVKQIYKTPPIKDFGGFNFSQILPDPSKPSKRSFIEDLLFNKVTLADAGFIKQYGDCLGDIAARDLICAQKFNGLTVLPPLLTDEMIAQYTSALLAGTITSGWTFGAGAALQIPFAMQMAYRFNGIGVTQNVLYENQKLIANQFNSAIGKIQDSLSSTASALGKLQDVVNQNAQALNTLVKQLSSNFGAISSVLNDILSRLDKVEAEVQIDRLITGRLQSLQTYVTQQLIRAAEIRASANLAATKMSECVLGQSKRVDFCGKGYHLMSFPQSAPHGVVFLHVTYVPAQEKNFTCAPAICHDGKAHFPREGVFVSNGTHWFVTQRNFYEPQIITTDNTFVSGNCDVVIGIVNNTVYDPLQPELDSFKEELDKYFKNHTSPDVDLGDISGINASVVNIQKEIDRLNEVAKNLNESLIDLQELGKYEQYIKGGSGYIPEAPRDGQAYVRKDGEWVLLSTFL

SEQ ID NO: 6009 - protein, 1241 aa, Artificial Sequence
  SARS-CoV-2/USA/WA-UW292/2020__EPI_ISL_418077 spike protein (1-1211)(I712C_T1077C) Foldon construct
MFVFLVLLPLVSSQCVNLTTRTQLPPAYTNSFTRGVYYPDKVFRSSVLHSTQDLFLPFFSNVTWFHAIHVSGTNGTKRFDNPVLPFNDGVYFASTEKSNIIRGWIFGTTLDSKTQSLLIVNNATNVVIKVCEFQFCNDPFLGVYYHKNNKSWMESEFRVYSSANNCTFEYVSQPFLMDLEGKQGNFKNLREFVFKNIDGYFKIYSKHTPINLVRDLPQGFSALEPLVDLPIGINITRFQTLLALHRSYLTPGDSSSGWTAGAAAYYVGYLQPRTFLLKYNENGTITDAVDCALDPLSETKCTLKSFTVEKGIYQTSNFRVQPTESIVRFPNITNLCPFGEVFNATRFASVYAWNRKRISNCVADYSVLYNSASFSTFKCYGVSPTKLNDLCFTNVYADSFVIRGDEVRQIAPGQTGKIADYNYKLPDDFTGCVIAWNSNNLDSKVGGNYNYLYRLFRKSNLKPFERDISTEIYQASSTPCNGVEGFNCYFPLQSYGFQPTNGVGYQPYRVVVLSFELLHAPATVCGPKKSTNLVKNKCVNFNFNGLTGTGVLTESNKKFLPFQQFGRDIADTTDAVRDPQTLEILDITPCSFGGVSVITPGTNTSNQVAVLYQDVNCTEVPVAIHADQLTPTWRVYSTGSNVFQTRAGCLIGAEHVNNSYECDIPIGAGICASYQTQTNSPRRARSVASQSIIAYTMSLGAENSVAYSNNSCAIPTNFTISVTTEILPVSMTKTSVDCTMYICGDSTECSNLLLQYGSFCTQLNRALTGIAVEQDKNTQEVFAQVKQIYKTPPIKDFGGFNFSQILPDPSKPSKRSFIEDLLFNKVTLADAGFIKQYGDCLGDIAARDLICAQKFNGLTVLPPLLTDEMIAQYTSALLAGTITSGWTFGAGAALQIPFAMQMAYRFNGIGVTQNVLYENQKLIANQFNSAIGKIQDSLSSTASALGKLQDVVNQNAQALNTLVKQLSSNFGAISSVLNDILSRLDKVEAEVQIDRLITGRLQSLQTYVTQQLIRAAEIRASANLAATKMSECVLGQSKRVDFCGKGYHLMSFPQSAPHGVVFLHVTYVPAQEKNFTCAPAICHDGKAHFPREGVFVSNGTHWFVTQRNFYEPQIITTDNTFVSGNCDVVIGIVNNTVYDPLQPELDSFKEELDKYFKNHTSPDVDLGDISGINASVVNIQKEIDRLNEVAKNLNESLIDLQELGKYEQYIKGGSGYIPEAPRDGQAYVRKDGEWVLLSTFL

SEQ ID NO: 6010 - protein, 1241 aa, Artificial Sequence
  SARS-CoV-2/Iceland/192/2020__EPI_ISL_417819 spike protein (1-1211)(I712C_T1077C) Foldon construct
MFVFFVLLPLVSSQCVNLTTRTQLPPAYTNSFTRGVYYPDKVFRSSVLHSTQDLFLPFFSNVTWFHAIHVSGTNGTKRFDNPVLPFNDGVYFASTEKSNIIRGWIFGTTLDSKTQSLLIVNNATNVVIKVCEFQFCNDPFLGVYYHKNNKSWMESEFRVYSSANNCTFEYVSQPFLMDLEGKQGNFKNLREFVFKNIDGYFKIYSKHTPINLVRDLPQGFSALEPLVDLPIGINITRFQTLLALHRSYLTPGDSSSGWTAGAAAYYVGYLQPRTFLLKYNENGTITDAVDCALDPLSETKCTLKSFTVEKGIYQTSNFRVQPTESIVRFPNITNLCPFGEVFNATRFASVYAWNRKRISNCVADYSVLYNSASFSTFKCYGVSPTKLNDLCFTNVYADSFVIRGDEVRQIAPGQTGKIADYNYKLPDDFTGCVIAWNSNNLDSKVGGNYNYLYRLFRKSNLKPFERDISTEIYQAGSTPCNGVEGFNCYFPLQSYGFQPTNGVGYQPYRVVVLSFELLHAPATVCGPKKSTNLVKNKCVNFNFNGLTGTGVLTESNKKFLPFQQFGRDIADTTDAVRDPQTLEILDITPCSFGGVSVITPGTNTSNQVAVLYQGVNCTEVPVAIHADQLTPTWRVYSTGSNVFQTRAGCLIGAEHVNNSYECDIPIGAGICASYQTQTNSPRRARSVASQSIIAYTMSLGAENSVAYSNNSCAIPTNFTISVTTEILPVSMTKTSVDCTMYICGDSTECSNLLLQYGSFCTQLNRALTGIAVEQDKNTQEVFAQVKQIYKTPPIKDFGGFNFSQILPDPSKPSKRSFIEDLLFNKVTLADAGFIKQYGDCLGDIAARDLICAQKFNGLTVLPPLLTDEMIAQYTSALLAGTITSGWTFGAGAALQIPFAMQMAYRFNGIGVTQNVLYENQKLIANQFNSAIGKIQDSLSSTASALGKLQDVVNQNAQALNTLVKQLSSNFGAISSVLNDILSRLDKVEAEVQIDRLITGRLQSLQTYVTQQLIRAAEIRASANLAATKMSECVLGQSKRVDFCGKGYHLMSFPQSAPHGVVFLHVTYVPAQEKNFTCAPAICHDGKAHFPREGVFVSNGTHWFVTQRNFYEPQIITTDNTFVSGNCDVVIGIVNNTVYDPLQPELDSFKEELDKYFKNHTSPDVDLGDISGINASVVNIQKEIDRLNEVAKNLNESLIDLQELGKYEQYIKGGSGYIPEAPRDGQAYVRKDGEWVLLSTFL

SEQ ID NO: 6011 - protein, 1241 aa, Artificial Sequence
  SARS-CoV-2/Belgium/ULG-6939/2020__EPI_ISL_417020 spike protein (1-1211)(I712C_T1077C) Foldon construct
MFVFLVLLPLVSSQCVNLTTRTQLPPAYTNSFTRGVYYPDKVFRSSVLHSTQDLFLPFFSNVTWFHAIHVSGTNGTKRFDNPVLPFNDGVYFASTEKSNIIRGWIFGTTLDSKTQSLLIVNNATNVVIKVCEFQFCNDPFLGVYYHKNNKSWMESEFRVYSSANNCTFEYVSQPFLMDLEGKQGNFKNLREFVFKNIDGYFKIYSKHTPINLVRDLPQGFSALEPLVDLPIGINITRFQTLLALHRSYLTPGDSSSGWTAGAAAYYVGYLQPRTFLLKYNENGTITDAVDCALDPLSETKCTLKSFTVEKGIYQTSNFRVQPTESIVRFPNITNLCPFGEVFNATRFASVYAWNRKRISNCVADYSVLYNSASFSTFKCYGVSPTKLNDLCFTNVYADSFVIRGDEVRQIAPGQTGKIADYNYKLPDDFTGCVIAWNSNNLDSKVGGNYNYLYRLFRKSNLKPFERDISTEIYQAGSTPCNGVEGFNCYFPLQSYGFQPTNGVGYQPYRVVVLSFELLHAPATVCGPKKSTNLVKNKCVNFNFNGLTGTGVLTESNKKFLPFQQFGRDIADTTDAVRDPQTLEILDITPCSFGGVSVITPGTNTSNQVAVLYQGVNCTEVPVAIHADQLTPTWRVYSTGSNVFQTRAGCLIGAEHVNNSYECDIPIGAGICASYQTQTNSPRRARSVASQSIIAYTMSLGAENSVVYSNNSCAIPTNFTISVTTEILPVSMTKTSVDCTMYICGDSTECSNLLLQYGSFCTQLNRALTGIAVEQDKNTQEVFAQVKQIYKTPPIKDFGGFNFSQILPDPSKPSKRSFIEDLLFNKVTLADAGFIKQYGDCLGDIAARDLICAQKFNGLTVLPPLLTDEMIAQYTSALLAGTITSGWTFGAGAALQIPFAMQMAYRFNGIGVTQNVLYENQKLIANQFNSAIGKIQDSLSSTASALGKLQDVVNQNAQALNTLVKQLSSNFGAISSVLNDILSRLDKVEAEVQIDRLITGRLQSLQTYVTQQLIRAAEIRASANLAATKMSECVLGQSKRVDFCGKGYHLMSFPQSAPHGVVFLHVTYVPAQEKNFTCAPAICHDGKAHFPREGVFVSNGTHWFVTQRNFYEPQIITTDNTFVSGNCDVVIGIVNNTVYDPLQPELDSFKEELDKYFKNHTSPDVDLGDISGINASVVNIQKEIDRLNEVAKNLNESLIDLQELGKYEQYIKGGSGYIPEAPRDGQAYVRKDGEWVLLSTFL

SEQ ID NO: 6012 - protein, 1241 aa, Artificial Sequence
  SARS-CoV-2/France/HF2496/2020__EPI_ISL_418231 spike protein (1-1211)(I712C_T1077C) Foldon construct
MFVFLVLLPLVSSQCVNLTTRTQLPPAYTNSFTRGVYYPDKVFRSSVLHSTQDLFLPFFSNVTWFHAIHVSGTNGTKRFDNPVLPFNDGVYFASTEKSNIIRGWIFGTTLDSKTQSLLIVNNATNVVIKVCEFQFCNDPFLGVYYHKNNKSWMESEFRVYSSANNCTFEYVSQPFLMDLEGKQGNFKNLREFVFKNIDGYFKIYSKHTPINLVRDLPQGFSALEPLVDLPIGINITRFQTLLALHRSYLTPGDSSSGWTAGAAAYYVGYLQPRTFLLKYNENGTITDAVDCALDPLSETKCTLKSFTVEKGIYQTSNFRVQPTESIVRFPNITNLCPFGEVFNATRFASVYAWNRKRISNCVADYSVLYNSASFSTFKCYGVSPTKLNDLCFTNVYADSFVIRGDEVRQIAPGQTGKIADYNYKLPDDFTGCVIAWNSNNLDSKVGGNYNYLYRLFRKSNLKPFERDISTEIYQAGSTPCNGVEGFNCYFPLQSYGFQPTNGVGYQPYRVVVLSFELLHAPATVCGPKKSTNLVKNKCVNFNFNGLTGTGVLTESNKKFLPFQQFGRDIADTTDAVRDPQTLEILDITPCSFGGVSVITPGTNTSNQVAVLYQGVNCTEVPVAIHADQLTPTWRVYSTGSNVFQTRAGCLIGAEHVNNSYECDIPIGAGICASYQTQTNSPRRARSVASQSIIAYTMSLGAENSVAYSNNSCAIPTNFTISVTTEILPVSMTKTSVDCTMYICGDSTECSNLLLQYGSFCTQLNRALTGIAVEQDKNTQEVFAQVKQIYKTPPIKDFGGFNFSQILPDPSKPSKRSFIEDLLFNKVTLADAGFIKQYGDCLGDIVARDLICAQKFNGLTVLPPLLTDEMIAQYTSALLAGTITSGWTFGAGAALQIPFAMQMAYRFNGIGVTQNVLYENQKLIANQFNSAIGKIQDSLSSTASALGKLQDVVNQNAQALNTLVKQLSSNFGAISSVLNDILSRLDKVEAEVQIDRLITGRLQSLQTYVTQQLIRAAEIRASANLAATKMSECVLGQSKRVDFCGKGYHLMSFPQSAPHGVVFLHVTYVPAQEKNFTCAPAICHDGKAHFPREGVFVSNGTHWFVTQRNFYEPQIITTDNTFVSGNCDVVIGIVNNTVYDPLQPELDSFKEELDKYFKNHTSPDVDLGDISGINASVVNIQKEIDRLNEVAKNLNESLIDLQELGKYEQYIKGGSGYIPEAPRDGQAYVRKDGEWVLLSTFL

SEQ ID NO: 6013 - protein, 1241 aa, Artificial Sequence
  SARS-CoV-2/USA/WA-UW291/2020__EPI_ISL_418076 spike protein (1-1211)(I712C_T1077C) Foldon construct
MFVFLVLLPLVSSQCVNLTTRTQLPPAYTNSFTRGVYYPDKVFRSSVLHSTQDLFLPFFSNVTWFHAIHVSGTNGTKRFDNPVLPFNDGVYFASTEKSNIIRGWIFGTTLDSKTQSLLIVNNATNVVIKVCEFQFCNDPFLGVYYHKNNKSWMESEFRVYSSANNCTFEYVSQPFLMDLEGKQGNFKNLREFVFKNIDGYFKIYSKHTPINLVRDLPQGFSALEPLVDLPIGINITRFQTLLALHRSYLTPGDSSSGWTAGAAAYYVGYLQPRTFLLKYNENGTITDAVDCALDPLSETKCTLKSFTVEKGIYQTSNFRVQPTESIVRFPNITNLCPFGEVFNATRFASVYAWNRKRISNCVADYSVLYNSASFSTFKCYGVSPTKLNDLCFTNVYADSFVIRGDEVRQIAPGQTGKIADYNYKLPDDFTGCVIAWNSNNLDSKVGGNYNYLYRLFRKSNLKPFERDISTEIYQAGSTPCNGVEGFNCYFPLQSYGFQPTNGVGYQPYRVVVLSFELLHAPATVCGPKKSTNLVKNKCVNFNFNGLTGTGVLTESNKKFLPFQQFGRDIADTTDAVRDPQTLEILDITPCSFGGVSVITPGTNTSNQVAVLYQGVNCTEVPVAIHADQLTPTWRVYSTGSNVFQTRAGCLIGAEHVNNSYECDIPIGAGICASYQTQTNSPRRARSVASQSIIAYTMSLGAENSVAYSNNSCAIPTNFTISVTTEILPVSMTKTSVDCTMYICGDSTECSNLLLQYGSFCTQLNRALTGIAVEQDKNTQEVFAQVKQIYKTPPIKDFGGFNFSQILPDPSKPSKRSFIEDLLFNKVTLADAGFIKQYGDCLGDIAARDLICAQKFNGLTVLPPLLTDEMIAQYTSALLAGTITSGWTFGAGAALQIPFAMQMAYRFNGIGVTQNVLYENQKLIANQFNSAIGKIQYSLSSTASALGKLQDVVNQNAQALNTLVKQLSSNFGAISSVLNDILSRLDKVEAEVQIDRLITGRLQSLQTYVTQQLIRAAEIRASANLAATKMSECVLGQSKRVDFCGKGYHLMSFPQSAPHGVVFLHVTYVPAQEKNFTCAPAICHDGKAHFPREGVFVSNGTHWFVTQRNFYEPQIITTDNTFVSGNCDVVIGIVNNTVYDPLQPELDSFKEELDKYFKNHTSPDVDLGDISGINASVVNIQKEIDRLNEVAKNLNESLIDLQELGKYEQYIKGGSGYIPEAPRDGQAYVRKDGEWVLLSTFL

SEQ ID NO: 6014 - protein, 1241 aa, Artificial Sequence; identical to SEQ ID NO: 5977
  SARS-CoV-2/Portugal/PT0034/2020__EPI_ISL_418019 spike protein (1-1211)(I712C_T1077C) Foldon construct

SEQ ID NO: 6015 - protein, 1241 aa, Artificial Sequence
  SARS-CoV-2/Iceland/202/2020__EPI_ISL_417750 spike protein (1-1211)(I712C_T1077C) Foldon construct
MFVFLVLLPLVSSQCVNLTTRTQLPPAYTNSFTRGVYYPDKVFRSSVLHSTQDLFLPFFSNVTWFHAIHVSGTNGTKRFDNPVLPFNDGVYFASTEKSNIIRGWIFGTTLDSKTQSLLIVNNATNVVIKVCEFQFCNDPFLGVYYHKNNKSWMESEFRVYSSANNCTFEYVSQPFLMDLEGKQGNFKNLREFVFKNIDGYFKIYSKHTPINLVRDLPQGFSALEPLVDLPIGINITRFQTLLALHRSYLTPGDSSSGWTAGAAAYYVGYLQPRTFLLKYNENGTITDAVDCALDPLSETKCTLKSFTVEKGIYQTSNFRVQPTESIVRFPNITNLCPFGEVFNATRFASVYAWNRKRISNCVADYSVLYNSASFSTFKCYGVSPTKLNDLCFTNVYADSFVIRGDEVRQIAPGQTGKIADYNYKLPDDFTGCVIAWNSNNLDSKVGGNYNYLYRLFRKSNLKPFERDISTEIYQAGSTPCNGVEGFNCYFPLQSYGFQPTNGVGYQPYRVVVLSFELLHAPATVCGPKKSTNLVKNKCVNFNFNGLTGTGVLTESNKKFLPFQQFGRDIADTTDAVRDPQTLEILDITPCSFGGVSVITPGTNTSNQVAVLYQDVNCTEVPVAIHADQLTPTWRVYSTGSNVFQTRAGCLIGAEHVNNSYECDIPIGAGICASYQTQTNSPRRARSVASQSIIAYTMSLGAENSVAYSNNSCAIPTNFTISVTTEILPVSMTKTSVDCTMYICGDSTECSNLLLQYGSFCTQLNRALTGIAVEQDKNTQEVFAQVKQIYKTPPIKDFGGFNFSQILPDPSKPSKRSFIEDLLFNKVTLADAGFIKQYGDCLGDIAARDLICAQKFNGLTVLPPLLTDEMIAQYTSALLAGTITSGWTFGAGAALQIPFAMQMAYRFNGIGVTQNVLYENQKLIANQFNSAIGKIQDSLSSTASALGKLQDVVNQNAQALNTLVKQLSSNFGAISSVLNDILSRLDKVEAEVQIDRLITGRLQSLQTYVTQQLIRAAEIRASANLAATKMSECVLGQSKRVDFCGKGYHLMSFPQSAPHGVVFLHVTYVPAQEKNFTCAPAICHDGKAHFPREGVFVSNGTHWFVTQRNFYEPQIITTDNTFVSGNCDVVIGIVNNTVYDPLQPELDSFKEELDKYFKNHTSPDVDLGDIPGINASVVNIQKEIDRLNEVAKNLNESLIDLQELGKYEQYIKGGSGYIPEAPRDGQAYVRKDGEWVLLSTFL

SEQ ID NO: 6016 - protein, 1241 aa, Artificial Sequence
  SARS-CoV-2/USA/WA-UW261/2020__EPI_ISL_418046 spike protein (1-1211)(I712C_T1077C) Foldon construct
MFVFLVLLPLVSSQCVNLTTRTQLPPAYTNSFTRGVYYPDKVFRSSVLHSTQDLFLPFFSNVTWFHAIHVSGTNGTKRFDNPVLPFNDGVYFASTEKSNIIRGWIFGTTLDSKTQSLLIVNNATNVVIKVCEFQFCNDPFLGVYYHKNNKSWMESEFRVYSSANNCTFEYVSQPFLMDLEGKQGNFKNLREFVFKNIDGYFKIYSKHTPINLVRDLPQGFSALEPLVDLPIGINITRFQTLLALHRSYLTPGDSSSGWTAGAAAYYVGYLQPRTFLLKYNENGTITDAVDCALDPLSETKCTLKSFTVEKGIYQTSNFRVQPTESIVRFPNITNLCPFGEVFNATRFTSVYAWNRKRISNCVADYSVLYNSASFSTFKCYGVSPTKLNDLCFTNVYADSFVIRGDEVRQIAPGQTGKIADYNYKLPDDFTGCVIAWNSNNLDSKVGGNYNYLYRLFRKSNLKPFERDISTEIYQAGSTPCNGVEGFNCYFPLQSYGFQPTNGVGYQPYRVVVLSFELLHAPATVCGPKKSTNLVKNKCVNFNFNGLTGTGVLTESNKKFLPFQQFGRDIADTTDAVRDPQTLEILDITPCSFGGVSVITPGTNTSNQVAVLYQDVNCTEVPVAIHADQLTPTWRVYSTGSNVFQTRAGCLIGAEHVNNSYECDIPIGAGICASYQTQTNSPRRARSVASQSIIAYTMSLGAENSVAYSNNSCAIPTNFTISVTTEILPVSMTKTSVDCTMYICGDSTECSNLLLQYGSFCTQLNRALTGIAVEQDKNTQEVFAQVKQIYKTPPIKDFGGFNFSQILPDPSKPSKRSFIEDLLFNKVTLADAGFIKQYGDCLGDIAARDLICAQKFNGLTVLPPLLTDEMIAQYTSALLAGTITSGWTFGAGAALQIPFAMQMAYRFNGIGVTQNVLYENQKLIANQFNSAIGKIQDSLSSTASALGKLQDVVNQNAQALNTLVKQLSSNFGAISSVLNDILSRLDKVEAEVQIDRLITGRLQSLQTYVTQQLIRAAEIRASANLAATKMSECVLGQSKRVDFCGKGYHLMSFPQSAPHGVVFLHVTYVPAQEKNFTCAPAICHDGKAHFPREGVFVSNGTHWFVTQRNFYEPQIITTDNTFVSGNCDVVIGIVNNTVYDPLQPELDSFKEELDKYFKNHTSPDVDLGDISGINASVVNIQKEIDRLNEVAKNLNESLIDLQELGKYEQYIKGGSGYIPEAPRDGQAYVRKDGEWVLLSTFL

SEQ ID NO: 6017 - protein, 1241 aa, Artificial Sequence
  SARS-CoV-2/Portugal/PT0035/2020__EPI_ISL_418020 spike protein (1-1211)(I712C_T1077C) Foldon construct
MFVFLVLLPLVSSQCVNLTTRTQLPPAYTNSFTRGVYYPDKVFRSSVLHSTQDLFLPFFSNVTWFHAIHVSGTNGTKRFDNPVLPFNDGVYFASTEKSNIIRGWIFGTTLDSKTQSLLIVNNATNVVIKVCEFQFCNDPFLGVYYHKNNKSWMESEFRVYSSANNCTFEYVSQPFLMDLEGKQGNFKNLREFVFKNIDGYFKIYSKHTPINLVRDLPQGFSALEPLVDLPIGINITRFQTLLALHRSYLTPGDSSSGWTAGAAAYYVGYLQPRTFLLKYNENGTITDAVDCALDPLSETKCTLKSFTVEKGIYQTSNFRVQPTESIVRFPNITNLCPFGEVFNATRFASVYAWNRKRISNCVADYSVLYNSASFSTFKCYGVSPTKLNDLCFTNVYADSFVIRGDEVRQIAPGQTGKIADYNYKLPDDFTGCVIAWNSNNLDSKVGGNYNYLYRLFRKSNLKPFERDISTEIYQAGSTPCNGVEGFNCYFPLQSYGFQPTNGVGYQPYRVVVLSFELLHAPATVCGPKKSTNLVKNKCVNFNFNGLTGTGVLTESNKKFLPFQQFGRDIADTTDAVRDPQTLEILDITPCSFGGVSVITPGTNTSNQVAVLYQDVNCTEVPVAIHADQLTPTWRVYSTGSNVFQTRAGCLIGAEHVNNSYECDIPIGAGICASYQTQTNSPRRARSVASQSIIAYTMSLGAENSVAYSNNSCAIPTNFTISVTTEILPVSMTKTSVDCTMYICGDSTECSNLLLQYGSFCTQLNRALTGIAVEQDKNTQEVFAQVKQIYKTPPIKDFGGFNFSQILPDPSKPSKRSFIEDLLFNKVTLADAGFIKQYGDCLGDISARDLICAQKFNGLTVLPPLLTDEMIAQYTSALLAGTITSGWTFGAGAALQIPFAMQMAYRFNGIGVTQNVLYENQKLIANQFNSAIGKIQDSLSSTASALGKLQDVVNQNAQALNTLVKQLSSNFGAISSVLNDILSRLDKVEAEVQIDRLITGRLQSLQTYVTQQLIRAAEIRASANLAATKMSECVLGQSKRVDFCGKGYHLMSFPQSAPHGVVFLHVTYVPAQEKNFTCAPAICHDGKAHFPREGVFVSNGTHWFVTQRNFYEPQIITTDNTFVSGNCDVVIGIVNNTVYDPLQPELDSFKEELDKYFKNHTSPDVDLGDISGINASVVNIQKEIDRLNEVAKNLNESLIDLQELGKYEQYIKGGSGYIPEAPRDGQAYVRKDGEWVLLSTFL

SEQ ID NO: 6018 - protein, 1241 aa, Artificial Sequence
  SARS-CoV-2/USA/NY-NYUMC7/2020__EPI_ISL_418192 spike protein (1-1211)(I712C_T1077C) Foldon construct
MFVFLVLLPLVSSQCVNLTTRTQLPPAYTNSFTRGVYYPDKVFRSSVLHSTQDLFLPFFSNVTWFHAIHVSGTNGTKRFDNPVLPFNDGVYFASTEKSNIIRGWIFGTTLDSKTQSLLIVNNATNVVIKVCEFQFCNDPFLGVYHHKNNKSWMESEFRVYSSANNCTFEYVSQPFLMDLEGKQGNFKNLREFVFKNIDGYFKIYSKHTPINLVRDLPQGFSALEPLVDLPIGINITRFQTLLALHRSYLTPGDSSSGWTAGAAAYYVGYLQPRTFLLKYNENGTITDAVDCALDPLSETKCTLKSFTVEKGIYQTSNFRVQPTESIVRFPNITNLCPFGEVFNATRFASVYAWNRKRISNCVADYSVLYNSASFSTFKCYGVSPTKLNDLCFTNVYADSFVIRGDEVRQIAPGQTGKIADYNYKLPDDFTGCVIAWNSNNLDSKVGGNYNYLYRLFRKSNLKPFERDISTEIYQAGSTPCNGVEGFNCYFPLQSYGFQPTNGVGYQPYRVVVLSFELLHAPATVCGPKKSTNLVKNKCVNFNFNGLTGTGVLTESNKKFLPFQQFGRDIADTTDAVRDPQTLEILDITPCSFGGVSVITPGTNTSNQVAVLYQGVNCTEVPVAIHADQLTPTWRVYSTGSNVFQTRAGCLIGAEHVNNSYECDIPIGAGICASYQTQTNSPRRARSVASQSIIAYTMSLGAENSVAYSNNSCAIPTNFTISVTTEILPVSMTKTSVDCTMYICGDSTECSNLLLQYGSFCTQLNRALTGIAVEQDKNTQEVFAQVKQIYKTPPIKDFGGFNFSQILPDPSKPSKRSFIEDLLFNKVTLADAGFIKQYGDCLGDIAARDLICAQKFNGLTVLPPLLTDEMIAQYTSALLAGTITSGWTFGAGAALQIPFAMQMAYRFNGIGVTQNVLYENQKLIANQFNSAIGKIQDSLSSTASALGKLQDVVNQNAQALNTLVKQLSSNFGAISSVLNDILSRLDKVEAEVQIDRLITGRLQSLQTYVTQQLIRAAEIRASANLAATKMSECVLGQSKRVDFCGKGYHLMSFPQSAPHGVVFLHVTYVPAQEKNFTCAPAICHDGKAHFPREGVFVSNGTHWFVTQRNFYEPQIITTDNTFVSGNCDVVIGIVNNTVYDPLQPELDSFKEELDKYFKNHTSPDVDLGDISGINASVVNIQKEIDRLNEVAKNLNESLIDLQELGKYEQYIKGGSGYIPEAPRDGQAYVRKDGEWVLLSTFL

SEQ ID NO: 6019 - protein, 1241 aa, Artificial Sequence
  SARS-CoV-2/Iceland/189/2020__EPI_ISL_417709 spike protein (1-1211)(I712C_T1077C) Foldon construct
MFVFLVLLPLVSSQCVNLTTRTQLPPAYTNSFTRGVYYPDKVFRSSVLHSTQDLFLPFFSNVTWFHAIHVSGTNGTKRFDNPVLPFNDGVYFASTEKSNIIRGWIFGTTLDSKTQSLLIVNNATNVVIKVCEFQFCNDPFLGVYYHKNNKSWMESEFRVYSSANNCTFEYVSQPFLMDLEGKQGNFKNLREFVFKNIDGYFKIYSKHTPINLVRDLPQGFSALEPLVDLPIGINITRFQTLLALHRSYLTPGDSSSGWTAGAAAYYVGYLQPRTFLLKYNENGTITDAVDCALDPLSETKCTLKSFTVEKGIYQTSNFRVQPTESIVRFPNITNLCPFGEVFNATRFASVYAWNRKRISNCVADYSVLYNSASFSTFKCYGVSPTKLNDLCFTNVYADSFVIRGDEVRQIAPGQTGKIADYNYKLPDDFTGCVIAWNSNNLDSKVGGNYNYLYRLFRKSNLKPFERDISTEIYQAGSTPCNGVEGFNCYFPLQSYGFQPTNGVGYQPYRVVVLSFELLHAPATVCGPKKSTNLVKNKCVNFNFNGLTGTGVLTESNKKFLPFQQFGRDIADTTDAVRDPQTLEILDITPCSFGGVSVITPGTNTSNQVAVLYQGVNCTEVPVAIHADQLTPTWRVYSTGSNVFQTRAGCLIGAEHVNNSYECDIPIGAGICASYQTQTNSPRRARSVASQSIIAYTMSLGAENSVAYSNNSCAIPTNFTISVTTEILPVSMTKTSVDCTMYICGDSTECSNLLLQYGSFCTQLNRALTGIAVEQDKNTQEVFAQVKQIYKTPPIKDFGGFNFSQILPDPSKPSKRSFIEDLLFNKVTLADAGFTKQYGDCLGDIAARDLICAQKFNGLTVLPPLLTDEMIAQYTSALLAGTITSGWTFGAGAALQIPFAMQMAYRFNGIGVTQNVLYENQKLIANQFNSAIGKIQDSLSSTASALGKLQDVVNQNAQALNTLVKQLSSNFGAISSVLNDILSRLDKVEAEVQIDRLITGRLQSLQTYVTQQLIRAAEIRASANLAATKMSECVLGQSKRVDFCGKGYHLMSFPQSAPHGVVFLHVTYVPAQEKNFTCAPAICHDGKAHFPREGVFVSNGTHWFVTQRNFYEPQIITTDNTFVSGNCDVVIGIVNNTVYDPLQPELDSFKEELDKYFKNHTSPDVDLGDISGINASVVNIQKEIDRLNEVAKNLNESLIDLQELGKYEQYIKGGSGYIPEAPRDGQAYVRKDGEWVLLSTFL

SEQ ID NO: 6020 - protein, 1241 aa, Artificial Sequence
  SARS-CoV-2/Australia/NSW56/2020__EPI_ISL_417408 spike protein (1-1211)(I712C_T1077C) Foldon construct
MFVFLVLLPLVSSQCVNLTTRTQLPPAYTNSFTRGVYYPDKVFRSSVLHSTQDLFLPFFSNVTWFHAIHVSGTNGTKRFDNPVLPFNDGVYFASTEKSNIIRGWIFGTTLDSKTQSLLIVNNATNVVIKVCEFQFCNDPFLGVYYHKNNKSWMESEFRVYSSANNCTFEYVSQPFLMDLEGKQGNFKNLREFVFKNIDGYFKIYSKHTPINLVRDLPQGFSALEPLVDLPIGINITRFQTLLALHRSYLTPGDSSSGWTAGAAAYYVGYLQPRTFLLKYNENGTITDAVDCALDPLSETKCTLKSFTVEKGIYQTSNFRVQPTESIVRFPNITNLCPFGEVFNATRFASVYAWNRKRISNCVADYSVLYNSASFSTFKCYGVSPTKLNDLCFTNVYADSFVIRGDEVRQIAPGQTGKIADYNYKLPDDFTGCVIAWNSNNLDSKVGGNYNYLYRLFRKSNLKPFERDISTEIYQAGSTPCNGVEGFNCYFPLQSYGFQPTNGVGYQPYRVVVLSFELLHAPATVCGPKKSTNLVKNKCVNFNFNGLTGTGVLTESNKKFLPFQQFGRDIADTTDAVRDPQTLEILDITPCSFGGVSVITPGTNTSNQVAVLYQDVNCTEVPVAIHADQLTPTWRVYSTGSNVFQTRAGCLIGAEHVNNSYECDIPIGAGICASYQTQTNSPRRARSVASQSIIAYTMSLGAENSVAYSNNSCAIPTNFTISVTTEILPVSMTKTSVDCTMYICGDSTECSNLLLQYGSFCTQLNRALTGIAVEQDKNTQEVFAQVKQIYKTPPIKDFGGFNFSQILPDSSKPSKRSFIEDLLFNKVTLADAGFIKQYGDCLGDIAARDLICAQKFNGLTVLPPLLTDEMIAQYTSALLAGTITSGWTFGAGAALQIPFAMQMAYRFNGIGVTQNVLYENQKLIANQFNSAIGKIQDSLSSTASALGKLQDVVNQNAQALNTLVKQLSSNFGAISSVLNDILSRLDKVEAEVQIDRLITGRLQSLQTYVTQQLIRAAEIRASANLAATKMSECVLGQSKRVDFCGKGYHLMSFPQSAPHGVVFLHVTYVPAQEKNFTCAPAICHDGKAHFPREGVFVSNGTHWFVTQRNFYEPQIITTDNTFVSGNCDVVIGIVNNTVYDPLQPELDSFKEELDKYFKNHTSPDVDLGDISGINASVVNIQKEIDRLNEVAKNLNESLIDLQELGKYEQYIKGGSGYIPEAPRDGQAYVRKDGEWVLLSTFL

SEQ ID NO: 6021 - protein, 1241 aa, Artificial Sequence
  SARS-CoV-2/Iceland/280/2020__EPI_ISL_417608 spike protein (1-1211)(I712C_T1077C) Foldon construct
MFVFLVLLPLVSSQCVNLTTRTQLPPAYTNSFTRGVYYPDKVFRSSVLHSTQDLFLPFFSNVTWFHAIHVSGTNGTKRFDNPVLPFNDGVYFASTEKSNIIRGWIFGTTLDSKTQSLLIVNNATNVVIKVCEFQFCNDPFLGVYYHKNNKSWMESEFRVYSSANNCTFEYVSQPFLMDLEGKQGNFKNLREFVFKNIDGYFKIYSKHTPINLVRDLPQGFSALEPLVDLPIGINITRFQTLLALHRSYLTPGDSSSGWTAGAAAYYVGYLQPRTFLLKYNENGTITDAVDCALDPLSETKCTLKSFTVEKGIYQTSNFRVQPTESIVRFPNITNLCPFGEVFNATRFASVYAWNRKRISNCVADYSVLYNSASFSTFKCYGVSPTKLNDLCFTNVYADSFVIRGDEVRQIAPGQTGKIADYNYKLPDDFTGCVIAWNSNNLDSKVGGNYNYLYRLFRKSNLKPFERDISTEIYQAGSTPCNGVEGFNCYFPLQSYGFQPTNGVGYQPYRVVVLSFELLHAPATVCGPKKSTNLVKNKCVNFNFNGLTGTGVLTESNKKFLPFQQFGRDIADTTDAVRDPQTLEILDITPCSFGGVSVITPGTNTSNQVAVLYQGVNCTEVPVAIHADQLTPTWRVYSTGSNVFQTRAGCLIGAEHVNNSYECDIPIGAGICASYHTQTNSPRRARSVASQSIIAYTMSLGAENSVAYSNNSCAIPTNFTISVTTEILPVSMTKTSVDCTMYICGDSTECSNLLLQYGSFCTQLNRALTGIAVEQDKNTQEVFAQVKQIYKTPPIKDFGGFNFSQILPDPSKPSKRSFIEDLLFNKVTLADAGFIKQYGDCLGDIAARDLICAQKFNGLTVLPPLLTDEMIAQYTSALLAGTITSGWTFGAGAALQIPFAMQMAYRFNGIGVTQNVLYENQKLIANQFNSAIGKIQDSLSSTASALGKLQDVVNQNAQALNTLVKQLSSNFGAISSVLNDILSRLDKVEAEVQIDRLITGRLQSLQTYVTQQLIRAAEIRASANLAATKMSECVLGQSKRVDFCGKGYHLMSFPQSAPHGVVFLHVTYVPAQEKNFTCAPAICHDGKAHFPREGVFVSNGTHWFVTQRNFYEPQIITTDNTFVSGNCDVVIGIVNNTVYDPLQPELDSFKEELDKYFKNHTSPDVDLGDISGINASVVNIQKEIDRLNEVAKNLNESLIDLQELGKYEQYIKGGSGYIPEAPRDGQAYVRKDGEWVLLSTFL

SEQ ID NO: 6022 - protein, 1241 aa, Artificial Sequence; identical to SEQ ID NO: 5977
  SARS-CoV-2/Iceland/247/2020__EPI_ISL_417575 spike protein (1-1211)(I712C_T1077C) Foldon construct

SEQ ID NO: 6023 - protein, 1241 aa, Artificial Sequence
  SARS-CoV-2/Iceland/238/2020__EPI_ISL_417566 spike protein (1-1211)(I712C_T1077C) Foldon construct
MFVFLVLLPLVSSQCVNLTTRTQLPPAYTNSFTRGVYYPDKVFRSSVLHSTQDLFLPFFSNVTWFHAIHVSGTNGTKRFDNPVLPFNDGVYFASTEKSNIIRGWIFGTTLDSKTQSLLIVNNATNVVIKVCEFQFCNDPFLGVYYHKNNKSWMESEFRVYSSANNCTFEYVSQPFLMDLEGKQGNFKNLREFVFKNIDGYFKIYSKHTPINLVRDLPQGFSALEPLVDLPIGINITRFQTLLALHRSYLTPGDSSSGWTAGAAAYYVGYLQPRTFLLKYNENGTITDAVDCALDPLSETKCTLKSFTVEKGIYQTSNFRVQPTESIVRFPNITNLCPFGEVFNATRFASVYAWNRKRISNCVADYSVLYNSASFSTFKCYGVSPTKLNDLCFTNVYADSFVIRGDEVRQIAPGQTGKIADYNYKLPDDFTGCVIAWNSNNLDSKVGGNYNYLYRLFRKSNLKPFERDISTEIYQAGSTPCNGVEGFNCYFPLQSYGFQPTNGVGYQPYRVVVLSFELLHAPATVCGPKKSTNLVKNKCVNFNFNGLTGTGVLTESNKKFLPFQQFGRDIADTTDAVRDPQTLEILDITPCSFGGVSVITPGTNTSNQVAVLYQGVNCTEVPVAIHADQLTPTWRVYSTGSNVFQTRAGCLIGAEHVNNSYECDIPIGAGICASYQTQTNSPRRARSVASQSIIAYTMSLGAENSVAYSNNSCAIPTNFTISVTTEILPVSMTKTSVDCTMYICGDSTECSNLLLQYGSFCTQLNRALTGIAVEQDKNTQEVFAQVKQIYKTPPIKDFGGFNFSQILPDPSKPSKRSFIEDLLFNKVTLADVGFIKQYGDCLGDIAARDLICAQKFNGLTVLPPLLTDEMIAQYTSALLAGTITSGWTFGAGAALQIPFAMQMAYRFNGIGVTQNVLYENQKLIANQFNSAIGKIQDSLSSTASALGKLQDVVNQNAQALNTLVKQLSSNFGAISSVLNDILSRLDKVEAEVQIDRLITGRLQSLQTYVTQQLIRAAEIRASANLAATKMSECVLGQSKRVDFCGKGYHLMSFPQSAPHGVVFLHVTYVPAQEKNFTCAPAICHDGKAHFPREGVFVSNGTHWFVTQRNFYEPQIITTDNTFVSGNCDVVIGIVNNTVYDPLQPELDSFKEELDKYFKNHTSPDVDLGDISGINASVVNIQKEIDRLNEVAKNLNESLIDLQELGKYEQYIKGGSGYIPEAPRDGQAYVRKDGEWVLLSTFL

SEQ ID NO: 6024 - protein, 1241 aa, Artificial Sequence
  SARS-CoV-2/Greece/16/2020__EPI_ISL_418265 spike protein (1-1211)(I712C_T1077C) Foldon construct
MFVFLVLLPLVSSQCVNLTTRTQLPPAYTNSFTRGVYYPDKVFRSSVLHSTQDLFLPFFSNVTWFHAIHVSGTNGTKRFDNPVLPFNDGVYFASTEKSNIIRGWIFGTTLDSKTQSLLIVNNATNVVIKVCEFQFCNDPFLGVYYHKNNKSWMESEFRVYSSANNCTFEYVSQPFLMDLEGKQGNFKNLREFVFKNVDGYFKIYSKHTPINLVRDLPQGFSALEPLVDLPIGINITRFQTLLALHRSYLTPGDSSSGWTAGAAAYYVGYLQPRTFLLKYNENGTITDAVDCALDPLSETKCTLKSFTVEKGIYQTSNFRVQPTESIVRFPNITNLCPFGEVFNATRFASVYAWNRKRISNCVADYSVLYNSASFSTFKCYGVSPTKLNDLCFTNVYADSFVIRGDEVRQIAPGQTGKIADYNYKLPDDFTGCVIAWNSNNLDSKVGGNYNYLYRLFRKSNLKPFERDISTEIYQAGSTPCNGVEGFNCYFPLQSYGFQPTNGVGYQPYRVVVLSFELLHAPATVCGPKKSTNLVKNKCVNFNFNGLTGTGVLTESNKKFLPFQQFGRDIADTTDAVRDPQTLEILDITPCSFGGVSVITPGTNTSNQVAVLYQDVNCTEVPVAIHADQLTPTWRVYSTGSNVFQTRAGCLIGAEHVNNSYECDIPIGAGICASYQTQTNSPRRARSVASQSIIAYTMSLGAENSVAYSNNSCAIPTNFTISVTTEILPVSMTKTSVDCTMYICGDSTECSNLLLQYGSFCTQLNRALTGIAVEQDKNTQEVFAQVKQIYKTPPIKDFGGFNFSQILPDPSKPSKRSFIEDLLFNKVTLADAGFIKQYGDCLGDIAARDLICAQKFNGLTVLPPLLTDEMIAQYTSALLAGTITSGWTFGAGAALQIPFAMQMAYRFNGIGVTQNVLYENQKLIANQFNSAIGKIQDSLSSTASALGKLQDVVNQNAQALNTLVKQLSSNFGAISSVLNDILSRLDKVEAEVQIDRLITGRLQSLQTYVTQQLIRAAEIRASANLAATKMSECVLGQSKRVDFCGKGYHLMSFPQSAPHGVVFLHVTYVPAQEKNFTCAPAICHDGKAHFPREGVFVSNGTHWFVTQRNFYEPQIITTDNTFVSGNCDVVIGIVNNTVYDPLQPELDSFKEELDKYFKNHTSPDVDLGDISGINASVVNIQKEIDRLNEVAKNLNESLIDLQELGKYEQYIKGGSGYIPEAPRDGQAYVRKDGEWVLLSTFL

SEQ ID NO: 6025 - protein, 1241 aa, Artificial Sequence
  SARS-CoV-2/Iceland/319/2020__EPI_ISL_417648 spike protein (1-1211)(I712C_T1077C) Foldon construct
MFVFLVLLPLVSSQCVNLTTRTQLPPAYTNSFTRGVYYPDKVFRSSVLHSTQDLFLPFFSNVTWFHAIHVSGTNGTKRFDNPVLPFNDGVYFASTEKSNIIRGWIFGTTLDSKTQSLLIVNNATNVVIKVCEFQFCNDPFLGVYYHKNNKSWMESEFRVYSSANNCTFEYVSQPFLIDLEGKQGNFKNLREFVFKNIDGYFKIYSKHTPINLVRDLPQGFSALEPLVDLPIGINITRFQTLLALHRSYLTPGDSSSGWTAGAAAYYVGYLQPRTFLLKYNENGTITDAVDCALDPLSETKCTLKSFTVEKGIYQTSNFRVQPTESIVRFPNITNLCPFGEVFNATRFASVYAWNRKRISNCVADYSVLYNSASFSTFKCYGVSPTKLNDLCFTNVYADSFVIRGDEVRQIAPGQTGKIADYNYKLPDDFTGCVIAWNSNNLDSKVGGNYNYLYRLFRKSNLKPFERDISTEIYQAGSTPCNGVEGFNCYFPLQSYGFQPTNGVGYQPYRVVVLSFELLHAPATVCGPKKSTNLVKNKCVNFNFNGLTGTGVLTESNKKFLPFQQFGRDIADTTDAVRDPQTLEILDITPCSFGGVSVITPGTNTSNQVAVLYQGVNCTEVPVAIHADQLTPTWRVYSTGSNVFQTRAGCLIGAEHVNNSYECDIPIGAGICASYQTQTNSPRRARSVASQSIIAYTMSLGAENSVAYSNNSCAIPTNFTISVTTEILPVSMTKTSVDCTMYICGDSTECSNLLLQYGSFCTQLNRALTGIAVEQDKNTQEVFAQVKQIYKTPPIKDFGGFNFSQILPDPSKPSKRSFIEDLLFNKVTLADAGFIKQYGDCLGDIAARDLICAQKFNGLTVLPPLLTDEMIAQYTSALLAGTITSGWTFGAGAALQIPFAMQMAYRFNGIGVTQNVLYENQKLIANQFNSAIGKIQDSLSSTASALGKLQDVVNQNAQALNTLVKQLSSNFGAISSVLNDILSRLDKVEAEVQIDRLITGRLQSLQTYVTQQLIRAAEIRASANLAATKMSECVLGQSKRVDFCGKGYHLMSFPQSAPHGVVFLHVTYVPAQEKNFTCAPAICHDGKAHFPREGVFVSNGTHWFVTQRNFYEPQIITTDNTFVSGNCDVVIGIVNNTVYDPLQPELDSFKEELDKYFKNHTSPDVDLGDISGINASVVNIQKEIDRLNEVAKNLNESLIDLQELGKYEQYIKGGSGYIPEAPRDGQAYVRKDGEWVLLSTFL

SEQ ID NO: 6026 - protein, 1241 aa, Artificial Sequence
  SARS-CoV-2/Congo/94/2020__EPI_ISL_417947 spike protein (1-1211)(I712C_T1077C) Foldon construct
MFVFLVLLPLVSSQCVNLTTRTQLPPAYTNSFTRGVYYPDKVFRSSVLHSTQDLFLPFFSNVTWFHAIHVSGTNGTKRFDNPVLPFNDGVYFASTEKSNIIRGWIFGTTLDSKTQSLLIVNNATNVVIKVCEFQFCNDPFLGVYYHKNNKSWMESEFRVYSSANNCTFEYVSQPFLMDLEGKQGNFKNLREFVFKNIDGYFKIYSKHTPINLVRDLPQGFSALEPLVDLPIGINITRFQTLLALHRSYLTPGDSSSGWTAGAAAYYVGYLQPRTFLLKYNENGTITDAVDCALDPLSETKCTLKSFTVEKGIYQTSNFRVQPTESIVRFPNITNLCPFGEVFNATRFASVYAWNRKRISNCVADYSVLYNSASFSTFKCYGVSPTKLNDLCFTNVYADSFVIRGDEVRQIAPGQTGKIADYNYKLPDDFTGCVIAWNSNNLDSKVGGNYNYLYRLFRKSNLKPFERDISTEIYQAGSTPCNGVEGFNCYFPLQSYGFQPTNGVGYQPYRVVVLSFELLHAPATVCGPKKSTNLVKNKCVNFNFNGLTGTGVLTESNKKFLPFQQFGRDIADTTDAVRDPQTLEILDITPCSFGGVSVITPGTNTSNQVAVLYQGVNCTEVPVAIHADQLTPTWRVYSTGSNVFQTRAGCLIGAEHVNNSYECDIPIGAGICASYQTQTNSPRRARSVASQSIIAYTMSLGAENSVAYSNNSCAIPTNFTISVTTEILPVSMTKTSVDCTMYICGDSTECSNLLLQYGSFCTQLNRALTGIAVEQDKNTQEVFAQVKQIYKTPPIKDFGGFNFSQILPDPSKPSKRSFIEDILFNKVTLADAGFIKQYGDCLGDIAARDLICAQKFNGLTVLPPLLTDEMIAQYTSALLAGTITSGWTFGAGAALQIPFAMQMAYRFNGIGVTQNVLYENQKLIANQFNSAIGKIQDSLSSTASALGKLQDVVNQNAQALNTLVKQLSSNFGAISSVLNDILSRLDKVEAEVQIDRLITGRLQSLQTYVTQQLIRAAEIRASANLAATKMSECVLGQSKRVDFCGKGYHLMSFPQSAPHGVVFLHVTYVPAQEKNFTCAPAICHDGKAHFPREGVFVSNGTHWFVTQRNFYEPQIITTDNTFVSGNCDVVIGIVNNTVYDPLQPELDSFKEELDKYFKNHTSPDVDLGDISGINASVVNIQKEIDRLNEVAKNLNESLIDLQELGKYEQYIKGGSGYIPEAPRDGQAYVRKDGEWVLLSTFL

SEQ ID NO: 6027 - protein, 1241 aa, Artificial Sequence
  SARS-CoV-2/Congo/158/2020__EPI_ISL_417950 spike protein (1-1211)(I712C_T1077C) Foldon construct
MFVFLVLLPLVSSQCVNLTTRTQLPPAYTNSFTRGVYYPDKVFRSSVLHSTQDLFLPFFSNVTWFHAIHVSGTNGTKRFDNPVLPFNDGVYFASTEKSNIIRGWIFGTTLDSKTQSLLIVNNATNVVIKVCEFQFCNDPFLGVYYHKNNKSWMESEFRVYSSANNCTFEYVSQPFLMDLEGKQGNFKNLREFVFKNIDGYFKIYSKHTPINLVRDLPQGFSALEPLVDLPIGINITRFQTLLALHRSYLTPGDSSSGWTAGAAAYYVGYLQPRTFLLKYNENGTITDAVDCALDPLSETKCTLKSFTVEKGIYQTSNFRVQPTESIVRFPNITNLCPFGEVFNATRFASVYAWNRKRISNCVADYSVLYNSASFSTFKCYGVSPTKLNDLCFTNVYADSFVIRGDEVRQIAPGQTGKIADYNYKLPDDFTGCVIAWNSNNLDSKVGGNYNYLYRLFRKSNLKPFERDISTEIYQAGSTPCNGVEGFNCYFPLQSYGFQPTNGVGYQPYRVVVLSFELLHAPATVCGPKKSTNLVKNKCVNFNFNGLTGTGVLTESNKKFLPFQQFGRDIADTTDAVRDPQTLEILDITPCSFGGVSVITPGTNTSNQVAVLYQDVNCTEVPVAIHADQLTPTWRVYSTGSNVFQTRAGCLIGAEHVNNSYECDIPIGAGICASYQTQTNSPRRARSVASQSIIAYTMSLGAENSVAYSNNSCAIPTNFTISVTTEILPVSMTKTSVDCTMYICGDSTECSNLLLQYGSFCTQLNRALTGIAVEQDKNTQEVFAQVKQIYKTPPIKDFGGFNFSQILPDPSKPSKRSFIEDLLFNKVTLADAGFIKQYGDCLGDIAARDLICAQKFNGLTVLPPLLTDEMIAQYTSALLAGTITSGWTFGAGAALQIPFAMQMAYRFNGIGVTQNVLYENQKLIANQFNSAIGKIQDSLSSTASALGKLQDVVNQNAQALNTLVKQLSSNFGAISSVLNDILSRLDKVEAEVQIDRLITGRLQSLQTYVTQQLIRAAEIRASANLAATKMSECVLGQSKRVDFCGKGYHLMSFPQSAPHGVVFLHVTYVPAQEKNFTCAPAICHDGKAHFPREGVFVSNGTHWFVTQRNFYEPQIITTDNTFLSGNCDVVIGIVNNTVYDPLQPELDSFKEELDKYFKNHTSPDVDLGDISGINASVVNIQKEIDRLNEVAKNLNESLIDLQELGKYEQYIKGGSGYIPEAPRDGQAYVRKDGEWVLLSTFL

SEQ ID NO: 6028 - protein, 1241 aa, Artificial Sequence
  SARS-CoV-2/USA/UT-00034/2020__EPI_ISL_417977 spike protein (1-1211)(I712C_T1077C) Foldon construct
MFVFLVLLPLVSSQCVNLTTRTQLPPAYTNSFTRGVYYPDKVFRSSVLHSTQDLFLPFFSNVTWFHAIHVSGTNGTKRFDNPVLPFNDGVYFASTEKSNIIRGWIFGTTLDSKTQSLLIVNNATNVVIKVCEFQFCNDPFLGVYYYKNNKSWMESEFRVYSSANNCTFEYVSQPFLMDLEGKQGNFKNLREFVFKNIDGYFKIYSKHTPINLVRDLPQGFSALEPLVDLPIGINITRFQTLLALHRSYLTPGDSSSGWTAGAAAYYVGYLQPRTFLLKYNENGTITDAVDCALDPLSETKCTLKSFTVEKGIYQTSNFRVQPTESIVRFPNITNLCPFGEVFNATRFASVYAWNRKRISNCVADYSVLYNSASFSTFKCYGVSPTKLNDLCFTNVYADSFVIRGDEVRQIAPGQTGKIADYNYKLPDDFTGCVIAWNSNNLDSKVGGNYNYLYRLFRKSNLKPFERDISTEIYQAGSTPCNGVEGFNCYFPLQSYGFQPTNGVGYQPYRVVVLSFELLHAPATVCGPKKSTNLVKNKCVNFNFNGLTGTGVLTESNKKFLPFQQFGRDIADTTDAVRDPQTLEILDITPCSFGGVSVITPGTNTSNQVAVLYQGVNCTEVPVAIHADQLTPTWRVYSTGSNVFQTRAGCLIGAEHVNNSYECDIPIGAGICASYQTQTNSPRRARSVASQSIIAYTMSLGAENSVAYSNNSCAIPTNFTISVTTEILPVSMTKTSVDCTMYICGDSTECSNLLLQYGSFCTQLNRALTGIAVEQDKNTQEVFAQVKQIYKTPPIKDFGGFNFSQILPDPSKPSKRSFIEDLLFNKVTLADAGFIKQYGDCLGDIAARDLICAQKFNGLTVLPPLLTDEMIAQYTSALLAGTITSGWTFGAGAALQIPFAMQMAYRFNGIGVTQNVLYENQKLIANQFNSAIGKIQDSLSSTASALGKLQDVVNQNAQALNTLVKQLSSNFGAISSVLNDILSRLDKVEAEVQIDRLITGRLQSLQTYVTQQLIRAAEIRASANLAATKMSECVLGQSKRVDFCGKGYHLMSFPQSAPHGVVFLHVTYVPAQEKNFTCAPAICHDGKAHFPREGVFVSNGTHWFVTQRNFYEPQIITTDNTFVSGNCDVVIGIVNNTVYDPLQPELDSFKEELDKYFKNHTSPDVDLGDISGINASVVNIQKEIDRLNEVAKNLNESLIDLQELGKYEQYIKGGSGYIPEAPRDGQAYVRKDGEWVLLSTFL

SEQ ID NO: 6029 - protein, 1241 aa, Artificial Sequence
  SARS-CoV-2/USA/UT-00033/2020__EPI_ISL_417976 spike protein (1-1211)(I712C_T1077C) Foldon construct
MFVFLVLLPLVSSQCVNLTTRTQLPPAYTNSFTRGVYYPDKVFRSSVLHSTQDLFLPFFSNVTWFHAIHVSGTNGTKRFDNPVLPFNDGVYFASTEKSNIIRGWIFGTTLDSKTQSLLIVNNATNVVIKVCEFQFCNDPFLGVYYHKNNKSWMESEFRVYSSANNCTFEYVSQPFLMDLEGKQGNFKNLREFVFKNIDGYFKIYSKHTPINLVRDLPQGFSALEPLVDLPIGINITRFQTLLALHRSYLTPGDSSSGLTAGAAAYYVGYLQPRTFLLKYNENGTITDAVDCALDPLSETKCTLKSFTVEKGIYQTSNFRVQPTESIVRFPNITNLCPFGEVFNATRFASVYAWNRKRISNCVADYSVLYNSASFSTFKCYGVSPTKLNDLCFTNVYADSFVIRGDEVRQIAPGQTGKIADYNYKLPDDFTGCVIAWNSNNLDSKVGGNYNYLYRLFRKSNLKPFERDISTEIYQAGSTPCNGVEGFNCYFPLQSYGFQPTNGVGYQPYRVVVLSFELLHAPATVCGPKKSTNLVKNKCVNFNFNGLTGTGVLTESNKKFLPFQQFGRDIADTTDAVRDPQTLEILDITPCSFGGVSVITPGTNTSNQVAVLYQGVNCTEVPVAIHADQLTPTWRVYSTGSNVFQTRAGCLIGAEHVNNSYECDIPIGAGICASYQTQTNSPRRARSVASQSIIAYTMSLGAENSVAYSNNSCAIPTNFTISVTTEILPVSMTKTSVDCTMYICGDSTECSNLLLQYGSFCTQLNRALTGIAVEQDKNTQEVFAQVKQIYKTPPIKDFGGFNFSQILPDPSKPSKRSFIEDLLFNKVTLADAGFIKQYGDCLGDIAARDLICAQKFNGLTVLPPLLTDEMIAQYTSALLAGTITSGWTFGAGAALQIPFAMQMAYRFNGIGVTQNVLYENQKLIANQFNSAIGKIQDSLSSTASALGKLQDVVNQNAQALNTLVKQLSSNFGAISSVLNDILSRLDKVEAEVQIDRLITGRLQSLQTYVTQQLIRAAEIRASANLAATKMSECVLGQSKRVDFCGKGYHLMSFPQSAPHGVVFLHVTYVPAQEKNFTCAPAICHDGKAHFPREGVFVSNGTHWFVTQRNFYEPQIITTDNTFVSGNCDVVIGIVNNTVYDPLQPELDSFKEELDKYFKNHTSPDVDLGDISGINASVVNIQKEIDRLNEVAKNLNESLIDLQELGKYEQYIKGGSGYIPEAPRDGQAYVRKDGEWVLLSTFL

SEQ ID NO: 6030 - protein, 1241 aa, Artificial Sequence
  SARS-CoV-2/USA/WI-13/2020__EPI_ISL_417516 spike protein (1-1211)(I712C_T1077C) Foldon construct
MFVFLVLLPLVSSQCVNLTTRTQLPPAYTNSFTRGVYYPDKVFRSSVLHSTQDLFLPFFSNVTWFHAIHVSGTNGTKRFDNPVLPFNDGVYFASTEKSNIIRGWIFGTTLDSKTQSLLIVNNATNVVIKVCEFQFCNDPFLGVYYHKNNKSWMESEFRVYSSANNCTFEYVSQPFLMDLEGKQGNFKNLREFVFKNIDGYFKIYSKHTPINLVRDLPQGFSALEPLVDLPIGINITRFQTLLALHRSYLTPGDSSSGWTAGAAAYYVGYLQPRTFLLKYNENGTITDAVDCALDPLSETKCTLKSFTVEKGIYQTSNFRVLPTESIVRFPNITNLCPFGEVFNATRFASVYAWNRKRISNCVADYSVLYNSASFSTFKCYGVSPTKLNDLCFTNVYADSFVIRGDEVRQIAPGQTGKIADYNYKLPDDFTGCVIAWNSNNLDSKVGGNYNYLYRLFRKSNLKPFERDISTEIYQAGSTPCNGVEGFNCYFPLQSYGFQPTNGVGYQPYRVVVLSFELLHAPATVCGPKKSTNLVKNKCVNFNFNGLTGTGVLTESNKKFLPFQQFGRDIADTTDAVRDPQTLEILDITPCSFGGVSVITPGTNTSNQVAVLYQGVNCTEVPVAIHADQLTPTWRVYSTGSNVFQTRAGCLIGAEHVNNSYECDIPIGAGICASYQTQTNSPRRARSVASQSIIAYTMSLGAENSVAYSNNSCAIPTNFTISVTTEILPVSMTKTSVDCTMYICGDSTECSNLLLQYGSFCTQLNRALTGIAVEQDKNTQEVFAQVKQIYKTPPIKDFGGFNFSQILPDPSKPSKRSFIEDLLFNKVTLADAGFIKQYGDCLGDIAARDLICAQKFNGLTVLPPLLTDEMIAQYTSALLAGTITSGWTFGAGAALQIPFAMQMAYRFNGIGVTQNVLYENQKLIANQFNSAIGKIQDSLSSTASALGKLQDVVNQNAQALNTLVKQLSSNFGAISSVLNDILSRLDKVEAEVQIDRLITGRLQSLQTYVTQQLIRAAEIRASANLAATKMSECVLGQSKRVDFCGKGYHLMSFPQSAPHGVVFLHVTYVPAQEKNFTCAPAICHDGKAHFPREGVFVSNGTHWFVTQRNFYEPQIITTDNTFVSGNCDVVIGIVNNTVYDPLQPELDSFKEELDKYFKNHTSPDVDLGDISGINASVVNIQKEIDRLNEVAKNLNESLIDLQELGKYEQYIKGGSGYIPEAPRDGQAYVRKDGEWVLLSTFL

SEQ ID NO: 6031 - protein, 1240 aa, Artificial Sequence
  SARS-CoV-2/India/1-27/2020__EPI_ISL_413522 spike protein (1-1210)(I711C_T1076C) Foldon construct
MFVFLVLLPLVSSQCVNLTTRTQLPPAYTNSFTRGVYYPDKVFRSSVLHSTQDLFLPFFSNVTWFHAIHVSGTNGTKRFDNPVLPFNDGVYFASTEKSNIIRGWIFGTTLDSKTQSLLIVNNATNVVIKVCEFQFCNDPFLGVYHKNNKSWMESEFRVYSSANNCTFEYVSQPFLMDLEGKQGNFKNLREFVFKNIDGYFKIYSKHTPINLVRDLPQGFSALEPLVDLPIGINITRFQTLLALHRSYLTPGDSSSGWTAGAAAYYVGYLQPRTFLLKYNENGTITDAVDCALDPLSETKCTLKSFTVEKGIYQTSNFRVQPTESIVRFPNITNLCPFGEVFNATRFASVYAWNRKRISNCVADYSVLYNSASFSTFKCYGVSPTKLNDLCFTNVYADSFVIRGDEVIQIAPGQTGKIADYNYKLPDDFTGCVIAWNSNNLDSKVGGNYNYLYRLFRKSNLKPFERDISTEIYQAGSTPCNGVEGFNCYFPLQSYGFQPTNGVGYQPYRVVVLSFELLHAPATVCGPKKSTNLVKNKCVNFNFNGLTGTGVLTESNKKFLPFQQFGRDIADTTDAVRDPQTLEILDITPCSFGGVSVITPGTNTSNQVAVLYQDVNCTEVPVAIHADQLTPTWRVYSTGSNVFQTRAGCLIGAEHVNNSYECDIPIGAGICASYQTQTNSPRRARSVASQSIIAYTMSLGAENSVAYSNNSCAIPTNFTISVTTEILPVSMTKTSVDCTMYICGDSTECSNLLLQYGSFCTQLNRALTGIAVEQDKNTQEVFAQVKQIYKTPPIKDFGGFNFSQILPDPSKPSKRSFIEDLLFNKVTLADAGFIKQYGDCLGDIAARDLICAQKFNGLTVLPPLLTDEMIAQYTSALLAGTITSGWTFGAGAALQIPFAMQMAYRFNGIGVTQNVLYENQKLIANQFNSAIGKIQDSLSSTASALGKLQDVVNQNAQALNTLVKQLSSNFGAISSVLNDILSRLDKVEAEVQIDRLITGRLQSLQTYVTQQLIRAAEIRASANLAATKMSECVLGQSKRVDFCGKGYHLMSFPQSAPHGVVFLHVTYVPAQEKNFTCAPAICHDGKAHFPREGVFVSNGTHWFVTQRNFYEPQIITTDNTFVSGNCDVVIGIVNNTVYDPLQPELDSFKEELDKYFKNHTSPDVDLGDISGINASVVNIQKEIDRLNEVAKNLNESLIDLQELGKYEQYIKGGSGYIPEAPRDGQAYVRKDGEWVLLSTFL

SEQ ID NO: 6032 - protein, 1235 aa, Artificial Sequence
  SARS-CoV-2/pangolin/Guangxi/P4L/2017__EPI_ISL_410538 spike protein (1-1205)(I706C_T1071C) Foldon construct
MFVFLFVLPLVSSQCVNLTTRTGIPPGYTNSSTRGVYYPDKVFRSSILHLTQDLFLPFFSNVTWFNTINYQGGFKKFDNPVLPFNDGVYFASTEKSNIIRGWIFGTTLDARTQSLLIVNNATNVVIKVCEFQFCTDPFLGVYYHNNNKTWVENEFRVYSSANNCTFEYISQPFLMDLEGKQGNFKNLREFVFKNVDGYFKIYSKHTPIDLVRDLPRGFAALEPLVDLPIGINITRFQTLLALHRSYLTPGNLESGWTTGAAAYYVGYLQQRTFLLSYNQNGTITDAVDCSLDPLSETKCTLKSLTVEKGIYQTSNFRVQPTISIVRFPNITNLCPFGEVFNASKFASVYAWNRKRISNCVADYSVLYNSTSFSTFKCYGVSPTKLNDLCFTNVYADSFVVKGDEVRQIAPGQTGVIADYNYKLPDDFTGCVIAWNSVKQDALTGGNYGYLYRLFRKSKLKPFERDISTEIYQAGSTPCNGQVGLNCYYPLERYGFHPTTGVNYQPFRVVVLSFELLNGPATVCGPKLSTTLVKDKCVNFNFNGLTGTGVLTTSKKQFLPFQQFGRDISDTTDAVRDPQTLEILDITPCSFGGVSVITPGTNTSNQVAVLYQDVNCTEVPMAIHAEQLTPAWRVYSAGANVFQTRAGCLVGAEHVNNSYECDIPVGAGICASYHSMSSLRSVNQRSIIAYTMSLGAENSVAYSNNSCAIPTNFTISVTTEILPVSMTKTSVDCTMYICGDSIECSNLLLQYGSFCTQLNRALTGIAVEQDKNTQEVFAQVKQIYKTPPIKDFGGFNFSQILPDPSKPSKRSFIEDLLFNKVTLADAGFIKQYGDCLGDIAARDLICAQKFNGLTVLPPLLTDEMIAQYTSALLAGTITSGWTFGAGAALQIPFAMQMAYRFNGIGVTQNVLYENQKLIANQFNSAIGKIQDSLSSTASALGKLQDVVNQNAQALNTLVKQLSSNFGAISSVLNDILSRLDKVEAEVQIDRLITGRLQSLQTYVTQQLIRAAEIRASANLAATKMSECVLGQSKRVDFCGKGYHLMSFPQSAPHGVVFLHVTYVPAQEKNFTCAPAICHEGKAHFPREGVFVSNGTHWFITQRNFYEPQIITTDNTFVSGSCDVVIGIVNNTVYDPLQPELDSFKEELDKYFKNHTSPDVDLGDISGINASVVNIQKEIDRLNEVAKNLNESPIDLQELGKYEQYIKGGSGYIPEAPRDGQAYVRKDGEWVLLSTFL

SEQ ID NO: 6033 - protein, 1235 aa, Artificial Sequence
  SARS-CoV-2/pangolin/Guangxi/P5L/2017__EPI_ISL_410540 spike protein (1-1205)(I706C_T1071C) Foldon construct
MFVFLFVLPLVSSQCVNLTTRTGIPPGYTNSSTRGVYYPDKVFRSSILHLTQDLFLPFFSNVTWFNTINYQGGFKKFDNPVLPFNDGVYFASTEKSNIIRGWIFGTTLDARTQSLLIVNNATNVVIKVCEFQFCTDPFLGVYYHNNNKTWVENEFRVYSSANNCTFEYISQPFLMDLEGKQGNFKNLREFVFKNVDGYFKIYSKHTPIDLVRDLPRGFAALEPLVDLPIGINITRFQTLLALHRSYLTPGKLESGWTTGAAAYYVGYLQQRTFLLSYNQNGTITDAVDCSLDPLSETKCTLKSLTVEKGIYQTSNFRVQPTISIVRFPNITNLCPFGEVFNASKFASVYAWNRKRISNCVADYSVLYNSTSFSTFKCYGVSPTKLNDLCFTNVYADSFVVKGDEVRQIAPGQTGVIADYNYKLPDDFTGCVIAWNSVKQDALTGGNYGYLYRLFRKSKLKPFERDISTEIYQAGSTPCNGQVGLNCYYPLERYGFHPTTGVNYQPFRVVVLSFELLNGPATVCGPKLSTTLVKDKCVNFNFNGLTGTGVLTTSKKQFLPFQQFGRDISDTTDAVRDPQTLEILDITPCSFGGVSVITPGTNTSNQVAVLYQDVNCTEVPMAIHAEQLTPAWRVYSAGANVFQTRAGCLVGAEHVNNSYECDIPVGAGICASYHSMSSFRSVNQRSIIAYTMSLGAENSVAYSNNSCAIPTNFTISVTTEILPVSMTKTSVDCTMYICGDSIECSNLLLQYGSFCTQLNRALTGIAVEQDKNTQEVFAQVKQIYKTPPIKDFGGFNFSQILPDPSKPSKRSFIEDLLFNKVTLADAGFIKQYGDCLGDIAARDLICAQKFNGLTVLPPLLTDEMIAQYTSALLAGTITSGWTFGAGAALQIPFAMQMAYRFNGIGVTQNVLYENQKLIANQFNSAIGKIQDSLSSTASALGKLQDVVNQNAQALNTLVKQLSSNFGAISSVLNDILSRLDKVEAEVQIDRLITGRLQSLQTYVTQQLIRAAEIRASANLAATKMSECVLGQSKRVDFCGKGYHLMSFPQSAPHGVVFLHVTYVPAQEKNFTCAPAICHEGKAHFPREGVFVSNGTHWFITQRNFYEPQIITTDNTFVSGSCDVVIGIVNNTVYDPLQPELDSFKEELDKYFKNHTSPDVDLGDISGINASVVNIQKEIDRLNEVAKNLNESLIDLQELGKYEQYIKGGSGYIPEAPRDGQAYVRKDGEWVLLSTFL

SEQ ID NO: 6034 - protein, 1235 aa, Artificial Sequence
  SARS-CoV-2/pangolin/Guangxi/P5E/2017__EPI_ISL_410541 spike protein (1-1205)(I706C_T1071C) Foldon construct
MFVFLFVLPLVSSQCVNLTTRTGIPPGYTNSSTRGVYYPDKVFRSSILHLTQDLFLPFFSNVTWFNTITYQGGSKKFDNPVLPFNDGVYFASTEKSNIIRGWIFGTTLDARTQSLLIVNNATNVVIKVCEFQFCTDPFLGVYYHNNNKTWVENEFRVYSSANNCTFEYISQPFLMDLEGKQGNFKNLREFVFKNVDGYFKIYSKHTPIDLVRDLPRGFAALEPLVDLPIGINITRFQTLLALHRSYLTPGKLESGWTTGAAAYYVGYLQQRTFLLSYNQNGTITDAVDCSLDPLSETKCTLKSLTVEKGIYQTSNFRVQPTISIVRFPNITNLCPFGEVFNASKFASVYAWNRKRISNCVADYSVLYNSTSFSTFKCYGVSPTKLNDLCFTNVYADSFVVKGDEVRQIAPGQTGVIADYNYKLPDDFTGCVIAWNSVKQDALTGDNYGYLYRLFRKSKLKPFERDISTEIYQAGSTPCNGQVGLNCYYPLERYGFHPTTGVNYQPFRVVVLSFELLNGPATVCGPKLSTTLVKDKCVNFNFNGLTGTGVLTTSKKQFLPFQQFGRDISDTTDAVRDPQTLEILDITPCSFGGVSVITPGTNTSNQVAVLYQDVNCTEVPMAIHAEQLTPAWRVYSAGANVFQTRAGCLVGAEHVNNSYECDIPVGAGICASYHSMSSFRSVNQRSIIAYTMSLGAENSVAYSNNSCAIPTNFTISVTTEILPVSMTKTSVDCTMYICGDSIECSNLLLQYGSFCTQLNRALTGIAVEQDKNTQEVFAQVKQIYKTPPIKDFGGFNFSQILPDPSKPSKRSFIEDLLFNKVTLADAGFIKQYGDCLGDIAARDLICAQKFNGLTVLPPLLTDEMIAQYTSALLAGTITSGWTFGAGAALQIPFAMQMAYRFNGIGVTQNVLYENQKLIANQFNSAIGKIQDSLSSTASALGKLQDVVNQNAQALNTLVKQLSSNFGAISSVLNDILSRLDKVEAEVQIDRLITGRLQSLQTYVTQQLIRAAEIRASANLAATKMSECVLGQSKRVDFCGKGYHLMSFPQSAPHGVVFLHVTYVPAQEKNFTCAPAICHEGKAHFPREGVFVSNGTHWFITQRNFYEPQIITTDNTFVSGSCDVVIGIVNNTVYDPLQPELDSFKEELDKYFKNHTSPDVDLGDISGINASVVNIQKEIDRLNEVAKNLNESLIDLQELGKYEQYIKGGSGYIPEAPRDGQAYVRKDGEWVLLSTFL

SEQ ID NO: 6035 - protein, 1233 aa, Artificial Sequence
  SARS-CoV-2/pangolin/Guangxi/P1E/2017__EPI_ISL_410539 spike protein (1-1203)(I704C_T1069C) Foldon construct
MFVFLFVLPLVSSQCVNLTTRTGIQPGYTNSSTRGVYYPDKVFRSSILHLTQDLFLPFFSNVTWFNTINYQGGFKKFDNPVLPFNDGVYFASTEKSNIIRGWIFGTTLDARTQSLLIVNNATNVVIKVCEFQFCTDPFLGVYYHNNNKTWVENEFRVYSSANNCTFEYISQPFLMDLEGKQGNFKNLREFVFKNVDGYFKIYSKHTPIDLVRDLPRGFAALEPLVDLPIGINITRFQTLLALHRSYLTPGKLESGWTTGAAAYYVGYLQQRTFLLSYNQNGTITDAVDCSLDPLSETKCTLKSLTVEKGIYQTSNFRVQPTISIVRFPNITNLCPFGEVFNASKFASVYAWNRKRISNCVADYSVLYNSTSFSTFKCYGVSPTKLNDLCFTNVYADSFVVKGDEVRQIAPGQTGVIADYNYKLPDDFTGCVIAWNSVKQDALTGGNYLYRLFRKSKLKPFERDISTEIYQAGSTPCNGQVGLNCYYPLERYGFHPTTGVNYQPFRVVVLSFELLNGPATVCGPKLSTTLVKDKCVNFNFNGLTGTGVLTTSKKQFLPFQQFGRDISDTTDAVRDPQTLEILDITPCSFGGVSVITPGTNTSNQVAVLYQDVNCTEVPMAIHAEQLTPAWRVYSAGANVFQTRAGCLVGAEHVNNSYECDIPVGAGICASYHSMSSLRSVNQRSIIAYTMSLGAENSVAYSNNSCAIPTNFTISVTTEILPVSMTKTSVDCTMYICGDSIECSNLLLQYGSFCTQLNRALTGIAVEQDKNTQEVFAQVKQIYKTPPIKDFGGFNFSQILPDPSKPSKRSFIEDLLFNKVTLADAGFIKQYGDCLGDIAARDLICAQKFNGLTVLPPLLTDEMIAQYTSALLAGTITSGWTFGAGAALQIPFAMQMAYRFNGIGVTQNVLYENQKLIANQFNSAIGKIQDSLSSTASALGKLQDVVNQNAQALNTLVKQLSSNFGAISSVLNDILSRLDKVEAEVQIDRLITGRLQSLQTYVTQQLIRAAEIRASANLAATKMSECVLGQSKRVDFCGKGYHLMSFPQSAPHGVVFLHVTYVPAQEKNFTCAPAICHEGKAHFPREGVFVSNGTHWFITQRNFYEPQIITTDNTFVSGSCDVVIGIVNNTVYDPLQPELDSFKEELDKYFKNHTSPDVDLGDISGINASVVNIQKEIDRLNEVAKNLNESLIDLQELGKYEQYIKGGSGYIPEAPRDGQAYVRKDGEWVLLSTFL

SEQ ID NO: 6036 - protein, 1241 aa, Artificial Sequence
  SARS-CoV-2/Wuhan/WIV05/2019__EPI_ISL_402128 spike protein (1-1211)(I714C_Y1110C) Foldon construct
MFVFLVLLPLVSSQCVNLTTRTQLPPAYTNSFTRGVYYPDKVFRSSVLHSTQDLFLPFFSNVTWFHAIHVSGTNGTKRFDNPVLPFNDGVYFASTEKSNIIRGWIFGTTLDSKTQSLLIVNNATNVVIKVCEFQFCNDPFLGVYYHKNNKSWMESEFRVYSSANNCTFEYVSQPFLMDLEGKQGNFKNLREFVFKNIDGYFKIYSKHTPINLVRDLPQGFSALEPLVDLPIGINITRFQTLLALHRSYLTPGDSSSGWTAGAAAYYVGYLQPRTFLLKYNENGTITDAVDCALDPLSETKCTLKSFTVEKGIYQTSNFRVQPTESIVRFPNITNLCPFGEVFNATRFASVYAWNRKRISNCVADYSVLYNSASFSTFKCYGVSPTKLNDLCFTNVYADSFVIRGDEVRQIAPGQTGKIADYNYKLPDDFTGCVIAWNSNNLDSKVGGNYNYLYRLFRKSNLKPFERDISTEIYQAGSTPCNGVEGFNCYFPLQSYGFQPTNGVGYQPYRVVVLSFELLHAPATVCGPKKSTNLVKNKCVNFNFNGLTGTGVLTESNKKFLPFQQFGRDIADTTDAVRDPQTLEILDITPCSFGGVSVITPGTNTSNQVAVLYQDVNCTEVPVAIHADQLTPTWRVYSTGSNVFQTRAGCLIGAEHVNNSYECDIPIGAGICASYQTQTNSPRRARSVASQSIIAYTMSLGAENSVAYSNNSIACPTNFTISVTTEILPVSMTKTSVDCTMYICGDSTECSNLLLQYGSFCTQLNRALTGIAVEQDKNTQEVFAQVKQIYKTPPIKDFGGFNFSQILPDPSKPSKRSFIEDLLFNKVTLADAGFIKQYGDCLGDIAARDLICAQKFNGLTVLPPLLTDEMIAQYTSALLAGTITSGWTFGAGAALQIPFAMQMAYRFNGIGVTQNVLYENQKLIANQFNSAIGKIQDSLSSTASALGKLQDVVNQNAQALNTLVKQLSSNFGAISSVLNDILSRLDKVEAEVQIDRLITGRLQSLQTYVTQQLIRAAEIRASANLAATKMSECVLGQSKRVDFCGKGYHLMSFPQSAPHGVVFLHVTYVPAQEKNFTTAPAICHDGKAHFPREGVFVSNGTHWFVTQRNFCEPQIITTDNTFVSGNCDVVIGIVNNTVYDPLQPELDSFKEELDKYFKNHTSPDVDLGDISGINASVVNIQKEIDRLNEVAKNLNESLIDLQELGKYEQYIKGGSGYIPEAPRDGQAYVRKDGEWVLLSTFL

SEQ ID NO: 6037 - protein, 1237 aa, Artificial Sequence
  SARS-CoV-2/bat/Yunnan/RaTG13/2013__EPI_ISL_402131 spike protein (1-1207)(I710C_Y1106C) Foldon construct
MFVFLVLLPLVSSQCVNLTTRTQLPPAYTNSSTRGVYYPDKVFRSSVLHLTQDLFLPFFSNVTWFHAIHVSGTNGIKRFDNPVLPFNDGVYFASTEKSNIIRGWIFGTTLDSKTQSLLIVNNATNVVIKVCEFQFCNDPFLGVYYHKNNKSWMESEFRVYSSANNCTFEYVSQPFLMDLEGKQGNFKNLREFVFKNIDGYFKIYSKHTPINLVRDLPPGFSALEPLVDLPIGINITRFQTLLALHRSYLTPGDSSSGWTAGAAAYYVGYLQPRTFLLKYNENGTITDAVDCALDPLSETKCTLKSFTVEKGIYQTSNFRVQPTDSIVRFPNITNLCPFGEVFNATTFASVYAWNRKRISNCVADYSVLYNSTSFSTFKCYGVSPTKLNDLCFTNVYADSFVITGDEVRQIAPGQTGKIADYNYKLPDDFTGCVIAWNSKHIDAKEGGNFNYLYRLFRKANLKPFERDISTEIYQAGSKPCNGQTGLNCYYPLYRYGFYPTDGVGHQPYRVVVLSFELLNAPATVCGPKKSTNLVKNKCVNFNFNGLTGTGVLTESNKKFLPFQQFGRDIADTTDAVRDPQTLEILDITPCSFGGVSVITPGTNASNQVAVLYQDVNCTEVPVAIHADQLTPTWRVYSTGSNVFQTRAGCLIGAEHVNNSYECDIPIGAGICASYQTQTNSRSVASQSIIAYTMSLGAENSVAYSNNSIACPTNFTISVTTEILPVSMTKTSVDCTMYICGDSTECSNLLLQYGSFCTQLNRALTGIAVEQDKNTQEVFAQVKQIYKTPPIKDFGGFNFSQILPDPSKPSKRSFIEDLLFNKVTLADAGFIKQYGDCLGDIAARDLICAQKFNGLTVLPPLLTDEMIAQYTSALLAGTITSGWTFGAGAALQIPFAMQMAYRFNGIGVTQNVLYENQKLIANQFNSAIGKIQDSLSSTASALGKLQDVVNQNAQALNTLVKQLSSNFGAISSVLNDILSRLDKVEAEVQIDRLITGRLQSLQTYVTQQLIRAAEIRASANLAATKMSECVLGQSKRVDFCGKGYHLMSFPQSAPHGVVFLHVTYVPAQEKNFTTAPAICHDGKAHFPREGVFVSNGTHWFVTQRNFCEPQIITTDNTFVSGSCDVVIGIVNNTVYDPLQPELDSFKEELDKYFKNHTSPDVDLGDISGINASVVNIQKEIDRLNEVAKNLNESLIDLQELGKYEQYIKGGSGYIPEAPRDGQAYVRKDGEWVLLSTFL

SEQ ID NO: 6038 - protein, 1241 aa, Artificial Sequence
  SARS-CoV-2/Wuhan/HBCDC-HB-01/2019__EPI_ISL_402132 spike protein (1-1211)(I714C_Y1110C) Foldon construct
MFVFLVLLPLVSSQCVNLTTRTQLPPAYTNSITRGVYYPDKVFRSSVLHSTQDLFLPFFSNVTWFHAIHVSGTNGTKRFDNPVLPFNDGVYFASTEKSNIIRGWIFGTTLDSKTQSLLIVNNATNVVIKVCEFQFCNDPFLGVYYHKNNKSWMESEFRVYSSANNCTFEYVSQPFLMDLEGKQGNFKNLREFVFKNIDGYFKIYSKHTPINLVRDLPQGFSALEPLVDLPIGINITRFQTLLALHRSYLTPGDSSSGWTAGAAAYYVGYLQPRTFLLKYNENGTITDAVDCALDPLSETKCTLKSFTVEKGIYQTSNFRVQPTESIVRFPNITNLCPFGEVFNATRFASVYAWNRKRISNCVADYSVLYNSASFSTFKCYGVSPTKLNDLCFTNVYADSFVIRGDEVRQIAPGQTGKIADYNYKLPDDFTGCVIAWNSNNLDSKVGGNYNYLYRLFRKSNLKPFERDISTEIYQAGSTPCNGVEGFNCYFPLQSYGFQPTNGVGYQPYRVVVLSFELLHAPATVCGPKKSTNLVKNKCVNFNFNGLTGTGVLTESNKKFLPFQQFGRDIADTTDAVRDPQTLEILDITPCSFGGVSVITPGTNTSNQVAVLYQDVNCTEVPVAIHADQLTPTWRVYSTGSNVFQTRAGCLIGAEHVNNSYECDIPIGAGICASYQTQTNSPRRARSVASQSIIAYTMSLGAENSVAYSNNSIACPTNFTISVTTEILPVSMTKTSVDCTMYICGDSTECSNLLLQYGSFCTQLNRALTGIAVEQDKNTQEVFAQVKQIYKTPPIKDFGGFNFSQILPDPSKPSKRSFIEDLLFNKVTLADAGFIKQYGDCLGDIAARDLICAQKFNGLTVLPPLLTDEMIAQYTSALLAGTITSGWTFGAGAALQIPFAMQMAYRFNGIGVTQNVLYENQKLIANQFNSAIGKIQDSLSSTASALGKLQDVVNQNAQALNTLVKQLSSNFGAISSVLNDILSRLDKVEAEVQIDRLITGRLQSLQTYVTQQLIRAAEIRASANLAATKMSECVLGQSKRVDFCGKGYHLMSFPQSAPHGVVFLHVTYVPAQEKNFTTAPAICHDGKAHFPREGVFVSNGTHWFVTQRNFCEPQIITTDNTFVSGNCDVVIGIVNNTVYDPLQPELDSFKEELDKYFKNHTSPDVDLGDISGINASVVNIQKEIDRLNEVAKNLNESLIDLQELGKYEQYIKGGSGYIPEAPRDGQAYVRKDGEWVLLSTFL

SEQ ID NO: 6039 - protein, 1241 aa, Artificial Sequence
  SARS-CoV-2/Guangdong/20SF028/2020__EPI_ISL_403936 spike protein (1-1211)(I714C_Y1110C) Foldon construct
MFVFLVLLPLVSSQCVNLTTRTQLPPAYTNSFTRGVYYPDKVFRSSVLYSTQDLFLPFFSNVTWFHAIHVSGTNGTKRFDNPVLPFNDGVYFASTEKSNIIRGWIFGTTLDSKTQSLLIVNNATNVVIKVCEFQFCNDPFLGVYYHKNNKSWMESEFRVYSSANNCTFEYVSQPFLMDLEGKQGNFKNLREFVFKNIDGYFKIYSKHTPINLVRDLPQGFSALEPLVDLPIGINITRFQTLLALHRSYLTPGDSSSGWTAGAAAYYVGYLQPRTFLLKYNENGTITDAVDCALDPLSETKCTLKSFTVEKGIYQTSNFRVQPTESIVRFPNITNLCPFGEVFNATRFASVYAWNRKRISNCVADYSVLYNSASFSTFKCYGVSPTKLNDLCFTNVYADSFVIRGDEVRQIAPGQTGKIADYNYKLPDDFTGCVIAWNSNNLDSKVGGNYNYLYRLFRKSNLKPFERDISTEIYQAGSTPCNGVEGFNCYFPLQSYGFQPTNGVGYQPYRVVVLSFELLHAPATVCGPKKSTNLVKNKCVNFNFNGLTGTGVLTESNKKFLPFQQFGRDIADTTDAVRDPQTLEILDITPCSFGGVSVITPGTNTSNQVAVLYQDVNCTEVPVAIHADQLTPTWRVYSTGSNVFQTRAGCLIGAEHVNNSYECDIPIGAGICASYQTQTNSPRRARSVASQSIIAYTMSLGAENSVAYSNNSIACPTNFTISVTTEILPVSMTKTSVDCTMYICGDSTECSNLLLQYGSFCTQLNRALTGIAVEQDKNTQEVFAQVKQIYKTPPIKDFGGFNFSQILPDPSKPSKRSFIEDLLFNKVTLADAGFIKQYGDCLGDIAARDLICAQKFNGLTVLPPLLTDEMIAQYTSALLAGTITSGWTFGAGAALQIPFAMQMAYRFNGIGVTQNVLYENQKLIANQFNSAIGKIQDSLSSTASALGKLQDVVNQNAQALNTLVKQLSSNFGAISSVLNDILSRLDKVEAEVQIDRLITGRLQSLQTYVTQQLIRAAEIRASANLAATKMSECVLGQSKRVDFCGKGYHLMSFPQSAPHGVVFLHVTYVPAQEKNFTTAPAICHDGKAHFPREGVFVSNGTHWFVTQRNFCEPQIITTDNTFVSGNCDVVIGIVNNTVYDPLQPELDSFKEELDKYFKNHTSPDVDLGDISGINASVVNIQKEIDRLNEVAKNLNESLIDLQELGKYEQYIKGGSGYIPEAPRDGQAYVRKDGEWVLLSTFL

SEQ ID NO: 6040 - protein, 1241 aa, Artificial Sequence
  SARS-CoV-2/Shenzhen/SZTH-001/2020__EPI_ISL_406592 spike protein (1-1211)(I714C_Y1110C) Foldon construct
MFVFLVLLPLVSSQCVNLTTRTQLPPAYTNSFTRGVYYPDKVFRSSVLHSTQDLFLPFFSNVTWFHAIHVSGTNGTKRFDNPVLPFNDGVYFASTEKSNIIRGWIFGTTLDSKTQSLLIVNNATNVVIKVCEFQFCNDPFLGVYYHKNNKSWMESEFRVYSSANNCTFEYVSQPFLMDLEGKQGNFKNLREFVFKNIDGYFKIYSKHTPINLVRDLPQGFSALEPLVDLPIGINITRFQTLLALHRSYLTPGDSSSGWTAGAAAYYVGYLQPRTFLLKYNENGTITDAVDCALDPLSETKCTLKSFTVEKGIYQTSNFRVQPTESIVRFPNITNLCPFGEVFNATRFASVYAWNRKRISNCVADYSVLYNSASFSTFKCYGVSPTKLNDLCFTNVYADSFVIRGDEVRQIAPGQTGKIADYNYKLPDDFTGCVIAWNSNNLDSKVGGNYNYLYRLFRKSNLKPFERDISTEIYQAGSTPCNGVEGFNCYFPLQSYGFQPTNGVGYQPYRVVVLSFELLHAPATVCGPKKSTNLVKNKCVNFNFNGLTGTGVLTESNKKFLPFQQFGRDIADTTDAVRDPQTLEILDITPCSFGGVSVITPGTNTSNQVAVLYQDVNCTEVPVAIHADQLTPTWRVYSTGSNVFQTRAGCLIGAEHVNNSYECDIPIGAGICASYQTQTNSPRRARSVASQSIIAYTMSLGAENSVAYSNNSIACPTNFTISVTTEILPVSMTKTSVDCTMYICGDSTECSNLLLQYGSFCTQLNRALTGIAVEQDKNTQEVFAQVKQIYKTPPIKDFGGFNFSQILPDPSKPSKRSFIEDLLFNKVTLADAGFIKQYGDCLGDIAARDLICAQKFNGLTVLPPLLTDEMIAQYTSALLAGTITSGWTFGAGAALQIPFAMQMAYRFNGIGVTQNVLYENQKLIANQFNSAIGKIQDSLSSTASALGKLQDVVNQNAQALNTLVKQLSSNFGAISSVLNDILSRLDKVEAEVQIDRLITGRLQSLQTYVTQQLIRAAEIRASANLAATKMSECVLGQSKRVDFCGKGYHLMSFPQSAPHGVVFLHVTYVPAQEKNFTTAPAICHDGKAHFPREGVFVSNGTHWFVTQRNFCEPQIITTDNTFVSGNCDVLIGIVNNTVYDPLQPELDSFKEELDKYFKNHTSPDVDLGDISGINASVVNIQKEIDRLNEVAKNLNESLIDLQELGKYEQYIKGGSGYIPEAPRDGQAYVRKDGEWVLLSTFL

SEQ ID NO: 6041 - protein, 1241 aa, Artificial Sequence
  SARS-CoV-2/Shenzhen/SZTH-004/2020__EPI_ISL_406595 spike protein (1-1211)(I714C_Y1110C) Foldon construct
MFVFLVLLPLVSSQCVNLTTRTQLPPAYTNSFTRGVYYPDKVFRSSVLHSTQDLFLPFFSNVTWFHAIHVSGTNGTKRFDNPVLPFNDGVYFASTEKSNIIRGWIFGTTLDSKTQSLLIVNNATNVVIKVCEFQFCNDPFLGVYYHKNNKSWMESEFRVYSSANNCTFEYVSQPFLMDLEGKQGNFKNLREFVFKNIDGYFKIYSKHTPINLVRDLPQGFSALEPLVDLPIGINITRFQTLLALHRSYLTPGDSSSGWTAGAAAYYVGYLQPRTFLLKYNENGTITDAVDCALDPLSETKCTLKSFTVEKGIYQTSNFRVQPTESIVRFPNITNLCPFGEVFNATRFASVYAWDRKRISNCVAYYSVLYNSASFSTFKCYGVSPTKLNDLCFTNVYADSFVIRGDEVRQIAPGQTGKIADYNYKLPDDFTGCVIAWNSNNLDSKVGGNYNYLYRLFRKSNLKPFERDISTEIYQAGSTPCNGVEGFNCYFPLQSYGFQPTNGVGYQPYRVVVLSFELLHAPATVCGPKKSTNLVKNKCVNFNFNGLTGTGVLTESNKKFLPFQQFGRDIADTTDAVRDPQTLEILDITPCSFGGVSVITPGTNTSNQVAVLYQDVNCTEVPVAIHADQLTPTWRVYSTGSNVFQTRAGCLIGAEHVNNSYECDIPIGAGICASYQTQTNSPRRARSVASQSIIAYTMSLGAENSVAYSNNSIACPTNFTISVTTEILPVSMTKTSVDCTMYICGDSTECSNLLLQYGSFCTQLNRALTGIAVEQDKNTQEVFAQVKQIYKTPPIKDFGGFNFSQILPDPSKPSKRSFIEDLLFNKVTLADAGFIKQYGDCLGDIAARDLICAQKFNGLTVLPPLLTDEMIAQYTSALLAGTITSGWTFGAGAALQIPFAMQMAYRFNGIGVTQNVLYENQKLIANQFNSAIGKIQDSLSSTASALGKLQDVVNQNAQALNTLVKQLSSNFGAISSVLNDILSRLDKVEAEVQIDRLITGRLQSLQTYVTQQLIRAAEIRASANLAATKMSECVLGQSKRVDFCGKGYHLMSFPQSAPHGVVFLHVTYVPAQEKNFTTAPAICHDGKAHFPREGVFVSNGTHWFVTQRNFCEPQIITTDNTFVSGNCDVVIGIVNNTVYDPLQPELDSFKEELDKYFKNHTSPDVDLGDISGINASVVNIQKEIDRLNEVAKNLNESLIDLQELGKYEQYIKGGSGYIPEAPRDGQAYVRKDGEWVLLSTFL

SEQ ID NO: 6042 - protein, 1241 aa, Artificial Sequence
  SARS-CoV-2/France/IDF0372/2020__EPI_ISL_406596 spike protein (1-1211)(I714C_Y1110C) Foldon construct
MFVFLVLLPLVSSQCVNLTTRTQLPPAYTNSFTRGVYYPDKVFRSSVLHSTQDLFLPFFSNVTWFHAIHVSGTNGTKRFDNPVLPFNDGVYFASTEKSNIIRGWIFGTTLDSKTQSLLIVNNATNVVIKVCEFQFCNDPFLGVYYHKNNKSWMESEFRVYSSANNCTFEYVSQPFLMDLEGKQGNFKNLREFVFKNIDGYFKIYSKHTPINLVRDLPQGFSALEPLVDLPIGINITRFQTLLALHRSYLTPGDSSSGWTAGAAAYYVGYLQPRTFLLKYNENGTITDAVDCALDPLSETKCTLKSFTVEKGIYQTSNFRVQPTESIVRFPNITNLCPFGEVFNATRFASVYAWNRKRISNCVADYSFLYNSASFSTFKCYGVSPTKLNDLCFTNVYADSFVIRGDEVRQIAPGQTGKIADYNYKLPDDFTGCVIAWNSNNLDSKVGGNYNYLYRLFRKSNLKPFERDISTEIYQAGSTPCNGVEGFNCYFPLQSYGFQPTNGVGYQPYRVVVLSFELLHAPATVCGPKKSTNLVKNKCVNFNFNGLTGTGVLTESNKKFLPFQQFGRDIADTTDAVRDPQTLEILDITPCSFGGVSVITPGTNTSNQVAVLYQDVNCTEVPVAIHADQLTPTWRVYSTGSNVFQTRAGCLIGAEHVNNSYECDIPIGAGICASYQTQTNSPRRARSVASQSIIAYTMSLGAENSVAYSNNSIACPTNFTISVTTEILPVSMTKTSVDCTMYICGDSTECSNLLLQYGSFCTQLNRALTGIAVEQDKNTQEVFAQVKQIYKTPPIKDFGGFNFSQILPDPSKPSKRSFIEDLLFNKVTLADAGFIKQYGDCLGDIAARDLICAQKFNGLTVLPPLLTDEMIAQYTSALLAGTITSGWTFGAGAALQIPFAMQMAYRFNGIGVTQNVLYENQKLIANQFNSAIGKIQDSLSSTASALGKLQDVVNQNAQALNTLVKQLSSNFGAISSVLNDILSRLDKVEAEVQIDRLITGRLQSLQTYVTQQLIRAAEIRASANLAATKMSECVLGQSKRVDFCGKGYHLMSFPQSAPHGVVFLHVTYVPAQEKNFTTAPAICHDGKAHFPREGVFVSNGTHWFVTQRNFCEPQIITTDNTFVSGNCDVVIGIVNNTVYDPLQPELDSFKEELDKYFKNHTSPDVDLGDISGINASVVNIQKEIDRLNEVAKNLNESLIDLQELGKYEQYIKGGSGYIPEAPRDGQAYVRKDGEWVLLSTFL

SEQ ID NO: 6043 - protein, 1241 aa, Artificial Sequence
  SARS-CoV-2/Australia/VIC01/2020__EPI_ISL_406844 spike protein (1-1211)(I714C_Y1110C) Foldon construct
MFVFLVLLPLVSSQCVNLTTRTQLPPAYTNSFTRGVYYPDKVFRSSVLHSTQDLFLPFFSNVTWFHAIHVSGTNGTKRFDNPVLPFNDGVYFASTEKSNIIRGWIFGTTLDSKTQSLLIVNNATNVVIKVCEFQFCNDPFLGVYYHKNNKSWMESEFRVYSSANNCTFEYVSQPFLMDLEGKQGNFKNLREFVFKNIDGYFKIYSKHTPINLVRDLPQGFSALEPLVDLPIGINITRFQTLLALHRRYLTPGDSSSGWTAGAAAYYVGYLQPRTFLLKYNENGTITDAVDCALDPLSETKCTLKSFTVEKGIYQTSNFRVQPTESIVRFPNITNLCPFGEVFNATRFASVYAWNRKRISNCVADYSVLYNSASFSTFKCYGVSPTKLNDLCFTNVYADSFVIRGDEVRQIAPGQTGKIADYNYKLPDDFTGCVIAWNSNNLDSKVGGNYNYLYRLFRKSNLKPFERDISTEIYQAGSTPCNGVEGFNCYFPLQSYGFQPTNGVGYQPYRVVVLSFELLHAPATVCGPKKSTNLVKNKCVNFNFNGLTGTGVLTESNKKFLPFQQFGRDIADTTDAVRDPQTLEILDITPCSFGGVSVITPGTNTSNQVAVLYQDVNCTEVPVAIHADQLTPTWRVYSTGSNVFQTRAGCLIGAEHVNNSYECDIPIGAGICASYQTQTNSPRRARSVASQSIIAYTMSLGAENSVAYSNNSIACPTNFTISVTTEILPVSMTKTSVDCTMYICGDSTECSNLLLQYGSFCTQLNRALTGIAVEQDKNTQEVFAQVKQIYKTPPIKDFGGFNFSQILPDPSKPSKRSFIEDLLFNKVTLADAGFIKQYGDCLGDIAARDLICAQKFNGLTVLPPLLTDEMIAQYTSALLAGTITSGWTFGAGAALQIPFAMQMAYRFNGIGVTQNVLYENQKLIANQFNSAIGKIQDSLSSTASALGKLQDVVNQNAQALNTLVKQLSSNFGAISSVLNDILSRLDKVEAEVQIDRLITGRLQSLQTYVTQQLIRAAEIRASANLAATKMSECVLGQSKRVDFCGKGYHLMSFPQSAPHGVVFLHVTYVPAQEKNFTTAPAICHDGKAHFPREGVFVSNGTHWFVTQRNFCEPQIITTDNTFVSGNCDVVIGIVNNTVYDPLQPELDSFKEELDKYFKNHTSPDVDLGDISGINASVVNIQKEIDRLNEVAKNLNESLIDLQELGKYEQYIKGGSGYIPEAPRDGQAYVRKDGEWVLLSTFL

SEQ ID NO: 6044 - protein, 1241 aa, Artificial Sequence
  SARS-CoV-2/Germany/BavPat1/2020__EPI_ISL_406862 spike protein (1-1211)(I714C_Y1110C) Foldon construct
MFVFLVLLPLVSSQCVNLTTRTQLPPAYTNSFTRGVYYPDKVFRSSVLHSTQDLFLPFFSNVTWFHAIHVSGTNGTKRFDNPVLPFNDGVYFASTEKSNIIRGWIFGTTLDSKTQSLLIVNNATNVVIKVCEFQFCNDPFLGVYYHKNNKSWMESEFRVYSSANNCTFEYVSQPFLMDLEGKQGNFKNLREFVFKNIDGYFKIYSKHTPINLVRDLPQGFSALEPLVDLPIGINITRFQTLLALHRSYLTPGDSSSGWTAGAAAYYVGYLQPRTFLLKYNENGTITDAVDCALDPLSETKCTLKSFTVEKGIYQTSNFRVQPTESIVRFPNITNLCPFGEVFNATRFASVYAWNRKRISNCVADYSVLYNSASFSTFKCYGVSPTKLNDLCFTNVYADSFVIRGDEVRQIAPGQTGKIADYNYKLPDDFTGCVIAWNSNNLDSKVGGNYNYLYRLFRKSNLKPFERDISTEIYQAGSTPCNGVEGFNCYFPLQSYGFQPTNGVGYQPYRVVVLSFELLHAPATVCGPKKSTNLVKNKCVNFNFNGLTGTGVLTESNKKFLPFQQFGRDIADTTDAVRDPQTLEILDITPCSFGGVSVITPGTNTSNQVAVLYQGVNCTEVPVAIHADQLTPTWRVYSTGSNVFQTRAGCLIGAEHVNNSYECDIPIGAGICASYQTQTNSPRRARSVASQSIIAYTMSLGAENSVAYSNNSIACPTNFTISVTTEILPVSMTKTSVDCTMYICGDSTECSNLLLQYGSFCTQLNRALTGIAVEQDKNTQEVFAQVKQIYKTPPIKDFGGFNFSQILPDPSKPSKRSFIEDLLFNKVTLADAGFIKQYGDCLGDIAARDLICAQKFNGLTVLPPLLTDEMIAQYTSALLAGTITSGWTFGAGAALQIPFAMQMAYRFNGIGVTQNVLYENQKLIANQFNSAIGKIQDSLSSTASALGKLQDVVNQNAQALNTLVKQLSSNFGAISSVLNDILSRLDKVEAEVQIDRLITGRLQSLQTYVTQQLIRAAEIRASANLAATKMSECVLGQSKRVDFCGKGYHLMSFPQSAPHGVVFLHVTYVPAQEKNFTTAPAICHDGKAHFPREGVFVSNGTHWFVTQRNFCEPQIITTDNTFVSGNCDVVIGIVNNTVYDPLQPELDSFKEELDKYFKNHTSPDVDLGDISGINASVVNIQKEIDRLNEVAKNLNESLIDLQELGKYEQYIKGGSGYIPEAPRDGQAYVRKDGEWVLLSTFL

SEQ ID NO: 6045 - protein, 1241 aa, Artificial Sequence
  SARS-CoV-2/Wuhan/HBCDC-HB-02/2020__EPI_ISL_412978 spike protein (1-1211)(I714C_Y1110C) Foldon construct
MFVFLVLLPLVSSQCVNLTTRTQLPPAYTNSFTRGVYYPDKVFRSSVLHSTQDLFLPFFSNVTWFHAIHVSGTNGTKRFDNPVLPFNDGVYFASTEKSNIIRGWIFGTTLDSKTQSLLIVNNATNVVIKVCEFQFCNDPFLGVYYHKNNKSWMESEFRVYSSANNCTFEYVSQPFLMDLEGKQGNFKNLREFVFKNIDGYFKIYSKHTPINLVRDLPQGFSALEPLVDLPIGINITRFQTLLALHRSYLTPGDSSSGWTAGAAAYYVGYLQPRTFLLKYNENGTITDAVDCALDPLSETKCTLKSFTVEKGIYQTSNFRVQPTESIVRFPNITNLCPFGEVFNATRFASVYAWNRKRISNCVADYSVLYNSASFSTFKCYGVSPTKLNDLCFTNVYADSFVIRGDEVRQIAPGQTGKIADYNYKLPDDFTGCVIAWNSNNLDSKVGGNYNYLYRLFRKSNLKPFERDISTEIYQAGSTPCNGVEGFNCYFPLQSYGFQPTNGVGYQPYRVVVLSFELLHAPATVCGPKKSTNLVKNKCVNFNFNGLTGTGVLTESNKKFLPFQQFGRDIADTTDAVRDPQTLEILDITPCSFGGVSVITPGTNTSNQVAVLYQDVNCTEVPVAIHADQLTPTWRVYSTGSNVFQTRAGCLIGAEHVNNSYECDIPIGAGICASYQTQTNSPRRARSVASQSIIAYTMSLGAENSVAYSNNSIACPTNFTISVTTEILPVSMTKTSVDCTMYICGDSTECSNFLLQYGSFCTQLNRALTGIAVEQDKNTQEVFAQVKQIYKTPPIKDFGGFNFSQILPDPSKPSKRSFIEDLLFNKVTLADAGFIKQYGDCLGDIAARDLICAQKFNGLTVLPPLLTDEMIAQYTSALLAGTITSGWTFGAGAALQIPFAMQMAYRFNGIGVTQNVLYENQKLIANQFNSAIGKIQDSLSSTASALGKLQDVVNQNAQALNTLVKQLSSNFGAISSVLNDILSRLDKVEAEVQIDRLITGRLQSLQTYVTQQLIRAAEIRASANLAATKMSECVLGQSKRVDFCGKGYHLMSFPQSAPHGVVFLHVTYVPAQEKNFTTAPAICHDGKAHFPREGVFVSNGTHWFVTQRNFCEPQIITTDNTFVSGNCDVVIGIVNNTVYDPLQPELDSFKEELDKYFKNHTSPDVDLGDISGINASVVNIQKEIDRLNEVAKNLNESLIDLQELGKYEQYIKGGSGYIPEAPRDGQAYVRKDGEWVLLSTFL

SEQ ID NO: 6046 - protein, 1241 aa, Artificial Sequence
  SARS-CoV-2/Australia/QLD02/2020__EPI_ISL_407896 spike protein (1-1211)(I714C_Y1110C) Foldon construct
MFVFLVLLPLVSSQCVNLTTRTQLPPAYTNSFTRGVYYPDKVFRSSVLHSTQDLFLPFFSNVTWFHAIHVSGTNGTKRFDNPVLPFNDGVYFASTEKSNIIRGWIFGTTLDSKTQSLLIVNNATNVVIKVCEFQFCNDPFLGVYYHKNNKSWMESEFRVYSSANNCTFEYVSQPFLMDLEGKQGNFKNLREFVFKNIDGYFKIYSKHTPINLVRDLPQGFSALEPLVDLPIGINITRFQTLLALHRSYLTPGDSSSGWTAGAAAYYVGYLQPRTFLLKYNENGTITDAVDCALDPLSETKCTLKSFTVEKGIYQTSNFRVQPTESIVRFPNITNLCPFGEVFNATRFASVYAWNRKRISNCVADYSVLYNSASFSTFKCYGVSPTKLNDLCFTNVYADSFVIRGDEVRQIAPGQTGKIADYNYKLPDDFTGCVIAWNSNNLDSKVGGNYNYLYRLFRKSNLKPFERDISTEIYQAGSTPCNGVEGFNCYFPLQSYGFQPTNGVGYQPYRVVVLSFELLHAPATVCGPKKSTNLVKNKCVNFNFNGLTGTGVLTESNKKFLPFQQFGRDIADTTDAVRDPQTLEILDITPCSFGGVSVITPGTNTSNQVAVLYQDVNCTEVPVAIHADQLTPTWRVYSTGSNVFQTRAGCLIGAEHVNNSYECDIPIGAGICASYQTQTNSPRRARSVASQSIIAYTMSLGAENSVAYSNNSIACPTNFTISVTTEILPVSMTKTSVDCTMYICGDSTECSNLLLQYGSFCTQLNRALTGIAVEQDKNTQEVFAQVKQIYKTPPIKDFGGFNFSQILPDPSKPSKRSFIEDLLFNKVTLADAGFIKQYGDCLGDIAARDLICAQKFNGLTVLPPLLTDEMIAQYTSALLAGTITSGWTFGAGAALQIPFAMQMAYRFNGIGVTQNVLYENQKLIANQFNSAIGKIQDSLSSTASALGKLQDVVNQNAQALNTLVKQLSSNFGAISSVLNDILSRLDKVEAEVQIDRLITGRLQSLQTYVTQQLIRAAEIRASANLAATKMSECVLGQSKRVDFCGKGYHLMSFPQSAPHGVVFLHVTYVPAQEKNFTTAPAICHDGKAHFPREGVFVSNGTHWFVTQRNFCEPQIITTDNTFVSGNCDVVIGIVNNTVYDPLQLELDSFKEELDKYFKNHTSPDVDLGDISGINASVVNIQKEIDRLNEVAKNLNESLIDLQELGKYEQYIKGGSGYIPEAPRDGQAYVRKDGEWVLLSTFL

SEQ ID NO: 6047 - protein, 1241 aa, Artificial Sequence
  SARS-CoV-2/India/1-31/2020__EPI_ISL_413523 spike protein (1-1211)(I714C_Y1110C) Foldon construct
MFVFLVLLPLVSSQCVNLTTRTQLPPAYTNSFTRGVYYPDKVFRSSVLHSTQDLFLPFFSNVTWFHAIHVSGTNGTKRFDNPVLPFNDGVYFASTEKSNIIRGWIFGTTLDSKTQSLLIVNNATNVVIKVCEFQFCNDPFLGVYYHKNNKSWMESEFRVYSSANNCTFEYVSQPFLMDLEGKQGNFKNLREFVFKNIDGYFKIYSKHTPINLVRDLPQGFSALEPLVDLPIGINITRFQTLLALHRSYLTPGDSSSGWTAGAAAYYVGYLQPRTFLLKYNENGTITDAVDCALDPLSETKCTLKSFTVEKGIYQTSNFRVQPTESIVRFPNITNLCPFGEVFNATRFASVYAWNRKRISNCVADYSVLYNSASFSTFKCYGVSPTKLNDLCFTNVYADSFVIRGDEVRQIAPGQTGKIADYNYKLPDDFTGCVIAWNSNNLDSKVGGNYNYLYRLFRKSNLKPFERDISTEIYQAGSTPCNGVEGFNCYFPLQSYGFQPTNGVGYQPYRVVVLSFELLHAPATVCGPKKSTNLVKNKCVNFNFNGLTGTGVLTESNKKFLPFQQFGRDIADTTDAVRDPQTLEILDITPCSFGGVSVITPGTNTSNQVAVLYQDVNCTEVPVAIHADQLTPTWRVYSTGSNVFQTRAGCLIGAEHVNNSYECDIPIGAGICASYQTQTNSPRRARSVASQSIIAYTMSLGAENSVAYSNNSIACPTNFTISVTTEILPVSMTKTSVDCTMYICGDSTECSNLLLQYGSFCTQLNRALTGIAVEQDKNTQEVFAQVKQIYKTPPIKDFGGFNFSQILPDPSKPSKRSFIEDLLFNKVTLADAGFIKQYGDCLGDIAARDLICAQKFNGLTVLPPLLTDEMIAQYTSALLAGTITSGWTFGAGAALQIPFAMQMAYRFNGIGVTQNVLYENQKLIANQFNSVIGKIQDSLSSTASALGKLQDVVNQNAQALNTLVKQLSSNFGAISSVLNDILSRLDKVEAEVQIDRLITGRLQSLQTYVTQQLIRAAEIRASANLAATKMSECVLGQSKRVDFCGKGYHLMSFPQSAPHGVVFLHVTYVPAQEKNFTTAPAICHDGKAHFPREGVFVSNGTHWFVTQRNFCEPQIITTDNTFVSGNCDVVIGIVNNTVYDPLQPELDSFKEELDKYFKNHTSPDVDLGDISGINASVVNIQKEIDRLNEVAKNLNESLIDLQELGKYEQYIKGGSGYIPEAPRDGQAYVRKDGEWVLLSTFL

SEQ ID NO: 6048 - protein, 1241 aa, Artificial Sequence
  SARS-CoV-2/Guangdong/GD2020087-P0008/2020__EPI_ISL_413863 spike protein (1-1211)(I714C_Y1110C) Foldon construct
MFVFLVLLPLVSSQCVNLTTRTQLPPAYTNSFTRGVYYPDKVFRSSVLHSTQDLFLPFFSNVTWFHAIHVSGTNGTKRFDNPVLPFNDGVYFASTEKSNIIRGWIFGTTLDSKTQSLLIVNNATNVVIKVCEFQFCNDPFLGVYYHKNNKSWMESEFRVYSSANNCTFEYVSQPFLMDLEGKQGNFKNLREFVFKNIDGYFKIYSKHTPINLVRDLPQGFSALEPLVDLPIGINITRFQTLLALHRSYLTPGDSSSGWTAGAAAYYVGYLQPRTFLLKYNENGTITDAVDCALDPLSETKCTLKSFTVEKGIYQTSNFRVQPTESIVRFPNITNLCPFGEVFNATRFASVYAWNRKRISNCVADYSVLYNSASFSTFKCYGVSPTKLNDLCFTNVYADSFVIRGDEVREIAPGQTGKIADYNYKLPDDFTGCVIAWNSNNLDSKVGGNYNYLYRLFRKSNLKPFERDISTEIYQAGSTPCNGVEGFNCYFPLQSYGFQPTNGVGYQPYRVVVLSFELLHAPATVCGPKKSTNLVKNKCVNFNFNGLTGTGVLTESNKKFLPFQQFGRDIADTTDAVRDPQTLEILDITPCSFGGVSVITPGTNTSNQVAVLYQDVNCTEVPVAIHADQLTPTWRVYSTGSNVFQTRAGCLIGAEHVNNSYECDIPIGAGICASYQTQTNSPRRARSVASQSIIAYTMSLGAENSVAYSNNSIACPTNFTISVTTEILPVSMTKTSVDCTMYICGDSTECSNLLLQYGSFCTQLNRALTGIAVEQDKNTQEVFAQVKQIYKTPPIKDFGGFNFSQILPDPSKPSKRSFIEDLLFNKVTLADAGFIKQYGDCLGDIAARDLICAQKFNGLTVLPPLLTDEMIAQYTSALLAGTITSGWTFGAGAALQIPFAMQMAYRFNGIGVTQNVLYENQKLIANQFNSAIGKIQDSLSSTASALGKLQDVVNQNAQALNTLVKQLSSNFGAISSVLNDILSRLDKVEAEVQIDRLITGRLQSLQTYVTQQLIRAAEIRASANLAATKMSECVLGQSKRVDFCGKGYHLMSFPQSAPHGVVFLHVTYVPAQEKNFTTAPAICHDGKAHFPREGVFVSNGTHWFVTQRNFCEPQIITTDNTFVSGNCDVVIGIVNNTVYDPLQPELDSFKEELDKYFKNHTSPDVDLGDISGINASVVNIQKEIDRLNEVAKNLNESLIDLQELGKYEQYIKGGSGYIPEAPRDGQAYVRKDGEWVLLSTFL

SEQ ID NO: 6049 - protein, 1241 aa, Artificial Sequence
  SARS-CoV-2/Sweden/01/2020__EPI_ISL_411951 spike protein (1-1211)(I714C_Y1110C) Foldon construct
MFVFLVLLPLVSSQCVNLTTRTQLPPAYTNSFTRGVYYPDKVFRSSVLHSTQDLFLPFFSNVTWFHAIHVSGTNGTKRFDNPVLPFNDGVYFASTEKSNIIRGWIFGTTLDSKTQSLLIVNNATNVVIKVCEFQFCNDPFLGVYYHKNNKSWMESEFRVYSSANNCTFEYVSQPFLMDLEGKQGNFKNLREFVFKNIDGYFKIYSKHTPINLVRDLPQGFSALEPLVDLPIGINITRFQTLLALHRSYLTPGDSSSGWTAGAAAYYVGYLQPRTFLLKYNENGTITDAVDCALDPLSETKCTLKSFTVEKGIYQTSNFRVQPTESIVRFPNITNLCPFGEVFNATRFASVYAWNRKRISNCVADYSVLYNSASFSTFKCYGVSPTKLNDLCFTNVYADSFVIRGDEVRQIAPGQTGKIADYNYKLPDDFTGCVIAWNSNNLDSKVGGNYNYLYRLFRKSNLKPFERDISTEIYQAGSTPCNGVEGFNCYFPLQSYGFQPTNGVGYQPYRVVVLSFELLHAPATVCGPKKSTNLVKNKCVNFNFNGLTGTGVLTESNKKFLPFQQFGRDIADTTDAVRDPQTLEILDITPCSFGGVSVITPGTNTSNQVAVLYQDVNCTEVPVAIHADQLTPTWRVYSTGSNVFQTRAGCLIGAEHVNNSYECDIPIGAGICASYQTQTNSPRRARSVASQSIIAYTMSLGAENSVAYSNNSIACPTNFTISVTTEILPVSMTKTSVDCTMYICGDSTECSNLLLQYGSFCTQLNRALTGIAVEQDKNTQEVFAQVKQIYKTPPIKDCGGFNFSQILPDPSKPSKRSFIEDLLFNKVTLADAGFIKQYGDCLGDIAARDLICAQKFNGLTVLPPLLTDEMIAQYTSALLAGTITSGWTFGAGAALQIPFAMQMAYRFNGIGVTQNVLYENQKLIANQFNSAIGKIQDSLSSTASALGKLQDVVNQNAQALNTLVKQLSSNFGAISSVLNDILSRLDKVEAEVQIDRLITGRLQSLQTYVTQQLIRAAEIRASANLAATKMSECVLGQSKRVDFCGKGYHLMSFPQSAPHGVVFLHVTYVPAQEKNFTTAPAICHDGKAHFPREGVFVSNGTHWFVTQRNFCEPQIITTDNTFVSGNCDVVIGIVNNTVYDPLQPELDSFKEELDKYFKNHTSPDVDLGDISGINASVVNIQKEIDRLNEVAKNLNESLIDLQELGKYEQYIKGGSGYIPEAPRDGQAYVRKDGEWVLLSTFL

SEQ ID NO: 6050 - protein, 1241 aa, Artificial Sequence
  SARS-CoV-2/Tianmen/HBCDC-HB-07/2020__EPI_ISL_412983 spike protein (1-1211)(I714C_Y1110C) Foldon construct
MFVFLVLLPLVSSQCVNLTTRTQLPPAYTNSFTRGVYYPDKVFRSSVLHSTQDLFLPFFSNVTWFHAIHVSGTNGTKRFDNPVLPFNDGVYFASTEKSNIIRGWIFGTTLDSKTQSLLIVNNATNVVIKVCEFQFCNDPFLGVYYHKNNKSWMESEFRVYSSANNCTFEYVSQPFLMDLEGKQGNFKNLREFVFKNIDGYFKIYSKHTPINLVRDLPQGFSALEPLVDLPIGINITRFQTLLALHRSYLTPGDSSSGWTAGAAAYYVGYLQPRTFLLKYNENGTITDAVDCALDPLSETKCTLKSFTVEKGIYQTSNFRVQPTESIVRFPNITNLCPFGEVFNATRFASVYAWNRKRISNCVADYSVLYNSASFSTFKCYGVSPTKLNDLCFTNVYADSFVIRGDEVRQIAPGQTGKIADYNYKLPDDFTGCVIAWNSNNLDSKVGGNYNYLYRLFRKSNLKPFERDISTEIYQAGSTPCNGVEGFNCYFPLQSYGFQPTNGVGYQPYRVVVLSFELLHAPATVCGPKKSTNLVKNKCVNFNFNGLTGTGVLTESNKKFLPFQQFGRDIADTTDAVRDPQTLEILDITPCSFGGVSVITPGTNTSNQVAVLYQDLNCTEVPVAIHADQLTPTWRVYSTGSNVFQTRAGCLIGAEHVNNSYECDIPIGAGICASYQTQTNSPRRARSVASQSIIAYTMSLGAENSVAYSNNSIACPTNFTISVTTEILPVSMTKTSVDCTMYICGDSTECSNLLLQYGSFCTQLNRALTGIAVEQDKNTQEVFAQVKQIYKTPPIKDFGGFNFSQILPDPSKPSKRSFIEDLLFNKVTLADAGFIKQYGDCLGDIAARDLICAQKFNGLTVLPPLLTDEMIAQYTSALLAGTITSGWTFGAGAALQIPFAMQMAYRFNGIGVTQNVLYENQKLIANQFNSAIGKIQDSLSSTASALGKLQDVVNQNAQALNTLVKQLSSNFGAISSVLNDILSRLDKVEAEVQIDRLITGRLQSLQTYVTQQLIRAAEIRASANLAATKMSECVLGQSKRVDFCGKGYHLMSFPQSAPHGVVFLHVTYVPAQEKNFTTAPAICHDGKAHFPREGVFVSNGTHWFVTQRNFCEPQIITTDNTFVSGNCDVVIGIVNNTVYDPLQPELDSFKEELDKYFKNHTSPDVDLGDISGINASVVNIQKEIDRLNEVAKNLNESLIDLQELGKYEQYIKGGSGYIPEAPRDGQAYVRKDGEWVLLSTFL

SEQ ID NO: 6051 - protein, 1241 aa, Artificial Sequence
  SARS-CoV-2/Hong Kong/case42_VM20002493/2020__EPI_ISL_414527 spike protein (1-1211)(I714C_Y1110C) Foldon construct
MFVFLVLLPLVSSQCVNLTTRTQLPPAYTNSFTRGVYYPDKVFRSSVLHSTQDLFLPFFSNVTWFHAIHVSGTNGTKRFDNPVLPFNDGVYFASTEKSNIIRGWIFGTTLDSKTQSLLIVNNATNVVIKVCEFQFCNDPFLGVYYHKNNKSWMESEFRVYSSANNCTFEYVSQPFLMDLEGKQGNFKNLREFVFKNIDGYFKIYSKHTPINLVRDLPQGFSALEPLVDLPIGINITRFQTLLALHRSYLTPGDSSSGWTAGAAAYYVGYLQPRTFLLKYNENGTITDAVDCALDPLSETKCTLKSFTVEKGIYQTSNFRVQPTESIVRFPNITNLCPFGEVFNATRFASVYAWNRKRISNCVADYSVLYNSASFSTFKCYGVSPTKLNDLCFTNVYADSFVIRGDEVRQIAPGQTGKIADYNYKLPDDFTGCVIAWNSNNLDSKVGGNYNYLYRLFRKSNLKPFERDISTEIYQAGSTPCNGVEGFNCYFPLQSYGFQPTNGVGYQPYRVVVLSFELLHAPATVCGPKKSTNLVKNKCVNFNFNGLTGTGVLTESNKKFLPFQQFGRDIADTTDAVRDPQTLEILDITPCSFGGVSVITPGTNTSNQVAVLYQDVNCTEVPVAIHADQLTPTWRVYSTGSNVFQTRAGCLIGAEHVNNSYECDIPIGAGICASYQTQTNSPRRARSVASQSIIAYTMSLGAENSVAYSNNSIACPTNFAISVTTEILPVSMTKTSVDCTMYICGDSTECSNLLLQYGSFCTQLNRALTGIAVEQDKNTQEVFAQVKQIYKTPPIKDFGGFNFSQILPDPSKPSKRSFIEDLLFNKVTLADAGFIKQYGDCLGDIAARDLICAQKFNGLTVLPPLLTDEMIAQYTSALLAGTITSGWTFGAGAALQIPFAMQMAYRFNGIGVTQNVLYENQKLIANQFNSAIGKIQDSLSSTASALGKLQDVVNQNAQALNTLVKQLSSNFGAISSVLNDILSRLDKVEAEVQIDRLITGRLQSLQTYVTQQLIRAAEIRASANLAATKMSECVLGQSKRVDFCGKGYHLMSFPQSAPHGVVFLHVTYVPAQEKNFTTAPAICHDGKAHFPREGVFVSNGTHWFVTQRNFCEPQIITTDNTFVSGNCDVVIGIVNNTVYDPLQPELDSFKEELDKYFKNHTSPDVDLGDISGINASVVNIQKEIDRLNEVAKNLNESLIDLQELGKYEQYIKGGSGYIPEAPRDGQAYVRKDGEWVLLSTFL

SEQ ID NO: 6052 - protein, 1241 aa, Artificial Sequence
  SARS-CoV-2/USA/CruiseA-23/2020__EPI_ISL_414482 spike protein (1-1211)(I714C_Y1110C) Foldon construct
MFVFLVLLPLVSSQCVNLTTRTQLPPAYTNSFTRGVYYPDKVFRSSVLHSTQDLFLPFFSNVTWFHAIHVSGTNGTKRFDNPVLPFNDGVYFASTEKSNIIRGWIFGTTLDSKTQSLLIVNNATNVVIKVCEFQFCNDPFLGVYYHKNNKSWMESEFRVYSSANNCTFEYVSQPFLMDLEVKQGNFKNLREFVFKNIDGYFKIYSKHTPINLVRDLPQGFSALEPLVDLPIGINITRFQTLLALHRSYLTPGDSSSGWTAGAAAYYVGYLQPRTFLLKYNENGTITDAVDCALDPLSETKCTLKSFTVEKGIYQTSNFRVQPTESIVRFPNITNLCPFGEVFNATRFASVYAWNRKRISNCVADYSVLYNSASFSTFKCYGVSPTKLNDLCFTNVYADSFVIRGDEVRQIAPGQTGKIADYNYKLPDDFTGCVIAWNSNNLDSKVGGNYNYLYRLFRKSNLKPFERDISTEIYQAGSTPCNGVEGFNCYFPLQSYGFQPTNGVGYQPYRVVVLSFELLHAPATVCGPKKSTNLVKNKCVNFNFNGLTGTGVLTESNKKFLPFQQFGRDIADTTDAVRDPQTLEILDITPCSFGGVSVITPGTNTSNQVAVLYQDVNCTEVPVAIHADQLTPTWRVYSTGSNVFQTRAGCLIGAEHVNNSYECDIPIGAGICASYQTQTNSPRRARSVASQSIIAYTMSLGAENSVAYSNNSIACPTNFTISVTTEILPVSMTKTSVDCTMYICGDSTECSNLLLQYGSFCTQLNRALTGIAVEQDKNTQEVFAQVKQIYKTPPIKDFGGFNFSQILPDPSKPSKRSFIEDLLFNKVTLADAGFIKQYGDCLGDIAARDLICAQKFNGLTVLPPLLTDEMIAQYTSALLAGTITSGWTFGAGAALQIPFAMQMAYRFNGIGVTQNVLYENQKLIANQFNSAIGKIQDSLSSTASALGKLQDVVNQNAQALNTLVKQLSSNFGAISSVLNDILSRLDKVEAEVQIDRLITGRLQSLQTYVTQQLIRAAEIRASANLAATKMSECVLGQSKRVDFCGKGYHLMSFPQSAPHGVVFLHVTYVPAQEKNFTTAPAICHDGKAHFPREGVFVSNGTHWFVTQRNFCEPQIITTDNTFVSGNCDVVIGIVNNTVYDPLQPELDSFKEELDKYFKNHTSPDVDLGDISGINASVVNIQKEIDRLNEVAKNLNESLIDLQELGKYEQYIKGGSGYIPEAPRDGQAYVRKDGEWVLLSTFL

SEQ ID NO: 6053 - protein, 1241 aa, Artificial Sequence
  SARS-CoV-2/Hong Kong/case85_VM20002868/2020__EPI_ISL_414519 spike protein (1-1211)(I714C_Y1110C) Foldon construct
MFVFLVLVPLVSSQCVNLTTRTQLPPAYTNSFTRGVYYPDKVFRSSVLHSTQDLFLPFFSNVTWFHAIHVSGTNGTKRFDNPVLPFNDGVYFASTEKSNIIRGWIFGTTLDSKTQSLLIVNNATNVVIKVCEFQFCNDPFLGVYYHKNNKSWMESEFRVYSSANNCTFEYVSQPFLMDLEGKQGNFKNLREFVFKNIDGYFKIYSKHTPINLVRDLPQGFSALEPLVDLPIGINITRFQTLLALHRSYLTPGDSSSGWTAGAAAYYVGYLQPRTFLLKYNENGTITDAVDCALDPLSETKCTLKSFTVEKGIYQTSNFRVQPTESIVRFPNITNLCPFGEVFNATRFASVYAWNRKRISNCVADYSVLYNSASFSTFKCYGVSPTKLNDLCFTNVYADSFVIRGDEVRQIAPGQTGKIADYNYKLPDDFTGCVIAWNSNNLDSKVGGNYNYLYRLFRKSNLKPFERDISTEIYQAGSTPCNGVEGFNCYFPLQSYGFQPTNGVGYQPYRVVVLSFELLHAPATVCGPKKSTNLVKNKCVNFNFNGLTGTGVLTESNKKFLPFQQFGRDIADTTDAVRDPQTLEILDITPCSFGGVSVITPGTNTSNQVAVLYQDVNCTEVPVAIHADQLTPTWRVYSTGSNVFQTRAGCLIGAEHVNNSYECDIPIGAGICASYQTQTNSPRRARSVASQSIIAYTMSLGAENSVAYSNNSIACPTNFTISVTTEILPVSMTKTSVDCTMYICGDSTECSNLLLQYGSFCTQLNRALTGIAVEQDKNTQEVFAQVKQIYKTPPIKDFGGFNFSQILPDPSKPSKRSFIEDLLFNKVTLADAGFIKQYGDCLGDIAARDLICAQKFNGLTVLPPLLTDEMIAQYTSALLAGTITSGWTFGAGAALQIPFAMQMAYRFNGIGVTQNVLYENQKLIANQFNSAIGKIQDSLSSTASALGKLQDVVNQNAQALNTLVKQLSSNFGAISSVLNDILSRLDKVEAEVQIDRLITGRLQSLQTYVTQQLIRAAEIRASANLAATKMSECVLGQSKRVDFCGKGYHLMSFPQSAPHGVVFLHVTYVPAQEKNFTTAPAICHDGKAHFPREGVFVSNGTHWFVTQRNFCEPQIITTDNTFVSGNCDVVIGIVNNTVYDPLQPELDSFKEELDKYFKNHTSPDVDLGDISGINASVVNIQKEIDRLNEVAKNLNESLIDLQELGKYEQYIKGGSGYIPEAPRDGQAYVRKDGEWVLLSTFL

SEQ ID NO: 6054 - protein, 1241 aa, Artificial Sequence; identical to SEQ ID NO: 6044
  SARS-CoV-2/England/200990660/2020__EPI_ISL_414523 spike protein (1-1211)(I714C_Y1110C) Foldon construct

SEQ ID NO: 6055 - protein, 1241 aa, Artificial Sequence
  SARS-CoV-2/Australia/NSW09/2020__EPI_ISL_413595 spike protein (1-1211)(I714C_Y1110C) Foldon construct
MFVFLVLLPLVSSQCVNLTTRTQLPPAYTNSFTRGVYYPDKVFRSSVLHSTQDLFLPFFSNVTWFHAIHVSGTNGTKRFDNPVLPFNDGVYFASTEKSNIIRGWIFGTTLDSKTQSLLIVNNATNVVIKVCEFQFCNDPFLGVYYHKNNKSWMESEFRVYSSANNCTFEYVSQPFLMDLEGKQGNFKNLREFVFKNIDGYFKIYSKHTPINLVRDLPQGFSALEPLVDLPIGINITRFQTLLALHRSYLTPGDSSSGWTAGAAAYYVGYLQPRTFLLKYNENGTITDAVDCALDPLSETKCTLKSFTVEKGIYQTSNFRVQPTESIVRFPNITNLCPFGEVFNATRFASVYAWNRKRISNCVADYSVLYNSASFSTFKCYGVSPTKLNDLCFTNVYADSFVIRGDEVRQIAPGQTGKIADYNYKLPDDFTGCVIAWNSNNLDSKVGGNYNYLYRLFRKSNLKPFERDISTEIYQAGSTPCNGVEGFNCYFPLQSYGFQPTNGVGYQPYRVVVLSFELLHAPATVCGPKKSTNLVKNKCVNFNFNGLTGTGVLTESNKKFLPFQQFGRDIADTTDAVRDPQTLEILDITPCSFGGVSVITPGTNTSNQVAVLYQDVNCTEVPVAIHADQLTPTWRVYSTGSNVFQTRAGCLIGAEHVNNSYECDIPIGAGICASYQTQTNSPRRARSVASQSIIAYTMSLGAENSVAYSNNSIACPTNFTISVTTEILPVSMTKTSVDCTMYICGDSTECSNLLLQYGSFCTQLNRALTGIAVEQDKNTQEVFAQVKQIYKTPPIKDFGGFNFSQILPDPSKPSKRSFIEDLLFNKVTLADAGFIKQYGDCLGDIAARDLICAQKFNGLTVLPPLLTDEMIAQYTSALLAGTITSGWTFGAGAALQIPFAMQMAYRFNGIGVTQNVLYENQKLIANQFNSAIGKIQDSLSFTASALGKLQDVVNQNAQALNTLVKQLSSNFGAISSVLNDILSRLDKVEAEVQIDRLITGRLQSLQTYVTQQLIRAAEIRASANLAATKMSECVLGQSKRVDFCGKGYHLMSFPQSAPHGVVFLHVTYVPAQEKNFTTAPAICHDGKAHFPREGVFVSNGTHWFVTQRNFCEPQIITTDNTFVSGNCDVVIGIVNNTVYDPLQPELDSFKEELDKYFKNHTSPDVDLGDISGINASVVNIQKEIDRLNEVAKNLNESLIDLQELGKYEQYIKGGSGYIPEAPRDGQAYVRKDGEWVLLSTFL

SEQ ID NO: 6056 - protein, 1241 aa, Artificial Sequence; identical to SEQ ID NO: 6036
  SARS-CoV-2/Australia/NSW10/2020__EPI_ISL_413596 spike protein (1-1211)(I714C_Y1110C) Foldon construct

SEQ ID NO: 6057 - protein, 1241 aa, Artificial Sequence
  SARS-CoV-2/Switzerland/1000477797/2020__EPI_ISL_413023 spike protein (1-1211)(I714C_Y1110C) Foldon construct
MFVFLVLLPLVSSQCVNLTTRTQLPPAYTNSFTRGVYYPDKVFRSSVLHSTQDLFLPFFSNVTWFHAIHVSGTNGTKRFDNPVLPFNDGVYFASTEKSNIIRGWIFGTTLDSKTQSLLIVNNATNVVIKVCEFQFCNDPFLGVYYHKNNKSWMESEFRVYSSANNCTFEYVSQPFLMDLEGKQGNFKNLREFVFKNIDGYFNIYSKHTPINLVRDLPQGFSALEPLVDLPIGINITRFQTLLALHRSYLTPGDSSSGWTAGAAAYYVGYLQPRTFLLKYNENGTITDAVDCALDPLSETKCTLKSFTVEKGIYQTSNFRVQPTESIVRFPNITNLCPFGEVFNATRFASVYAWNRKRISNCVADYSVLYNSASFSTFKCYGVSPTKLNDLCFTNVYADSFVIRGDEVRQIAPGQTGKIADYNYKLPDDFTGCVIAWNSNNLDSKVGGNYNYLYRLFRKSNLKPFERDISTEIYQAGSTPCNGVEGFNCYFPLQSYGFQPTNGVGYQPYRVVVLSFELLHAPATVCGPKKSTNLVKNKCVNFNFNGLTGTGVLTESNKKFLPFQQFGRDIADTTDAVRDPQTLEILDITPCSFGGVSVITPGTNTSNQVAVLYQGVNCTEVPVAIHADQLTPTWRVYSTGSNVFQTRAGCLIGAEHVNNSYECDIPIGAGICASYQTQTNSPRRARSVASQSIIAYTMSLGAENSVAYSNNSIACPTNFTISVTTEILPVSMTKTSVDCTMYICGDSTECSNLLLQYGSFCTQLNRALTGIAVEQDKNTQEVFAQVKQIYKTPPIKDFGGFNFSQILPDPSKPSKRSFIEDLLFNKVTLADAGFIKQYGDCLGDIAARDLICAQKFNGLTVLPPLLTDEMIAQYTSALLAGTITSGWTFGAGAALQIPFAMQMAYRFNGIGVTQNVLYENQKLIANQFNSAIGKIQDSLSSTASALGKLQDVVNQNAQALNTLVKQLSSNFGAISSVLNDILSRLDKVEAEVQIDRLITGRLQSLQTYVTQQLIRAAEIRASANLAATKMSECVLGQSKRVDFCGKGYHLMSFPQSAPHGVVFLHVTYVPAQEKNFTTAPAICHDGKAHFPREGVFVSNGTHWFVTQRNFCEPQIITTDNTFVSGNCDVVIGIVNNTVYDPLQPELDSFKEELDKYFKNHTSPDVDLGDISGINASVVNIQKEIDRLNEVAKNLNESLIDLQELGKYEQYIKGGSGYIPEAPRDGQAYVRKDGEWVLLSTFL

SEQ ID NO: 6058 - protein, 1241 aa, Artificial Sequence
  SARS-CoV-2/Belgium/BA-02291/2020__EPI_ISL_415159 spike protein (1-1211)(I714C_Y1110C) Foldon construct
MFVFLVLLPLVSSQCVNLTTRTQLPPAYTNSFTRGVYYPDKVFRSSVLHSTQDLFLPFFSNVTWFHAIHVSGTNGTKRFDNPVLPFNDGVYFASTEKSNIIRGWIFGTTLDSKTQSLLIVNNATNVVIKVCEFQFCNDPFLGVYYHKNNKSWMESEFRVYSSANNCTFEYVSQPFLMDLEGKQGNFKNLREFVFKNIDGYFKIYSKHTPINLVRDLPQGFSALEPLVDLPIGINITRFQTLLALHRSYLTPGDSSSGWTAGAAAYYVGYLQPRTFLLKYNENGTITDAVDCALDPLSETKCTLKSFTVEKGIYQTSNFRVQPTESIVRFPNITNLCPFGEVFNATRFASVYAWNRKRISNCVADYSVLYNSASFSTFKCYGVSPTKLNDLCFTNVYADSFVIRGDEVRQIAPGQTGKIADYNYKLPDDFTGCVIAWNSNNLDSKVGGNYNYLYRLFRRSNLKPFERDISTEIYQAGSTPCNGVEGFNCYFPLQSYGFQPTNGVGYQPYRVVVLSFELLPAPATVCGPKKSTNLVKNKCVNFNFNGLTGTGVLTESNKKFLPFQQFGRDIADTTDAVRDPQTLEILDITPCSFGGVSVITPGTNTSNQVAVLYQGVNCTEVPVAIHADQLTPTWRVYSTGSNVFQTRAGCLIGAEHVNNSYECDIPIGAGICASYQTQTNSPRRARSVASQSIIAYTMSLGAENSVAYSNNSIACPTNFTISVTTEILPVSMTKTSVDCTMYICGDSTECSNLLLQYGSFCTQLNRALTGIAVEQDKNTQEVFAQVKQIYKTPPIKDFGGFNFSQILPDPSKPSKRSFIEDLLFNKVTLADAGFIKQYGDCLGDIAARDLICAQKFNGLTVLPPLLTDEMIAQYTSALLAGTITSGWTFGAGAALQIPFAMQMAYRFNGIGVTQNVLYENQKLIANQFNSAIGKIQDSLSSAAPALGKLQDVVNQNAQALNTLVKQLSSNFGAISSVLNDILSRLDKVEAEVQIDRLITGRLQSLQTYVTQQLIRAAEIRASANLAATKMSECVLGQSKRVDFCGKGYHLMSFPQSAPHGVVFLHVTYVPAQEKNFTTAPAICHDGKAHFPREGVFVSNGTHWFVTQRNFCEPQIITTDNTFVSGNCDVVIGIVNNTVYDPLQPELDSFKEELDKYFKNHTSPDVDLGDISGINASVVNIQKEIDRLNEVAKNLNESLIDLQELGKYEQYIKGGSGYIPEAPRDGQAYVRKDGEWVLLSTFL

SEQ ID NO: 6059 - protein, 1241 aa, Artificial Sequence
  SARS-CoV-2/USA/WA8-UW5/2020__EPI_ISL_413486 spike protein (1-1211)(I714C_Y1110C) Foldon construct
MFVFLVLLPLVSSQCVNLTTRTQLPPAYTNSFTRGVYYPDKVFRSSVLHSTQDLFLPFFSNVTWFHAIHVSGTNGTKRFDNPVLPFNDGVYFASTEKSNIIRGWIFGTTLDSKTQSLLIVNNATNVVIKVCEFQFCNDPFLGVYYHKNNKSWMESEFRVYSSANNCTFEYVSQPFLMDLEGKQGNFKNLREFVFKNIDGYFKIYSKHTPINLVRDLPQGFSALEPLVDLPIGINITRFQTLLALHRSYLTPGDSSSGWTAGAAAYYVGYLQPRTFLLKYNENGTITDAVDCALDPLSETKCTLKSFTVEKGIYQTSNFRVQPTESIVRFPNITNLCPFGEVFNATRFASVYAWNRKRISNCVADYSVLYNSASFSTFKCYGVSPTKLNDLCFTNVYADSFVIRGDEVRQIAPGQTGKIADYNYKLPDDFTGCVIAWNSNNLDSKVGGNYNYLYRLFRKSNLKPFERDISTEIYQAGSTPCNGVEGFNCYFPLQSYGFQPTNGVGYQPYRVVVLSFELLHAPATVCGPKKSTNLVKNKCVNFNFNGLTGTGVLTESNKKFLPFQQFGRDIADTTDAVRDPQTLEILDITPCSFGGVSVITPGTNTSNQVAVLYQDVNCTEVPVAIHADQLTPTWRVYSTGSNVFQTRAGCLIGAEYVNNSYECDIPIGAGICASYQTQTNSPRRARSVASQSIIAYTMSLGAENSVAYSNNSIACPTNFTISVTTEILPVSMTKTSVDCTMYICGDSTECSNLLLQYGSFCTQLNRALTGIAVEQDKNTQEVFAQVKQIYKTPPIKDFGGFNFSQILPDPSKPSKRSFIEDLLFNKVTLADAGFIKQYGDCLGDIAARDLICAQKFNGLTVLPPLLTDEMIAQYTSALLAGTITSGWTFGAGAALQIPFAMQMAYRFNGIGVTQNVLYENQKLIANQFNSAIGKIQDSLSSTASALGKLQDVVNQNAQALNTLVKQLSSNFGAISSVLNDILSRLDKVEAEVQIDRLITGRLQSLQTYVTQQLIRAAEIRASANLAATKMSECVLGQSKRVDFCGKGYHLMSFPQSAPHGVVFLHVTYVPAQEKNFTTAPAICHDGKAHFPREGVFVSNGTHWFVTQRNFCEPQIITTDNTFVSGNCDVVIGIVNNTVYDPLQPELDSFKEELDKYFKNHTSPDVDLGDISGINASVVNIQKEIDRLNEVAKNLNESLIDLQELGKYEQYIKGGSGYIPEAPRDGQAYVRKDGEWVLLSTFL

SEQ ID NO: 6060 - protein, 1241 aa, Artificial Sequence
  SARS-CoV-2/England/20102000506/2020__EPI_ISL_415147 spike protein (1-1211)(I714C_Y1110C) Foldon construct
MFVFLVLLPLVSSQCVNLTTRTQLPPAYTNSFTRGVYYPDKVFRSSVLHSTQDLFLPFFSNVTWFHAIHVSGTNGTKRFDNPVLPFNDGVYFASTEKSNIIRGWIFGTTLDSKTQSLLIVNNATNVVIKVCEFQFCNDPFLGVYYHKNNKSWMESEFRVYSSANNCTFEYVSQPFLMDLEGKQGNFKNLREFVFKNIDGYFKIYSKHTPINLVRDLPQGFSALEPLVDLPIGINITRFQTLLALHRSYLTPGDSSSGWTAGAAAYYVGYLQPRTFLLKYNENGTITDAVDCALDPLSETKCTLKSFTVEKGIYQTSNFRVQPTESIVRFPNITNLCPFGEVFNATRFASVYAWNRKRISNCVADYSVLYNSASFSTFKCYGVSPTKLNDLCFTNVYADSFVIRGDEVRQIAPGQTGKIADYNYKLPDDFTGCVIAWNSNNLDSKVGGNYNYLYRLFRKSNLKPFERDISTEIYQAGSTPCNGVEGFNCYFPLQSYGFQPTNGVGYQPYRVVVLSFELLHAPATVCGPKKSTNLVKNKCVNFNFNGLTGTGVLTESNKKFLPFQQFGRDIADTTDAVRDPQTLEILDITPCSFGGVSVITPGTNTSNQVAVLYQGVNCTEVPVAIHADQLTPTWRVYSTGSNVFQTRAGCLIGAEHVNNSYECDIPIGAGICASYQTQTNSPRRARSVASQSIIAYTMSLGAENSVAYSNNSIACPTNFTISVTTEILPVSMTKTSVDCTMYICGDSTECSNLLLQYGSFCTQLNRALTGIAVEQDKNTQEVFAQVKQIYKTPPIKDFGGFNFSQILPDPSKPSKRSFIEDLLFNKVTLADAGFIKQYGYCLGDIAARDLICAQKFNGLTVLPPLLTDEMIAQYTSALLAGTITSGWTFGAGAALQIPFAMQMAYRFNGIGVTQNVLYENQKLIANQFNSAIGKIQDSLSSTASALGKLQDVVNQNAQALNTLVKQLSSNFGAISSVLNDILSRLDKVEAEVQIDRLITGRLQSLQTYVTQQLIRAAEIRASANLAATKMSECVLGQSKRVDFCGKGYHLMSFPQSAPHGVVFLHVTYVPAQEKNFTTAPAICHDGKAHFPREGVFVSNGTHWFVTQRNFCEPQIITTDNTFVSGNCDVVIGIVNNTVYDPLQPELDSFKEELDKYFKNHTSPDVDLGDISGINASVVNIQKEIDRLNEVAKNLNESLIDLQELGKYEQYIKGGSGYIPEAPRDGQAYVRKDGEWVLLSTFL

SEQ ID NO: 6061 - protein, 1241 aa, Artificial Sequence
  SARS-CoV-2/Belgium/VAG-03013/2020__EPI_ISL_415155 spike protein (1-1211)(I714C_Y1110C) Foldon construct
MFVFLVLLPLVSSQCVNLTTRTQLPPAYTNSFTRGVYYPDKVFRSSVLHSTQDLFLPFFSNVTWFHAIHVSGTNGTKRFDNPVLPFNDGVYFASTEKSNIIRGWIFGTTLDSKTQSLLIVNNATNVVIKVCEFQFCNDPFLGVYYHKNNKSWMESEFRVYSSANNCTFEYVSQPFLMDLEGKQGNFKNLREFVFKNIDGYFKIYSKHTPINLVRDLPQGFSALEPLVDLPIGINITRFQTLLALHRSYLTPGDSSSGWTAGAAAYYVGYLQPRTFLLKYNENGTITDAVDCALDPLSETKCTLKSFTVEKGIYQTSNFRVQPTESIVRFPNITNLCPFGEVFNATRFASVYAWNRKRISNCVADYSVLYNSASFSTFKCYGVSPTKLNDLCFTNVYADSFVIRGDEVRQIAPGQTGKIADYNYKLPDDFTGCVIAWNSNNLDSKVGGNYNYLYRLFRKSNLKPFERDISTEIYQAGSTPCNGVEGFNCYFPLQSYGFQPTNGVGYQPYRVVVLSFELLHAPATVCGPKKSTNLVKNKCVNFNFNGLTGTGVLTESNKKFLPFQQFGRDIADTTDAVRDPQTLEILDITPCSFGGVSVITPGTNTSNQVAVLYQGVNCTEVPVAIHADQLTPTWRVYSTGSNVFQTRAGCLIGAEHVNNSYECDIPIGAGICASYQTQTNSPRRARSVASQSIIAYTMSLGAENSVAYSNNSIACPTNFTISVTTEILPVSMTKTSVDCTMYICGDSTECSNLLLQYGSFCTQLNRALTGIAVEQDKNTQEVFAQVKQIYKTPPIKDFGGFNFSQILPDPSKPSKRSFIEDLLFNKVTLADAGFIKQYGDCLGDIAARDLICAQKFNGLTVLPPLLTDEMIAQYTSALLAGTITSGWTFGAGAALQIPFAMQMAYRFNGIGVTQNVLYENQKLIANQFNSAIGKIQDSLSSTATALGKLQDVVNQNAQALNTLVKQLSSNFGAISSVLNDILSRLDKVEAEVQIDRLITGRLQSLQTYVTQQLIRAAEIRASANLAATKMSECVLGQSKRVDFCGKGYHLMSFPQSAPHGVVFLHVTYVPAQEKNFTTAPAICHDGKAHFPREGVFVSNGTHWFVTQRNFCEPQIITTDNTFVSGNCDVVIGIVNNTVYDPLQPELDSFKEELDKYFKNHTSPDVDLGDISGINASVVNIQKEIDRLNEVAKNLNESLIDLQELGKYEQYIKGGSGYIPEAPRDGQAYVRKDGEWVLLSTFL

SEQ ID NO: 6062 - protein, 1241 aa, Artificial Sequence
  SARS-CoV-2/Belgium/BC-03016/2020__EPI_ISL_415157 spike protein (1-1211)(I714C_Y1110C) Foldon construct
MFVFLVLLPLVSSQCVNLTTRTQLPPAYTNSFTRGVYYPDKVFRSSVLHSTQDLFLPFFSNVTWFHAIHVSGTNGTKRFDNPVLPFNDGVYFASTEKSNIIRGWIFGTTLDSKTQSLLIVNNATNVVIKVCEFQFCNDPFLGVYYHKNNKSWMESEFRVYSSANNCTFEYVSQPFLMDLEGKQGNFKNLREFVFKNIDGYFKIYSKHTPINLVRDLPQGFSALEPLVDLPIGINITRFQTLLALHRSYLTPGDSSSGWTAGAAAYYVGYLQPRTFLLKYNENGTITDAVDCALDPLSETKCTLKSFTVEKGIYQTSNFRVQPTESIVRFPNITNLCPFGEVFNATRFASVYAWNRKRISNCVADYSVLYNSASFSTFKCYGVSPTKLNDLCFTNVYADSFVIRGDEVRQIAPGQTGKIADYNYKLPDDFTGCVIAWNSNNLDSKVGGNYNYLYRLFRKSNLKPFERDISTEIYQAGSTPCNGVEGFNCYFPLQSYGFQPTNGVGYQPYRVVVLSFELLHAPATVCGPKKSTNLVKNKCVNFNFNGLTGTGVLTESNKKFLPFQQFGRDIADTTDAVRDPQTLEILDITPCSFGGVSVITPGTNTSNQVAVLYQGVNCTEVPVAIHADQLTPTWRVYSTGSNVFQTRAGCLIGAEHVNNSYECDIPIGAGICASYQTQTNSPRRARSVASQSIIAYTMSLGAENSVAYSNNSIACPTNFTISVTTEILPVSMTKTSVDCTMYICGDSTECSNLLLQYGSFCTQLNRALTGIAVEQDKNTQEVFAQVKQIYKTPPIKDFGGFNFSQILPDPSKPSKRSFIEDLLFNKVTLADAGFIKQYGDCLGDIAARDLICAQKFNGLTVLPPLLTDEMIAQYTSALLAGTITSGWTFGAGAALQIPFAMQMAYRFNGIGVTQNVLYENQKLIANQFNSAIGKIQDSLSSTAPALGKLQDVVNQNAQALNTLVKQLSSNFGAISSVLNDILSRLDKVEAEVQIDRLITGRLQSLQTYVTQQLIRAAEIRASANLAATKMSECVLGQSKRVDFCGKGYHLMSFPQSAPHGVVFLHVTYVPAQEKNFTTAPAICHDGKAHFPREGVFVSNGTHWFVTQRNFCEPQIITTDNTFVSGNCDVVIGIVNNTVYDPLQPELDSFKEELDKYFKNHTSPDVDLGDISGINASVVNIQKEIDRLNEVAKNLNESLIDLQELGKYEQYIKGGSGYIPEAPRDGQAYVRKDGEWVLLSTFL

SEQ ID NO: 6063 - protein, 1241 aa, Artificial Sequence
  SARS-CoV-2/Germany/BavPat3/2020__EPI_ISL_414521 spike protein (1-1211)(I714C_Y1110C) Foldon construct
MFVFLVLLPLVSSQCVNLTTRTQLPPAYTNSFTRGVYYPDKVFRSSVLHSTQDLFLPFFSNVTWFHAIHVSGTNGTKRFDNPVLPFNDGVYFASTEKSNIIRGWIFGTTLDSKTQSLLIVNNATNVVIKVCEFQFCNDPFLGVYYHKNNKSWMESEFRVYSSANNCTFEYVSQPFLMDLEGKQGNFKNLREFVFKNIDGYFKIYSKHTPINLVRDLPQGFSALEPLVDLPIGINITRFQTLLALHRSYLTPGDSSSGWTAGAAAYYVGYLQPRTFLLKYNENGTITDAVDCALDPLSETKCTLKSFTVEKGIYQTSNFRVQPTESIVRFPNITNLCPFGEVFNATRFASVYAWNRKRISNCVADYSVLYNSASFSTFKCYGVSPTKLNDLCFTNVYADSFVIRGDEVRQIAPGQTGKIADYNYKLPDDFTGCVIAWNSNNLDSKVGGNYNYLYRLFRKSNLKPFERDISTEIYQAGSTPCNGVEGFNCYFPLQSYGFQPTNGVGYQPYRVVVLSFELLHAPATVCGPKKSTNLVKNKCVNFNFNGLTGTGVLTESNKKFLPFQQFGRDIADTTDAVRDPQTLEILDITPCSFGGVSVITPGTNTSNQVAVLYQDVNCTEVPVAIHADQLTPTWRVYSTGSNVFQTRAGCLIGAEHVNNSYECDIPIGAGICASYQTQTNSPRRARSVASQSIIAYTMSLGAENSVAYSNNSIACPTNFTISVTTEILPVSMTKTSVDCTMYICGDSTECSNLLLQYGSFCTQLNRALTGIAVEQDKNTQQVFAQVKQIYKTPPIKDFGGFNFSQILPDPSKPSKRSFIEDLLFNKVTLADAGFIKQYGDCLGDIAARDLICAQKFNGLTVLPPLLTDEMIAQYTSALLAGTITSGWTFGAGAALQIPFAMQMAYRFNGIGVTQNVLYENQKLIANQFNSAIGKIQDSLSSTASALGKLQDVVNQNAQALNTLVKQLSSNFGAISSVLNDILSRLDKVEAEVQIDRLITGRLQSLQTYVTQQLIRAAEIRASANLAATKMSECVLGQSKRVDFCGKGYHLMSFPQSAPHGVVFLHVTYVPAQEKNFTTAPAICHDGKAHFPREGVFVSNGTHWFVTQRNFCEPQIITTDNTFVSGNCDVVIGIVNNTVYDPLQPELDSFKEELDKYFKNHTSPDVDLGDISGINASVVNIQKEIDRLNEVAKNLNESLIDLQELGKYEQYIKGGSGYIPEAPRDGQAYVRKDGEWVLLSTFL

SEQ ID NO: 6064 - protein, 1241 aa, Artificial Sequence
  SARS-CoV-2/France/HF1805/2020__EPI_ISL_414628 spike protein (1-1211)(I714C_Y1110C) Foldon construct
MFVFLVLLPLVSSQCVNLTTRTQLPPAYTNSFTRGVYYPDKVFRSSVLHSTQDLFLPFFSNVTWFHAIHVSGTNGTKRFDNPVLPFNDGVYFASTEKSNIIRGWIFGTTLDSKTQSLLIVNNATNVVIKVCEFQFCNDPFLGVYYHKNNKSWMESEFRVYSSANNCTFEYVSQPFLMDLEGKQGNFKNLREFVFKNIDGYFKIYSKHTPINLVRDLPQGFSALEPLVDLPIGINITRFQTLLALHRSYLTPGDSSSGWTAGAAAYYVGYLQPRTFLLKYNENGTITDAVDCALDPLSETKCTLKSFTVEKGIYQTSNFRVQPTESIVRFPNITNLCPFGEVFNATRFASVYAWNRKRISNCVADYSVLYNSASFSTFKCYGVSPTKLNDLCFTNVYADSFVIRGDEVRQIAPGQTGKIADYNYKLPDDFTGCVIAWNSNNLDSKVGGNYNYLYRLFRKSNLKPFERDISTEIYQAGSTPCNGVEGFNCYFPLQSYGFQPTNGVGYQPYRVVVLSFELLHAPATVCGPKKSTNLVKNKCVNFNFNGLTGTGVLTESNKKFLPFQQFGRDIADTTDAVRDPQTLEILDITPCSFGGVSVITPGTNTSNQVAVLYQGVNCTEVPVAIHADQLTPTWRVYSTGSNVFQTRAGCLIGAEHVNNSYECDIPIGAGICASYQTQTNSPRRARSVASQSIIAYTMSLGAENSVAYSNNSIACPTNFTISVTTEILPVSMTKTSVDCTMYICGDSTECSNLLLQYGSFCTQLNRALTGIAVEQDKNTQEVFAQVKQIYKTPPIKDFGGFNFSQILPDPSKPSKRSFIEDLLFNKVTLADAGFIKQYGDCLGDIAARDLICAQKFNGLTVLPPLLTDEMIAQYTSALLAGTITSGWTFGAGAALQIPFAMQMAYRFNGIGVTQNVLYENQKLIANQFNSAIGKIQDSLSSTASALGKLQDVVNQNAQALNTLVKQLSSNFGAISSVLNDILSRLDKVEAEVQIDRLITGRLQSLQTYVTQQLIRAAEIRASANLAATKMSECVLGQSKRVDFCGKGYHLMSFPQSAPHGVVFLHVTYVPAQEKNFTTAPAICHDGKAHFPREGVFVSNGTHWFVTQRNFCEPQIITTDNTFVSGNCDVVIGVVNNTVYDPLQPELDSFKEELDKYFKNHTSPDVDLGDISGINASVVNIQKEIDRLNEVAKNLNESLIDLQELGKYEQYIKGGSGYIPEAPRDGQAYVRKDGEWVLLSTFL

SEQ ID NO: 6065 - protein, 1241 aa, Artificial Sequence
  SARS-CoV-2/Netherlands/ZuidHolland_9/2020__EPI_ISL_414445 spike protein (1-1211)(I714C_Y1110C) Foldon construct
MFVFLVLLPLVSSQCVNLTTRTQLPPAYTNSFTRGVYYPDKVFRSSVLHSTQDLFLPFFSNVTWFHAIHVSGTNGTKRFDNPVLPFNDGVYFASTEKSNIIRGWIFGTTLDSKTQSLLIVNNATNVVIKVCEFQFCNDPFLGVYYHKNNKSWMESEFRVYSSANNCTFEYVSQPFLMDLEGKQGNFKNLREFVFKNIDGYFKIYSKHTPINLVRDLPQGFSALEPLVDLPIGINITRFQTLLALHRSYLTPGDSSSGWTAGAAAYYVGYLQPRTFLLKYNENGTITDAVDCALDPLSETKCTLKSFTVEKGIYQTSNFRVQPTESIVRFPNITNLCPFGEVFNATRFASVYAWNRKRISNCVADYSVLYNSASFSTFKCYGVSPTKLNDLCFTNVYADSFVIRGDEVRQIAPGQTGKIADYNYKLPDDFTGCVIAWNSNNLDSKVGGNYNYLYRLFRKSNLKPFERDISTEIYQAGSTPCNGVEGFNCYFPLQSYGFQPTNGVGYQPYRVVVLSFELLHAPATVCGPKKSTNLVKNKCVNFNFNGLTGTGVLTESNKKFLPFQQFGRDIADTTDAVRDPQTLEILDITPCSFGGVSVITPGTNTSNQVAVLYQGVNCTEVPVAIHADQLTPTWRVYSTGSNVFQTRAGCLIGAEHVNNSYECDIPIGAGICASYQTQTNSPRRARSVASQSIIAYTMSLGAENSVAYSNNSIACPTNFTISVTTEILPVSMTKTSVDCTMYICGDSTECSNLLLQYGSFCTQLNRALTGIAVEQDKNTQEVFAQVKQIYKTPPIKDFGGFNFSQILPDPSKPSKRSFIEDLLFNKVTLADAGFIKQYGDCLGDIAARDLICVQKFNGLTVLPPLLTDEMIAQYTSALLAGTITSGWTFGAGAALQIPFAMQMAYRFNGIGVTQNVLYENQKLIANQFNSAIGKIQDSLSSTASALGKLQDVVNQNAQALNTLVKQLSSNFGAISSVLNDILSRLDKVEAEVQIDRLITGRLQSLQTYVTQQLIRAAEIRASANLAATKMSECVLGQSKRVDFCGKGYHLMSFPQSAPHGVVFLHVTYVPAQEKNFTTAPAICHDGKAHFPREGVFVSNGTHWFVTQRNFCEPQIITTDNTFVSGNCDVVIGIVNNTVYDPLQPELDSFKEELDKYFKNHTSPDVDLGDISGINASVVNIQKEIDRLNEVAKNLNESLIDLQELGKYEQYIKGGSGYIPEAPRDGQAYVRKDGEWVLLSTFL

SEQ ID NO: 6066 - protein, 1241 aa, Artificial Sequence
  SARS-CoV-2/Finland/FIN03032020A/2020__EPI_ISL_413602 spike protein (1-1211)(I714C_Y1110C) Foldon construct
MFVFLVLLPLVSSQCVNLTTRTQLPPAYTNSFTRGVYYPDKVFRSSVLHSTQDLFLPFFSNVTWFHAIHVSGTNGTKRFDNPVLPFNDGVYFASTEKSNIIRGWIFGTTLDSKTQSLLIVNNATNVVIKVCEFQFCNDPFLGVYYHKNNKSWMESEFRVYSSANNCTFEYVSQPFLMDLEGKQGNFKNLREFVFKNIDGYFKIYSKHTPINLVRDLPQGFSALEPLVDLPIGINITRFQTLLALHRSYLTPGDSSSGWTAGAAAYYVGYLQPRTFLLKYNENGTITDAVDCALDPLSETKCTLKSFTVEKGIYQTSNFRVQPTESIVRFPNITNLCPFGEVFNATRFASVYAWNRKRISNCVADYSVLYNSASFSTFKCYGVSPTKLNDLCFTNVYADSFVIRGDEVRQIAPGQTGKIADYNYKLPDDFTGCVISWNSNNLDSKVGGNYNYLYRLFRKSNLKPFERDISTEIYQAGSTPCNGVEGFNCYFPLQSYGFQPTNGVGYQPYRVVVLSFELLHAPATVCGPKKSTNLVKNKCVNFNFNGLTGTGVLTESNKKFLPFQQFGRDIADTTDAVRDPQTLEILDITPCSFGGVSVITPGTNTSNQVAVLYQGVNCTEVPVAIHADQLTPTWRVYSTGSNVFQTRAGCLIGAEHVNNSYECDIPIGAGICASYQTQTNSPRRARSVASQSIIAYTMSLGAENSVAYSNNSIACPTNFTISVTTEILPVSMTKTSVDCTMYICGDSTECSNLLLQYGSFCTQLNRALTGIAVEQDKNTQEVFAQVKQIYKTPPIKDFGGFNFSQILPDPSKPSKRSFIEDLLFNKVTLADAGFIKQYGDCLGDIAARDLICAQKFNGLTVLPPLLTDEMIAQYTSALLAGTITSGWTFGAGAALQIPFAMQMAYRFNGIGVTQNVLYENQKLIANQFNSAIGKIQDSLSSTASALGKLQDVVNQNAQALNTLVKQLSSNFGAISSVLNDILSRLDKVEAEVQIDRLITGRLQSLQTYVTQQLIRAAEIRASANLAATKMSECVLGQSKRVDFCGKGYHLMSFPQSAPHGVVFLHVTYVPAQEKNFTTAPAICHDGKAHFPREGVFVSNGTHWFVTQRNFCEPQIITTDNTFVSGNCDVVIGIVNNTVYDPLQPELDSFKEELDKYFKNHTSPDVDLGDISGINASVVNIQKEIDRLNEVAKNLNESLIDLQELGKYEQYIKGGSGYIPEAPRDGQAYVRKDGEWVLLSTFL

SEQ ID NO: 6067 - protein, 1241 aa, Artificial Sequence
  SARS-CoV-2/France/GE1977/2020__EPI_ISL_414632 spike protein (1-1211)(I714C_Y1110C) Foldon construct
MFVFLVLLPLVSSQCVNLTTRTQLPPAYTNSFTRGVYYPDKVFRSSVLHSTQDLFLPFFSNVTWFHAIHVSGTNGTKRFDNPVLPFNDGVYFASTEKSNIIRGWIFGTTLDSKTQSLLIVNNATNVVIKVCEFQFCNDPFLGVYYHKNNKSWMESEFRVYSSANNCTFEYVSQPFLMDLEGKQGNFKNLREFVFKNIDGYFKIYSKHTPINLVRDLPQGFSALEPLVDLPIGINITRFQTLLALHRSYLTPGDSSSGWTAGAAAYYVGYLQPRTFLLKYNENGTITDAVDCALDPLSETKCTLKSFTVEKGIYQTSNFRVQPTESIVRFPNITNLCPFGEVFNATRFASVYAWNRKRISNCVADYSVLYNSASFSTFKCYGVSPTKLNDLCFTNVYADSFVIRGDEVRQIAPGQTGKIADYNYKLPDDFTGCVIAWNSNNLDSKVGGNYNYLYRLFRKSNLKPFERDISTEIYQAGSTPCNGVEGFNCYFPLQSYGFQPTNGVGYQPYRVVVLSFELLHAPATVCGPKKSTNLVKNKCVNFNFNGLTGTGVLTESNKKFLPFQQFGRDIADTTDAVRDPQTLEILDITPCSFGGVSVITPGTNTSNQVAVLYQGVNCTEVPVAIHADQLTPTWRVYSTGSNVFQTRAGCLIGAEHVNNSYECDIPIGAGICASYQTQTNSPRRARSVASQSIIAYTMSLGAENSVAYSNNSIACPTNFTISVTTEILPVSMTKTSVDCTMYICGDSTECSNLLLQYGSFCTQLNRALTGIAVEQDKNTQEVFAQVKQIYKTPPIKDFGGFNFSQILPDPSKPSKRSFIEDLLFNKVTLADAGFIKQYGDCLGDIAARDLICAQKFNGLTVLPPLLTDEMIAQYTSALLAGTITSGWTFGAGAALQIPFAMQMAYRFNGIGVTQNVLYENQKLIANQFNSAIGKIQDSLFSTASALGKLQDVVNQNAQALNTLVKQLSSNFGAISSVLNDILSRLDKVEAEVQIDRLITGRLQSLQTYVTQQLIRAAEIRASANLAATKMSECVLGQSKRVDFCGKGYHLMSFPQSAPHGVVFLHVTYVPAQEKNFTTAPAICHDGKAHFPREGVFVSNGTHWFVTQRNFCEPQIITTDNTFVSGNCDVVIGIVNNTVYDPLQPELDSFKEELDKYFKNHTSPDVDLGDISGINASVVNIQKEIDRLNEVAKNLNESLIDLQELGKYEQYIKGGSGYIPEAPRDGQAYVRKDGEWVLLSTFL

SEQ ID NO: 6068 - protein, 1241 aa, Artificial Sequence
  SARS-CoV-2/Finland/FIN-313/2020__EPI_ISL_414641 spike protein (1-1211)(I714C_Y1110C) Foldon construct
MFVFLVLLPLVSSQCVNLTTRTQLPPAYTNSFTRGVYYPDKVFRSSVLHSTQDLFLPFFSNVTWFHAIHVSGTNGTKRFDNPVLPFNDGVYFASTEKSNIIRGWIFGTTLDSKTQSLLIVNNATNVVIKVCEFQFCNDPFLGVYYHKNNKSWMESEFRVYSSANNCTFEYVSQPFLMDLEGKQGNFKNLREFVFKNIDGYFKIYSKHTPINLVRDLPQGFSALEPLVDLPIGINITRFKTLLALHRSYLTPGDSSSGWTAGAAAYYVGYLQPRTFLLKYNENGTITDAVDCALDPLSETKCTLKSFTVEKGIYQTSNFRVQPTESIVRFPNITNLCPFGEVFNATRFASVYAWNRKRISNCVADYSVLYNSASFSTFKCYGVSPTKLNDLCFTNVYADSFVIRGDEVRQIAPGQTGKIADYNYKLPDDFTGCVIAWNSNNLDSKVGGNYNYLYRLFRKSNLKPFERDISTEIYQAGSTPCNGVEGFNCYFPLQSYGFQPTNGVGYQPYRVVVLSFELLHAPATVCGPKKSTNLVKNKCVNFNFNGLTGTGVLTESNKKFLPFQQFGRDIADTTDAVRDPQTLEILDITPCSFGGVSVITPGTNTSNQVAVLYQGVNCTEVPVAIHADQLTPTWRVYSTGSNVFQTRAGCLIGAEHVNNSYECDIPIGAGICASYQTQTNSPRRARSVASQSIIAYTMSLGAENSVAYSNNSIACPTNFTISVTTEILPVSMTKTSVDCTMYICGDSTECSNLLLQYGSFCTQLNRALTGIAVEQDKNTQEVFAQVKQIYKTPPIKDFGGFNFSQILPDPSKPSKRSFIEDLLFNKVTLADAGFIKQYGDCLGDIAARDLICAQKFNGLTVLPPLLTDEMIAQYTSALLAGTITSGWTFGAGAALQIPFAMQMAYRFNGIGVTQNVLYENQKLIANQFNSAIGKIQDSLSSTASALGKLQDVVNQNAQALNTLVKQLSSNFGAISSVLNDILSRLDKVEAEVQIDRLITGRLQSLQTYVTQQLIRAAEIRASANLAATKMSECVLGQSKRVDFCGKGYHLMSFPQSAPHGVVFLHVTYVPAQEKNFTTAPAICHDGKAHFPREGVFVSNGTHWFVTQRNFCEPQIITTDNTFVSGNCDVVIGIVNNTVYDPLQPELDSFKEELDKYFKNHTSPDVDLGDISGINASVVNIQKEIDRLNEVAKNLNESLIDLQELGKYEQYIKGGSGYIPEAPRDGQAYVRKDGEWVLLSTFL

SEQ ID NO: 6069 - protein, 1241 aa, Artificial Sequence
  SARS-CoV-2/Netherlands/ZuidHolland_2/2020__EPI_ISL_414556 spike protein (1-1211)(I714C_Y1110C) Foldon construct
MFVFLVLLPLVSSQCVNLTTRTQLPPAYTNSFTRGVYYPDKVFRSSVLHSTQDLFLPFFSNVTWFHAIHVSGTNGTKRFDNPVLPFNDGVYFASTEKSNIIRGWIFGTTLDSKTQSLLIVNNATNVVIKVCEFQFCNDPFLGVYYHKNNKSWMESEFRVYSSANNCTFEYVSQPFLMDLEGKQGNFKNLREFVFKNIDGYFKIYSKHTPINLVRDLPQGFSALEPLVDLPIGINITRFQTLLALHRSYLTPGDSSSGWTAGAAAYYVGYLQPRTFLLKYNENGTITDAVDCALDPLSETKCTLKSFTVEKGIYQTSNFRVQPTESIVRFPNITNLCPFGEVFNATRFASVYAWNRKRISNCVADYSVLYNSASFSTFKCYGVSPTKLNDLCFTNVYADSFVIRGDEVRQIAPGQTGKIADYNYKLPDDFTGCVIAWNSNNLDSKVGGNYNYLYRLFRKSNLKPFERDISTEIYQAGSTPCNGVEGFNCYFPLQSYGFQPTNGVGYQPYRVVVLSFELLHAPATVCGPKKSTNLVKNKCVNFNFNGLTGTGVLTESNKKFLPFQQFGRDIADTTDAVRDPQTLEILDITPCSFGGVSVITPGTNTSNQVAVLYQGVNCTEVPVAIHADQLTPTWRVYSTGSNVFQTRAGCLIGAEHVNNSYECDIPIGAGICASYQTQTNSPRRARSVASQSIIAYTMSLGAENSVAYSNNSIACPTNFTISVTTEILPVSMTKTSVDCTMYICGDSTECSNLLLQYGSFCTQLNRALTGIALEQDKNTQEVFAQVKQIYKTPPIKDFGGFNFSQILPDPSKPSKRSFIEDLLFNKVTLADAGFIKQYGDCLGDIAARDLICAQKFNGLTVLPPLLTDEMIAQYTSALLAGTITSGWTFGAGAALQIPFAMQMAYRFNGIGVTQNVLYENQKLIANQFNSAIGKIQDSLSSTASALGKLQDVVNQNAQALNTLVKQLSSNFGAISSVLNDILSRLDKVEAEVQIDRLITGRLQSLQTYVTQQLIRAAEIRASANLAATKMSECVLGQSKRVDFCGKGYHLMSFPQSAPHGVVFLHVTYVPAQEKNFTTAPAICHDGKAHFPREGVFVSNGTHWFVTQRNFCEPQIITTDNTFVSGNCDVVIGIVNNTVYDPLQPELDSFKEELDKYFKNHTSPDVDLGDISGINASVVNIQKEIDRLNEVAKNLNESLIDLQELGKYEQYIKGGSGYIPEAPRDGQAYVRKDGEWVLLSTFL

SEQ ID NO: 6070 - protein, 1241 aa, Artificial Sequence
  SARS-CoV-2/USA/WA-UW31/2020__EPI_ISL_414618 spike protein (1-1211)(I714C_Y1110C) Foldon construct
MFVFLVLLPLVSSQCVNLTTRTQLPPAYTNSFTRGVYYPDKVFRSSVLHSTQDLFLPFFSNVTWFHAIHVSGTNGTKRFDNPVLPFNDGVYFASTEKSNIIRGWIFGTTLDSKTQSLLIVNNATNVVIKVCEFQFCNDPFLGVYYHKNNKSWMESEFRVYSSANNCTFEYVSQPFLMDLEGKQGNFKNLREFVFKNIDGYFKIYSKHTPINLVRDLPQGFSALEPLVDLPIGINITRFQTLLALHRSYLTPGDSSSGWTAGAAAYYVGYLQPRTFLLKYNENGTITDAVDCALDPLSETKCTLKSFTVEKGIYQTSNFRVQPTESIVRFPNITNLCPFGEVFNATRFASVYAWNRKRISNCVADYSVLYNSASFSTFKCYGVSPTKLNDLCFTNVYADSFVIRGDEVRQIAPGQTGKIADYNYKLPDDFTGCVIAWNSNNLDSKVGGNYNYLYRLFRKSNLKPFERDISTEIYQAGSTPCNGAEGFNCYFPLQSYGFQPTNGVGYQPYRVVVLSFELLHAPATVCGPKKSTNLVKNKCVNFNFNGLTGTGVLTESNKKFLPFQQFGRDIADTTDAVRDPQTLEILDITPCSFGGVSVITPGTNTSNQVAVLYQDVNCTEVPVAIHADQLTPTWRVYSTGSNVFQTRAGCLIGAEHVNNSYECDIPIGAGICASYQTQTNSPRRARSVASQSIIAYTMSLGAENSVAYSNNSIACPTNFTISVTTEILPVSMTKTSVDCTMYICGDSTECSNLLLQYGSFCTQLNRALTGIAVEQDKNTQEVFAQVKQIYKTPPIKDFGGFNFSQILPDPSKPSKRSFIEDLLFNKVTLADAGFIKQYGDCLGDIAARDLICAQKFNGLTVLPPLLTDEMIAQYTSALLAGTITSGWTFGAGAALQIPFAMQMAYRFNGIGVTQNVLYENQKLIANQFNSAIGKIQDSLSSTASALGKLQDVVNQNAQALNTLVKQLSSNFGAISSVLNDILSRLDKVEAEVQIDRLITGRLQSLQTYVTQQLIRAAEIRASANLAATKMSECVLGQSKRVDFCGKGYHLMSFPQSAPHGVVFLHVTYVPAQEKNFTTAPAICHDGKAHFPREGVFVSNGTHWFVTQRNFCEPQIITTDNTFVSGNCDVVIGIVNNTVYDPLQPELDSFKEELDKYFKNHTSPDVDLGDISGINASVVNIQKEIDRLNEVAKNLNESLIDLQELGKYEQYIKGGSGYIPEAPRDGQAYVRKDGEWVLLSTFL

SEQ ID NO: 6071 - protein, 1241 aa, Artificial Sequence
  SARS-CoV-2/South Korea/SNU01/2020__EPI_ISL_411929 spike protein (1-1211)(I714C_Y1110C) Foldon construct
MFVFLVLLPLVSSQCVNLTTRTQLPPAYTNSFTRGVYYPDKVFRSSVLHSTQDLFLPFFSNVTWFHAIHVSGTNGTKRFDNPVLPFNDGVYFASTEKSNIIRGWIFGTTLDSKTQSLLIVNNATNVVIKVCEFQFCNDPFLGVYYHKNNKSWMESEFRVYSSANNCTFEYVSQPFLMDLEGKQGNFKNLREFVFKNIDGYFKIYSKHTPINLVRDLPQGFWALEPLVDLPIGINITRFQTLLALHRSYLTPGDSSSGWTAGAAAYYVGYLQPRTFLLKYNENGTITDAVDCALDPLSETKCTLKSFTVEKGIYQTSNFRVQPTESIVRFPNITNLCPFGEVFNATRFASVYAWNRKRISNCVADYSVLYNSASFSTFKCYGVSPTKLNDLCFTNVYADSFVIRGDEVRQIAPGQTGKIADYNYKLPDDFTGCVIAWNSNNLDSKVGGNYNYLYRLFRKSNLKPFERDISTEIYQAGSTPCNGVEGFNCYFPLQSYGFQPTNGVGYQPYRVVVLSFELLHAPATVCGPKKSTNLVKNKCVNFNFNGLTGTGVLTESNKKFLPFQQFGRDIADTTDAVRDPQTLEILDITPCSFGGVSVITPGTNTSNQVAVLYQDVNCTEVPVAIHADQLTPTWRVYSTGSNVFQTRAGCLIGAEHVNNSYECDIPIGAGICASYQTQTNSPRRARSVASQSIIAYTMSLGAENSVAYSNNSIACPTNFTISVTTEILPVSMTKTSVDCTMYICGDSTECSNLLLQYGSFCTQLNRALTGIAVEQDKNTQEVFAQVKQIYKTPPIKDFGGFNFSQILPDPSKPSKRSFIEDLLFNKVTLADAGFIKQYGDCLGDIAARDLICAQKFNGLTVLPPLLTDEMIAQYTSALLAGTITSGWTFGAGAALQIPFAMQMAYRFNGIGVTQNVLYENQKLIANQFNSAIGKIQDSLSSTASALGKLQDVVNQNAQALNTLVKQLSSNFGAISSVLNDILSRLDKVEAEVQIDRLITGRLQSLQTYVTQQLIRAAEIRASANLAATKMSECVLGQSKRVDFCGKGYHLMSFPQSAPHGVVFLHVTYVPAQEKNFTTAPAICHDGKAHFPREGVFVSNGTHWFVTQRNFCEPQIITTDNTFVSGNCDVVIGIVNNTVYDPLQPELDSFKEELDKYFKNHTSPDVDLGDISGINASVVNIQKEIDRLNEVAKNLNESLIDLQELGKYEQYIKGGSGYIPEAPRDGQAYVRKDGEWVLLSTFL

SEQ ID NO: 6072 - protein, 1241 aa, Artificial Sequence
  SARS-CoV-2/China/WF0004/2020__EPI_ISL_413694 spike protein (1-1211)(I714C_Y1110C) Foldon construct
MFVFLVLLPLVSSQCVNLTTRTQLPPAYTNSFTRGVYYPDKVFRSSVLHSTQDLFLPFFSNVTWFHAIHVSGTNGTKRFDNPVLPFNDGVYFASTEKSNIIRGWIFGTTLDSKTQSLLIVNNATNVVIKVCEFQFCNDPFLGVYYHKNNKSWTESEFRVYSSANNCTFEYVSQPFLMDLEGKQGNFKNLREFVFKNIDGYFKIYSKHTPINLVRDLPQGFSALEPLVDLPIGINITRFQTLLALHRSYLTPGDSSSGWTAGAAAYYVGYLQPRTFLLKYNENGTITDAVDCALDPLSETKCTLKSFTVEKGIYQTSNFRVQPTESIVRFPNITNLCPFGEVFNATRFASVYAWNRKRISNCVADYSVLYNSASFSTFKCYGVSPTKLNDLCFTNVYADSFVIRGDEVRQIAPGQTGKIADYNYKLPDDFTGCVIAWNSNNLDSKVGGNYNYLYRLFRKSNLKPFERDISTEIYQAGSTPCNGVEGFNCYFPLQSYGFQPTNGVGYQPYRVVVLSFELLHAPATVCGPKKSTNLVKNKCVNFNFNGLTGTGVLTESNKKFLPFQQFGRDIADTTDAVRDPQTLEILDITPCSFGGVSVITPGTNTSNQVAVLYQDVNCTEVPVAIHADQLTPTWRVYSTGSNVFQTRAGCLIGAEHVNNSYECDIPIGAGICASYQTQTNSPRRARSVASQSIIAYTMSLGAENSVAYSNNSIACPTNFTISVTTEILPVSMTKTSVDCTMYICGDSTECSNLLLQYGSFCTQLNRALTGIAVEQDKNTQEVFAQVKQIYKTPPIKDFGGFNFSQILPDPSKPSKRSFIEDLLFNKVTLADAGFIKQYGDCLGDIAARDLICAQKFNGLTVLPPLLTDEMIAQYTSALLAGTITSGWTFGAGAALQIPFAMQMAYRFNGIGVTQNVLYENQKLIANQFNSAIGKIQDSLSSTASALGKLQDVVNQNAQALNTLVKQLSSNFGAISSVLNDILSRLDKVEAEVQIDRLITGRLQSLQTYVTQQLIRAAEIRASANLAATKMSECVLGQSKRFDFCGKGYHLMSFPQSAPHGVVFLHVTYVPAQEKNFTTAPAICHDGKAHFPREGVFVSNGTHWFVTQRNFCEPQIITTDNTFVSGNCDVVIGIVNNTVYDPLQPELDSFKEELDKYFKNHTSPDVDLGDISGINASVVNIQKEIDRLNEVAKNLNESLIDLQELGKYEQYIKGGSGYIPEAPRDGQAYVRKDGEWVLLSTFL

SEQ ID NO: 6073 - protein, 1241 aa, Artificial Sequence
  SARS-CoV-2/China/WF0028/2020__EPI_ISL_413791 spike protein (1-1211)(I714C_Y1110C) Foldon construct
MFVFLVLLPLVSSQCVNLTTRTQLPPAYTNSFTRGVYYPDKVFRSSVLHSTQDLFLPFFSNVTWFHAIHVSGTNGTKRFDNPVLPFNDGVYFASTEKSNIIRGWIFGTTLDSKTQSLLIVNNATNVVIKVCEFQFCNDPFLGVYYHKNNKSWMESEFRVYSSANNCTFEYVSQPFLMDLEGKQGNFKNLREFVFKNIDGYFKIYSKHTPINLVRDLPQGFSALEPLVDLPIGINITRFQTLLALHRSYLTPGDSSSGWTAGAAAYYVGYLQPRTFLLKYNENGTITDAVDCALDPLSETKCTLKSFTVEKGIYQTSNFRVQPTESIVRFPNITNLCPFGEVFNATRFASVYAWNRKRISNCVADYSVLYNSASFSTFKCYGVSPTKLNDLCFTNVYADSFVIRGDEVRQIAPGQTGKIADYNYKLPDDFTGCVIAWNSNNLDSKVGGNYNYLYRLFRKSNLKPFERDISTEIYQAGSTPCNGVEGFNCYFPLQSYGFQPTNGVGYQPYRVVVLSFELLHAPATVCGPKKSTNLVKNKCVNFNFNGLTGTGVLTESNKKFLPFQQFGRDIADTTDAVRDPQTLEILDITPCSFGGVSVITPGTNTSNQVAVLYQDVNCTEVPVAIHADQLTPTWRVYSTGSNVFQTRAGCLIGAEHVNNSYECDIPIGAGICASYQTQTNSPRRARSVASQSIIAYTMSLGAENSVAYSNNSIACPTNFTISVTTEILPVSMTKTSVDCTMYICGDSTECSNLLLQYGSFCTQLNRALTGIAVEQDKNTQEVFAQVKQIYKTPPIKDFGGFNFSQILPDPSKPSKRSFIEDLLFNKVTLADAGFIKQYGDCLGDIAARDLICAQKFNGLTVLPPLLTDEMIAQYTSALLAGTITSGWTFGAGAALQIPFAMQMAYRFNGIGVTQNVLYENQKLIANQFNSAIGKIQDSLSSTASALGKLQDVVNQNAQALNTLVKQLSSNFGAISSVLNDILSRLDKVEAEVQIDRLITGRLQSLQTYVTQQLIRAAEIRASANLAATKMSECVLGQSKRVDFCGKGYHLMSFPQSAPHGVVFLHVTYVPAQEKNFTTAPAICHDGKAHFPREGVFVSNGTHWFVTQRNFCEPQIITTDNTFVSGNCDVVIGIVNNTVYDPLQPELESFKEELDKYFKNHTSPDVDLGDISGINASVVNIQKEIDRLNEVAKNLNESLIDLQELGKYEQYIKGGSGYIPEAPRDGQAYVRKDGEWVLLSTFL

SEQ ID NO: 6074 - protein, 1241 aa, Artificial Sequence
  SARS-CoV-2/2019-nCoV/USA-CruiseA-18/2020__MT159716.1 spike protein (1-1211)(I714C_Y1110C) Foldon construct
MFVFLVLLPLVSSQCVNLTTRTQLPPAYTNSFTRGVYYPDKVFRSSVLHSTQDLFLPFFSNVTWFHAIHVSGTNGTKRFDNPVLPFNDGVYFASTEKSNIIRGWIFGTTLDSKTQSLLIVNNATNVVIKVCEFQFCNDPFLGVYYHKNNKSWMESELRVYSSANNCTFEYVSQPFLMDLEGKQGNFKNLREFVFKNIDGYFKIYSKHTPINLVRDLPQGFSALEPLVDLPIGINITRFQTLLALHRSYLTPGDSSSGWTAGAAAYYVGYLQPRTFLLKYNENGTITDAVDCALDPLSETKCTLKSFTVEKGIYQTSNFRVQPTESIVRFPNITNLCPFGEVFNATRFASVYAWNRKRISNCVADYSVLYNSASFSTFKCYGVSPTKLNDLCFTNVYADSFVIRGDEVRQIAPGQTGKIADYNYKLPDDFTGCVIAWNSNNLDSKVGGNYNYLYRLFRKSNLKPFERDISTEIYQAGSTPCNGVEGFNCYFPLQSYGFQPTNGVGYQPYRVVVLSFELLHAPATVCGPKKSTNLVKNKCVNFNFNGLTGTGVLTESNKKFLPFQQFGRDIADTTDAVRDPQTLEILDITPCSFGGVSVITPGTNTSNQVAVLYQDVNCTEVPVAIHADQLTPTWRVYSTGSNVFQTRAGCLIGAEHVNNSYECDIPIGAGICASYQTQTNSPRRARSVASQSIIAYTMSLGAENSVAYSNNSIACPTNFTISVTTEILPVSMTKTSVDCTMYICGDSTECSNLLLQYGSFCTQLNRALTGIAVEQDKNTQEVFAQVKQIYKTPPIKDFGGFNFSQILPDPSKPSKRSFIEDLLFNKVTLADAGFIKQYGDCLGDIAARDLICAQKFNGLTVLPPLLTDEMIAQYTSALLAGTITSGWTFGAGAALQIPFAMQMAYRFNGIGVTQNVLYENQKLIANQFNSAIGKIQDSLSSTASALGKLQDVVNQNAQALNTLVKQLSSNFGAISSVLNDILSRLDKVEAEVQIDRLITGRLQSLQTYVTQQLIRAAEIRASANLAATKMSECVLGQSKRVDFCGKGYHLMSFPQSAPHGVVFLHVTYVPAQEKNFTTAPAICHDGKAHFPREGVFVSNGTHWFVTQRNFCEPQIITTDNTFVSGNCDVVIGIVNNTVYDPLQPELDSFKEELDKYFKNHTSPDVDLGDISGINASVVNIQKEIDRLNEVAKNLNESLIDLQELGKYEQYIKGGSGYIPEAPRDGQAYVRKDGEWVLLSTFL

SEQ ID NO: 6075 - protein, 1241 aa, Artificial Sequence
  SARS-CoV-2/SARS-CoV-2/Yunnan-01/human/2020/CHN__MT049951.1 spike protein (1-1211)(I714C_Y1110C) Foldon construct
MFVFLVLLPLVSSQCVNLTTRTQLPPANTNSFTRGVYYPDKVFRSSVLHSTQDLFLPFFSNVTWFHAIHVSGTNGTKRFDNPVLPFNDGVYFASTEKSNIIRGWIFGTTLDSKTQSLLIVNNATNVVIKVCEFQFCNDPFLGVYYHKNNKSWMESEFRVYSSANNCTFEYVSQPFLMDLEGKQGNFKNLREFVFKNIDGYFKIYSKHTPINLVRDLPQGFSALEPLVDLPIGINITRFQTLLALHRSYLTPGDSSSGWTAGAAAYYVGYLQPRTFLLKYNENGTITDAVDCALDPLSETKCTLKSFTVEKGIYQTSNFRVQPTESIVRFPNITNLCPFGEVFNATRFASVYAWNRKRISNCVADYSVLYNSASFSTFKCYGVSPTKLNDLCFTNVYADSFVIRGDEVRQIAPGQTGKIADYNYKLPDDFTGCVIAWNSNNLDSKVGGNYNYLYRLFRKSNLKPFERDISTEIYQAGSTPCNGVEGFNCYFPLQSYGFQPTNGVGYQPYRVVVLSFELLHAPATVCGPKKSTNLVKNKCVNFNFNGLTGTGVLTESNKKFLPFQQFGRDIADTTDAVRDPQTLEILDITPCSFGGVSVITPGTNTSNQVAVLYQDVNCTEVPVAIHADQLTPTWRVYSTGSNVFQTRAGCLIGAEHVNNSYECDIPIGAGICASYQTQTNSPRRARSVASQSIIAYTMSLGAENSVAYSNNSIACPTNFTISVTTEILPVSMTKTSVDCTMYICGDSTECSNLLLQYGSFCTQLNRALTGIAVEQDKNTQEVFAQVKQIYKTPPIKDFGGFNFSQILPDPSKPSKRSFIEDLLFNKVTLADAGFIKQYGDCLGDIAARDLICAQKFNGLTVLPPLLTDEMIAQYTSALLAGTITSGWTFGAGAALQIPFAMQMAYRFNGIGVTQNVLYENQKLIANQFNSAIGKIQDSLSSTASALGKLQDVVNQNAQALNTLVKQLSSNFGAISSVLNDILSRLDKVEAEVQIDRLITGRLQSLQTYVTQQLIRAAEIRASANLAATKMSECVLGQSKRVDFCGKGYHLMSFPQSAPHGVVFLHVTYVPAQEKNFTTAPAICHDGKAHFPREGVFVSNGTHWFVTQRNFCEPQIITTDNTFVSGNCDVVIGIVNNTVYDPLQPELDSFKEELDKYFKNHTSPDVDLGDISGINASVVNIQKEIDRLNEVAKNLNESLIDLQELGKYEQYIKGGSGYIPEAPRDGQAYVRKDGEWVLLSTFL

SEQ ID NO: 6076 - protein, 1241 aa, Artificial Sequence
  SARS-CoV-2/USA/WA-UW292/2020__EPI_ISL_418077 spike protein (1-1211)(I714C_Y1110C) Foldon construct
MFVFLVLLPLVSSQCVNLTTRTQLPPAYTNSFTRGVYYPDKVFRSSVLHSTQDLFLPFFSNVTWFHAIHVSGTNGTKRFDNPVLPFNDGVYFASTEKSNIIRGWIFGTTLDSKTQSLLIVNNATNVVIKVCEFQFCNDPFLGVYYHKNNKSWMESEFRVYSSANNCTFEYVSQPFLMDLEGKQGNFKNLREFVFKNIDGYFKIYSKHTPINLVRDLPQGFSALEPLVDLPIGINITRFQTLLALHRSYLTPGDSSSGWTAGAAAYYVGYLQPRTFLLKYNENGTITDAVDCALDPLSETKCTLKSFTVEKGIYQTSNFRVQPTESIVRFPNITNLCPFGEVFNATRFASVYAWNRKRISNCVADYSVLYNSASFSTFKCYGVSPTKLNDLCFTNVYADSFVIRGDEVRQIAPGQTGKIADYNYKLPDDFTGCVIAWNSNNLDSKVGGNYNYLYRLFRKSNLKPFERDISTEIYQASSTPCNGVEGFNCYFPLQSYGFQPTNGVGYQPYRVVVLSFELLHAPATVCGPKKSTNLVKNKCVNFNFNGLTGTGVLTESNKKFLPFQQFGRDIADTTDAVRDPQTLEILDITPCSFGGVSVITPGTNTSNQVAVLYQDVNCTEVPVAIHADQLTPTWRVYSTGSNVFQTRAGCLIGAEHVNNSYECDIPIGAGICASYQTQTNSPRRARSVASQSIIAYTMSLGAENSVAYSNNSIACPTNFTISVTTEILPVSMTKTSVDCTMYICGDSTECSNLLLQYGSFCTQLNRALTGIAVEQDKNTQEVFAQVKQIYKTPPIKDFGGFNFSQILPDPSKPSKRSFIEDLLFNKVTLADAGFIKQYGDCLGDIAARDLICAQKFNGLTVLPPLLTDEMIAQYTSALLAGTITSGWTFGAGAALQIPFAMQMAYRFNGIGVTQNVLYENQKLIANQFNSAIGKIQDSLSSTASALGKLQDVVNQNAQALNTLVKQLSSNFGAISSVLNDILSRLDKVEAEVQIDRLITGRLQSLQTYVTQQLIRAAEIRASANLAATKMSECVLGQSKRVDFCGKGYHLMSFPQSAPHGVVFLHVTYVPAQEKNFTTAPAICHDGKAHFPREGVFVSNGTHWFVTQRNFCEPQIITTDNTFVSGNCDVVIGIVNNTVYDPLQPELDSFKEELDKYFKNHTSPDVDLGDISGINASVVNIQKEIDRLNEVAKNLNESLIDLQELGKYEQYIKGGSGYIPEAPRDGQAYVRKDGEWVLLSTFL

SEQ ID NO: 6077 - protein, 1241 aa, Artificial Sequence
  SARS-CoV-2/Iceland/192/2020__EPI_ISL_417819 spike protein (1-1211)(I714C_Y1110C) Foldon construct
MFVFFVLLPLVSSQCVNLTTRTQLPPAYTNSFTRGVYYPDKVFRSSVLHSTQDLFLPFFSNVTWFHAIHVSGTNGTKRFDNPVLPFNDGVYFASTEKSNIIRGWIFGTTLDSKTQSLLIVNNATNVVIKVCEFQFCNDPFLGVYYHKNNKSWMESEFRVYSSANNCTFEYVSQPFLMDLEGKQGNFKNLREFVFKNIDGYFKIYSKHTPINLVRDLPQGFSALEPLVDLPIGINITRFQTLLALHRSYLTPGDSSSGWTAGAAAYYVGYLQPRTFLLKYNENGTITDAVDCALDPLSETKCTLKSFTVEKGIYQTSNFRVQPTESIVRFPNITNLCPFGEVFNATRFASVYAWNRKRISNCVADYSVLYNSASFSTFKCYGVSPTKLNDLCFTNVYADSFVIRGDEVRQIAPGQTGKIADYNYKLPDDFTGCVIAWNSNNLDSKVGGNYNYLYRLFRKSNLKPFERDISTEIYQAGSTPCNGVEGFNCYFPLQSYGFQPTNGVGYQPYRVVVLSFELLHAPATVCGPKKSTNLVKNKCVNFNFNGLTGTGVLTESNKKFLPFQQFGRDIADTTDAVRDPQTLEILDITPCSFGGVSVITPGTNTSNQVAVLYQGVNCTEVPVAIHADQLTPTWRVYSTGSNVFQTRAGCLIGAEHVNNSYECDIPIGAGICASYQTQTNSPRRARSVASQSIIAYTMSLGAENSVAYSNNSIACPTNFTISVTTEILPVSMTKTSVDCTMYICGDSTECSNLLLQYGSFCTQLNRALTGIAVEQDKNTQEVFAQVKQIYKTPPIKDFGGFNFSQILPDPSKPSKRSFIEDLLFNKVTLADAGFIKQYGDCLGDIAARDLICAQKFNGLTVLPPLLTDEMIAQYTSALLAGTITSGWTFGAGAALQIPFAMQMAYRFNGIGVTQNVLYENQKLIANQFNSAIGKIQDSLSSTASALGKLQDVVNQNAQALNTLVKQLSSNFGAISSVLNDILSRLDKVEAEVQIDRLITGRLQSLQTYVTQQLIRAAEIRASANLAATKMSECVLGQSKRVDFCGKGYHLMSFPQSAPHGVVFLHVTYVPAQEKNFTTAPAICHDGKAHFPREGVFVSNGTHWFVTQRNFCEPQIITTDNTFVSGNCDVVIGIVNNTVYDPLQPELDSFKEELDKYFKNHTSPDVDLGDISGINASVVNIQKEIDRLNEVAKNLNESLIDLQELGKYEQYIKGGSGYIPEAPRDGQAYVRKDGEWVLLSTFL

SEQ ID NO: 6078 - protein, 1241 aa, Artificial Sequence
  SARS-CoV-2/Belgium/ULG-6939/2020__EPI_ISL_417020 spike protein (1-1211)(I714C_Y1110C) Foldon construct
MFVFLVLLPLVSSQCVNLTTRTQLPPAYTNSFTRGVYYPDKVFRSSVLHSTQDLFLPFFSNVTWFHAIHVSGTNGTKRFDNPVLPFNDGVYFASTEKSNIIRGWIFGTTLDSKTQSLLIVNNATNVVIKVCEFQFCNDPFLGVYYHKNNKSWMESEFRVYSSANNCTFEYVSQPFLMDLEGKQGNFKNLREFVFKNIDGYFKIYSKHTPINLVRDLPQGFSALEPLVDLPIGINITRFQTLLALHRSYLTPGDSSSGWTAGAAAYYVGYLQPRTFLLKYNENGTITDAVDCALDPLSETKCTLKSFTVEKGIYQTSNFRVQPTESIVRFPNITNLCPFGEVFNATRFASVYAWNRKRISNCVADYSVLYNSASFSTFKCYGVSPTKLNDLCFTNVYADSFVIRGDEVRQIAPGQTGKIADYNYKLPDDFTGCVIAWNSNNLDSKVGGNYNYLYRLFRKSNLKPFERDISTEIYQAGSTPCNGVEGFNCYFPLQSYGFQPTNGVGYQPYRVVVLSFELLHAPATVCGPKKSTNLVKNKCVNFNFNGLTGTGVLTESNKKFLPFQQFGRDIADTTDAVRDPQTLEILDITPCSFGGVSVITPGTNTSNQVAVLYQGVNCTEVPVAIHADQLTPTWRVYSTGSNVFQTRAGCLIGAEHVNNSYECDIPIGAGICASYQTQTNSPRRARSVASQSIIAYTMSLGAENSVVYSNNSIACPTNFTISVTTEILPVSMTKTSVDCTMYICGDSTECSNLLLQYGSFCTQLNRALTGIAVEQDKNTQEVFAQVKQIYKTPPIKDFGGFNFSQILPDPSKPSKRSFIEDLLFNKVTLADAGFIKQYGDCLGDIAARDLICAQKFNGLTVLPPLLTDEMIAQYTSALLAGTITSGWTFGAGAALQIPFAMQMAYRFNGIGVTQNVLYENQKLIANQFNSAIGKIQDSLSSTASALGKLQDVVNQNAQALNTLVKQLSSNFGAISSVLNDILSRLDKVEAEVQIDRLITGRLQSLQTYVTQQLIRAAEIRASANLAATKMSECVLGQSKRVDFCGKGYHLMSFPQSAPHGVVFLHVTYVPAQEKNFTTAPAICHDGKAHFPREGVFVSNGTHWFVTQRNFCEPQIITTDNTFVSGNCDVVIGIVNNTVYDPLQPELDSFKEELDKYFKNHTSPDVDLGDISGINASVVNIQKEIDRLNEVAKNLNESLIDLQELGKYEQYIKGGSGYIPEAPRDGQAYVRKDGEWVLLSTFL

SEQ ID NO: 6079 - protein, 1241 aa, Artificial Sequence
  SARS-CoV-2/France/HF2496/2020__EPI_ISL_418231 spike protein (1-1211)(I714C_Y1110C) Foldon construct
MFVFLVLLPLVSSQCVNLTTRTQLPPAYTNSFTRGVYYPDKVFRSSVLHSTQDLFLPFFSNVTWFHAIHVSGTNGTKRFDNPVLPFNDGVYFASTEKSNIIRGWIFGTTLDSKTQSLLIVNNATNVVIKVCEFQFCNDPFLGVYYHKNNKSWMESEFRVYSSANNCTFEYVSQPFLMDLEGKQGNFKNLREFVFKNIDGYFKIYSKHTPINLVRDLPQGFSALEPLVDLPIGINITRFQTLLALHRSYLTPGDSSSGWTAGAAAYYVGYLQPRTFLLKYNENGTITDAVDCALDPLSETKCTLKSFTVEKGIYQTSNFRVQPTESIVRFPNITNLCPFGEVFNATRFASVYAWNRKRISNCVADYSVLYNSASFSTFKCYGVSPTKLNDLCFTNVYADSFVIRGDEVRQIAPGQTGKIADYNYKLPDDFTGCVIAWNSNNLDSKVGGNYNYLYRLFRKSNLKPFERDISTEIYQAGSTPCNGVEGFNCYFPLQSYGFQPTNGVGYQPYRVVVLSFELLHAPATVCGPKKSTNLVKNKCVNFNFNGLTGTGVLTESNKKFLPFQQFGRDIADTTDAVRDPQTLEILDITPCSFGGVSVITPGTNTSNQVAVLYQGVNCTEVPVAIHADQLTPTWRVYSTGSNVFQTRAGCLIGAEHVNNSYECDIPIGAGICASYQTQTNSPRRARSVASQSIIAYTMSLGAENSVAYSNNSIACPTNFTISVTTEILPVSMTKTSVDCTMYICGDSTECSNLLLQYGSFCTQLNRALTGIAVEQDKNTQEVFAQVKQIYKTPPIKDFGGFNFSQILPDPSKPSKRSFIEDLLFNKVTLADAGFIKQYGDCLGDIVARDLICAQKFNGLTVLPPLLTDEMIAQYTSALLAGTITSGWTFGAGAALQIPFAMQMAYRFNGIGVTQNVLYENQKLIANQFNSAIGKIQDSLSSTASALGKLQDVVNQNAQALNTLVKQLSSNFGAISSVLNDILSRLDKVEAEVQIDRLITGRLQSLQTYVTQQLIRAAEIRASANLAATKMSECVLGQSKRVDFCGKGYHLMSFPQSAPHGVVFLHVTYVPAQEKNFTTAPAICHDGKAHFPREGVFVSNGTHWFVTQRNFCEPQIITTDNTFVSGNCDVVIGIVNNTVYDPLQPELDSFKEELDKYFKNHTSPDVDLGDISGINASVVNIQKEIDRLNEVAKNLNESLIDLQELGKYEQYIKGGSGYIPEAPRDGQAYVRKDGEWVLLSTFL

SEQ ID NO: 6080 - protein, 1241 aa, Artificial Sequence
  SARS-CoV-2/USA/WA-UW291/2020__EPI_ISL_418076 spike protein (1-1211)(I714C_Y1110C) Foldon construct
MFVFLVLLPLVSSQCVNLTTRTQLPPAYTNSFTRGVYYPDKVFRSSVLHSTQDLFLPFFSNVTWFHAIHVSGTNGTKRFDNPVLPFNDGVYFASTEKSNIIRGWIFGTTLDSKTQSLLIVNNATNVVIKVCEFQFCNDPFLGVYYHKNNKSWMESEFRVYSSANNCTFEYVSQPFLMDLEGKQGNFKNLREFVFKNIDGYFKIYSKHTPINLVRDLPQGFSALEPLVDLPIGINITRFQTLLALHRSYLTPGDSSSGWTAGAAAYYVGYLQPRTFLLKYNENGTITDAVDCALDPLSETKCTLKSFTVEKGIYQTSNFRVQPTESIVRFPNITNLCPFGEVFNATRFASVYAWNRKRISNCVADYSVLYNSASFSTFKCYGVSPTKLNDLCFTNVYADSFVIRGDEVRQIAPGQTGKIADYNYKLPDDFTGCVIAWNSNNLDSKVGGNYNYLYRLFRKSNLKPFERDISTEIYQAGSTPCNGVEGFNCYFPLQSYGFQPTNGVGYQPYRVVVLSFELLHAPATVCGPKKSTNLVKNKCVNFNFNGLTGTGVLTESNKKFLPFQQFGRDIADTTDAVRDPQTLEILDITPCSFGGVSVITPGTNTSNQVAVLYQGVNCTEVPVAIHADQLTPTWRVYSTGSNVFQTRAGCLIGAEHVNNSYECDIPIGAGICASYQTQTNSPRRARSVASQSIIAYTMSLGAENSVAYSNNSIACPTNFTISVTTEILPVSMTKTSVDCTMYICGDSTECSNLLLQYGSFCTQLNRALTGIAVEQDKNTQEVFAQVKQIYKTPPIKDFGGFNFSQILPDPSKPSKRSFIEDLLFNKVTLADAGFIKQYGDCLGDIAARDLICAQKFNGLTVLPPLLTDEMIAQYTSALLAGTITSGWTFGAGAALQIPFAMQMAYRFNGIGVTQNVLYENQKLIANQFNSAIGKIQYSLSSTASALGKLQDVVNQNAQALNTLVKQLSSNFGAISSVLNDILSRLDKVEAEVQIDRLITGRLQSLQTYVTQQLIRAAEIRASANLAATKMSECVLGQSKRVDFCGKGYHLMSFPQSAPHGVVFLHVTYVPAQEKNFTTAPAICHDGKAHFPREGVFVSNGTHWFVTQRNFCEPQIITTDNTFVSGNCDVVIGIVNNTVYDPLQPELDSFKEELDKYFKNHTSPDVDLGDISGINASVVNIQKEIDRLNEVAKNLNESLIDLQELGKYEQYIKGGSGYIPEAPRDGQAYVRKDGEWVLLSTFL

SEQ ID NO: 6081 - protein, 1241 aa, Artificial Sequence; identical to SEQ ID NO: 6044
  SARS-CoV-2/Portugal/PT0034/2020__EPI_ISL_418019 spike protein (1-1211)(I714C_Y1110C) Foldon construct

SEQ ID NO: 6082 - protein, 1241 aa, Artificial Sequence
  SARS-CoV-2/Iceland/202/2020__EPI_ISL_417750 spike protein (1-1211)(I714C_Y1110C) Foldon construct
MFVFLVLLPLVSSQCVNLTTRTQLPPAYTNSFTRGVYYPDKVFRSSVLHSTQDLFLPFFSNVTWFHAIHVSGTNGTKRFDNPVLPFNDGVYFASTEKSNIIRGWIFGTTLDSKTQSLLIVNNATNVVIKVCEFQFCNDPFLGVYYHKNNKSWMESEFRVYSSANNCTFEYVSQPFLMDLEGKQGNFKNLREFVFKNIDGYFKIYSKHTPINLVRDLPQGFSALEPLVDLPIGINITRFQTLLALHRSYLTPGDSSSGWTAGAAAYYVGYLQPRTFLLKYNENGTITDAVDCALDPLSETKCTLKSFTVEKGIYQTSNFRVQPTESIVRFPNITNLCPFGEVFNATRFASVYAWNRKRISNCVADYSVLYNSASFSTFKCYGVSPTKLNDLCFTNVYADSFVIRGDEVRQIAPGQTGKIADYNYKLPDDFTGCVIAWNSNNLDSKVGGNYNYLYRLFRKSNLKPFERDISTEIYQAGSTPCNGVEGFNCYFPLQSYGFQPTNGVGYQPYRVVVLSFELLHAPATVCGPKKSTNLVKNKCVNFNFNGLTGTGVLTESNKKFLPFQQFGRDIADTTDAVRDPQTLEILDITPCSFGGVSVITPGTNTSNQVAVLYQDVNCTEVPVAIHADQLTPTWRVYSTGSNVFQTRAGCLIGAEHVNNSYECDIPIGAGICASYQTQTNSPRRARSVASQSIIAYTMSLGAENSVAYSNNSIACPTNFTISVTTEILPVSMTKTSVDCTMYICGDSTECSNLLLQYGSFCTQLNRALTGIAVEQDKNTQEVFAQVKQIYKTPPIKDFGGFNFSQILPDPSKPSKRSFIEDLLFNKVTLADAGFIKQYGDCLGDIAARDLICAQKFNGLTVLPPLLTDEMIAQYTSALLAGTITSGWTFGAGAALQIPFAMQMAYRFNGIGVTQNVLYENQKLIANQFNSAIGKIQDSLSSTASALGKLQDVVNQNAQALNTLVKQLSSNFGAISSVLNDILSRLDKVEAEVQIDRLITGRLQSLQTYVTQQLIRAAEIRASANLAATKMSECVLGQSKRVDFCGKGYHLMSFPQSAPHGVVFLHVTYVPAQEKNFTTAPAICHDGKAHFPREGVFVSNGTHWFVTQRNFCEPQIITTDNTFVSGNCDVVIGIVNNTVYDPLQPELDSFKEELDKYFKNHTSPDVDLGDIPGINASVVNIQKEIDRLNEVAKNLNESLIDLQELGKYEQYIKGGSGYIPEAPRDGQAYVRKDGEWVLLSTFL

SEQ ID NO: 6083 - protein, 1241 aa, Artificial Sequence
  SARS-CoV-2/USA/WA-UW261/2020__EPI_ISL_418046 spike protein (1-1211)(I714C_Y1110C) Foldon construct
MFVFLVLLPLVSSQCVNLTTRTQLPPAYTNSFTRGVYYPDKVFRSSVLHSTQDLFLPFFSNVTWFHAIHVSGTNGTKRFDNPVLPFNDGVYFASTEKSNIIRGWIFGTTLDSKTQSLLIVNNATNVVIKVCEFQFCNDPFLGVYYHKNNKSWMESEFRVYSSANNCTFEYVSQPFLMDLEGKQGNFKNLREFVFKNIDGYFKIYSKHTPINLVRDLPQGFSALEPLVDLPIGINITRFQTLLALHRSYLTPGDSSSGWTAGAAAYYVGYLQPRTFLLKYNENGTITDAVDCALDPLSETKCTLKSFTVEKGIYQTSNFRVQPTESIVRFPNITNLCPFGEVFNATRFTSVYAWNRKRISNCVADYSVLYNSASFSTFKCYGVSPTKLNDLCFTNVYADSFVIRGDEVRQIAPGQTGKIADYNYKLPDDFTGCVIAWNSNNLDSKVGGNYNYLYRLFRKSNLKPFERDISTEIYQAGSTPCNGVEGFNCYFPLQSYGFQPTNGVGYQPYRVVVLSFELLHAPATVCGPKKSTNLVKNKCVNFNFNGLTGTGVLTESNKKFLPFQQFGRDIADTTDAVRDPQTLEILDITPCSFGGVSVITPGTNTSNQVAVLYQDVNCTEVPVAIHADQLTPTWRVYSTGSNVFQTRAGCLIGAEHVNNSYECDIPIGAGICASYQTQTNSPRRARSVASQSIIAYTMSLGAENSVAYSNNSIACPTNFTISVTTEILPVSMTKTSVDCTMYICGDSTECSNLLLQYGSFCTQLNRALTGIAVEQDKNTQEVFAQVKQIYKTPPIKDFGGFNFSQILPDPSKPSKRSFIEDLLFNKVTLADAGFIKQYGDCLGDIAARDLICAQKFNGLTVLPPLLTDEMIAQYTSALLAGTITSGWTFGAGAALQIPFAMQMAYRFNGIGVTQNVLYENQKLIANQFNSAIGKIQDSLSSTASALGKLQDVVNQNAQALNTLVKQLSSNFGAISSVLNDILSRLDKVEAEVQIDRLITGRLQSLQTYVTQQLIRAAEIRASANLAATKMSECVLGQSKRVDFCGKGYHLMSFPQSAPHGVVFLHVTYVPAQEKNFTTAPAICHDGKAHFPREGVFVSNGTHWFVTQRNFCEPQIITTDNTFVSGNCDVVIGIVNNTVYDPLQPELDSFKEELDKYFKNHTSPDVDLGDISGINASVVNIQKEIDRLNEVAKNLNESLIDLQELGKYEQYIKGGSGYIPEAPRDGQAYVRKDGEWVLLSTFL

SEQ ID NO: 6084 - protein, 1241 aa, Artificial Sequence
  SARS-CoV-2/Portugal/PT0035/2020__EPI_ISL_418020 spike protein (1-1211)(I714C_Y1110C) Foldon construct
MFVFLVLLPLVSSQCVNLTTRTQLPPAYTNSFTRGVYYPDKVFRSSVLHSTQDLFLPFFSNVTWFHAIHVSGTNGTKRFDNPVLPFNDGVYFASTEKSNIIRGWIFGTTLDSKTQSLLIVNNATNVVIKVCEFQFCNDPFLGVYYHKNNKSWMESEFRVYSSANNCTFEYVSQPFLMDLEGKQGNFKNLREFVFKNIDGYFKIYSKHTPINLVRDLPQGFSALEPLVDLPIGINITRFQTLLALHRSYLTPGDSSSGWTAGAAAYYVGYLQPRTFLLKYNENGTITDAVDCALDPLSETKCTLKSFTVEKGIYQTSNFRVQPTESIVRFPNITNLCPFGEVFNATRFASVYAWNRKRISNCVADYSVLYNSASFSTFKCYGVSPTKLNDLCFTNVYADSFVIRGDEVRQIAPGQTGKIADYNYKLPDDFTGCVIAWNSNNLDSKVGGNYNYLYRLFRKSNLKPFERDISTEIYQAGSTPCNGVEGFNCYFPLQSYGFQPTNGVGYQPYRVVVLSFELLHAPATVCGPKKSTNLVKNKCVNFNFNGLTGTGVLTESNKKFLPFQQFGRDIADTTDAVRDPQTLEILDITPCSFGGVSVITPGTNTSNQVAVLYQDVNCTEVPVAIHADQLTPTWRVYSTGSNVFQTRAGCLIGAEHVNNSYECDIPIGAGICASYQTQTNSPRRARSVASQSIIAYTMSLGAENSVAYSNNSIACPTNFTISVTTEILPVSMTKTSVDCTMYICGDSTECSNLLLQYGSFCTQLNRALTGIAVEQDKNTQEVFAQVKQIYKTPPIKDFGGFNFSQILPDPSKPSKRSFIEDLLFNKVTLADAGFIKQYGDCLGDISARDLICAQKFNGLTVLPPLLTDEMIAQYTSALLAGTITSGWTFGAGAALQIPFAMQMAYRFNGIGVTQNVLYENQKLIANQFNSAIGKIQDSLSSTASALGKLQDVVNQNAQALNTLVKQLSSNFGAISSVLNDILSRLDKVEAEVQIDRLITGRLQSLQTYVTQQLIRAAEIRASANLAATKMSECVLGQSKRVDFCGKGYHLMSFPQSAPHGVVFLHVTYVPAQEKNFTTAPAICHDGKAHFPREGVFVSNGTHWFVTQRNFCEPQIITTDNTFVSGNCDVVIGIVNNTVYDPLQPELDSFKEELDKYFKNHTSPDVDLGDISGINASVVNIQKEIDRLNEVAKNLNESLIDLQELGKYEQYIKGGSGYIPEAPRDGQAYVRKDGEWVLLSTFL

SEQ ID NO: 6085 - protein, 1241 aa, Artificial Sequence
  SARS-CoV-2/USA/NY-NYUMC7/2020__EPI_ISL_418192 spike protein (1-1211)(I714C_Y1110C) Foldon construct
MFVFLVLLPLVSSQCVNLTTRTQLPPAYTNSFTRGVYYPDKVFRSSVLHSTQDLFLPFFSNVTWFHAIHVSGTNGTKRFDNPVLPFNDGVYFASTEKSNIIRGWIFGTTLDSKTQSLLIVNNATNVVIKVCEFQFCNDPFLGVYHHKNNKSWMESEFRVYSSANNCTFEYVSQPFLMDLEGKQGNFKNLREFVFKNIDGYFKIYSKHTPINLVRDLPQGFSALEPLVDLPIGINITRFQTLLALHRSYLTPGDSSSGWTAGAAAYYVGYLQPRTFLLKYNENGTITDAVDCALDPLSETKCTLKSFTVEKGIYQTSNFRVQPTESIVRFPNITNLCPFGEVFNATRFASVYAWNRKRISNCVADYSVLYNSASFSTFKCYGVSPTKLNDLCFTNVYADSFVIRGDEVRQIAPGQTGKIADYNYKLPDDFTGCVIAWNSNNLDSKVGGNYNYLYRLFRKSNLKPFERDISTEIYQAGSTPCNGVEGFNCYFPLQSYGFQPTNGVGYQPYRVVVLSFELLHAPATVCGPKKSTNLVKNKCVNFNFNGLTGTGVLTESNKKFLPFQQFGRDIADTTDAVRDPQTLEILDITPCSFGGVSVITPGTNTSNQVAVLYQGVNCTEVPVAIHADQLTPTWRVYSTGSNVFQTRAGCLIGAEHVNNSYECDIPIGAGICASYQTQTNSPRRARSVASQSIIAYTMSLGAENSVAYSNNSIACPTNFTISVTTEILPVSMTKTSVDCTMYICGDSTECSNLLLQYGSFCTQLNRALTGIAVEQDKNTQEVFAQVKQIYKTPPIKDFGGFNFSQILPDPSKPSKRSFIEDLLFNKVTLADAGFIKQYGDCLGDIAARDLICAQKFNGLTVLPPLLTDEMIAQYTSALLAGTITSGWTFGAGAALQIPFAMQMAYRFNGIGVTQNVLYENQKLIANQFNSAIGKIQDSLSSTASALGKLQDVVNQNAQALNTLVKQLSSNFGAISSVLNDILSRLDKVEAEVQIDRLITGRLQSLQTYVTQQLIRAAEIRASANLAATKMSECVLGQSKRVDFCGKGYHLMSFPQSAPHGVVFLHVTYVPAQEKNFTTAPAICHDGKAHFPREGVFVSNGTHWFVTQRNFCEPQIITTDNTFVSGNCDVVIGIVNNTVYDPLQPELDSFKEELDKYFKNHTSPDVDLGDISGINASVVNIQKEIDRLNEVAKNLNESLIDLQELGKYEQYIKGGSGYIPEAPRDGQAYVRKDGEWVLLSTFL

SEQ ID NO: 6086 - protein, 1241 aa, Artificial Sequence
  SARS-CoV-2/Iceland/189/2020__EPI_ISL_417709 spike protein (1-1211)(I714C_Y1110C) Foldon construct
MFVFLVLLPLVSSQCVNLTTRTQLPPAYTNSFTRGVYYPDKVFRSSVLHSTQDLFLPFFSNVTWFHAIHVSGTNGTKRFDNPVLPFNDGVYFASTEKSNIIRGWIFGTTLDSKTQSLLIVNNATNVVIKVCEFQFCNDPFLGVYYHKNNKSWMESEFRVYSSANNCTFEYVSQPFLMDLEGKQGNFKNLREFVFKNIDGYFKIYSKHTPINLVRDLPQGFSALEPLVDLPIGINITRFQTLLALHRSYLTPGDSSSGWTAGAAAYYVGYLQPRTFLLKYNENGTITDAVDCALDPLSETKCTLKSFTVEKGIYQTSNFRVQPTESIVRFPNITNLCPFGEVFNATRFASVYAWNRKRISNCVADYSVLYNSASFSTFKCYGVSPTKLNDLCFTNVYADSFVIRGDEVRQIAPGQTGKIADYNYKLPDDFTGCVIAWNSNNLDSKVGGNYNYLYRLFRKSNLKPFERDISTEIYQAGSTPCNGVEGFNCYFPLQSYGFQPTNGVGYQPYRVVVLSFELLHAPATVCGPKKSTNLVKNKCVNFNFNGLTGTGVLTESNKKFLPFQQFGRDIADTTDAVRDPQTLEILDITPCSFGGVSVITPGTNTSNQVAVLYQGVNCTEVPVAIHADQLTPTWRVYSTGSNVFQTRAGCLIGAEHVNNSYECDIPIGAGICASYQTQTNSPRRARSVASQSIIAYTMSLGAENSVAYSNNSIACPTNFTISVTTEILPVSMTKTSVDCTMYICGDSTECSNLLLQYGSFCTQLNRALTGIAVEQDKNTQEVFAQVKQIYKTPPIKDFGGFNFSQILPDPSKPSKRSFIEDLLFNKVTLADAGFTKQYGDCLGDIAARDLICAQKFNGLTVLPPLLTDEMIAQYTSALLAGTITSGWTFGAGAALQIPFAMQMAYRFNGIGVTQNVLYENQKLIANQFNSAIGKIQDSLSSTASALGKLQDVVNQNAQALNTLVKQLSSNFGAISSVLNDILSRLDKVEAEVQIDRLITGRLQSLQTYVTQQLIRAAEIRASANLAATKMSECVLGQSKRVDFCGKGYHLMSFPQSAPHGVVFLHVTYVPAQEKNFTTAPAICHDGKAHFPREGVFVSNGTHWFVTQRNFCEPQIITTDNTFVSGNCDVVIGIVNNTVYDPLQPELDSFKEELDKYFKNHTSPDVDLGDISGINASVVNIQKEIDRLNEVAKNLNESLIDLQELGKYEQYIKGGSGYIPEAPRDGQAYVRKDGEWVLLSTFL

SEQ ID NO: 6087 - protein, 1241 aa, Artificial Sequence
  SARS-CoV-2/Australia/NSW56/2020__EPI_ISL_417408 spike protein (1-1211)(I714C_Y1110C) Foldon construct
MFVFLVLLPLVSSQCVNLTTRTQLPPAYTNSFTRGVYYPDKVFRSSVLHSTQDLFLPFFSNVTWFHAIHVSGTNGTKRFDNPVLPFNDGVYFASTEKSNIIRGWIFGTTLDSKTQSLLIVNNATNVVIKVCEFQFCNDPFLGVYYHKNNKSWMESEFRVYSSANNCTFEYVSQPFLMDLEGKQGNFKNLREFVFKNIDGYFKIYSKHTPINLVRDLPQGFSALEPLVDLPIGINITRFQTLLALHRSYLTPGDSSSGWTAGAAAYYVGYLQPRTFLLKYNENGTITDAVDCALDPLSETKCTLKSFTVEKGIYQTSNFRVQPTESIVRFPNITNLCPFGEVFNATRFASVYAWNRKRISNCVADYSVLYNSASFSTFKCYGVSPTKLNDLCFTNVYADSFVIRGDEVRQIAPGQTGKIADYNYKLPDDFTGCVIAWNSNNLDSKVGGNYNYLYRLFRKSNLKPFERDISTEIYQAGSTPCNGVEGFNCYFPLQSYGFQPTNGVGYQPYRVVVLSFELLHAPATVCGPKKSTNLVKNKCVNFNFNGLTGTGVLTESNKKFLPFQQFGRDIADTTDAVRDPQTLEILDITPCSFGGVSVITPGTNTSNQVAVLYQDVNCTEVPVAIHADQLTPTWRVYSTGSNVFQTRAGCLIGAEHVNNSYECDIPIGAGICASYQTQTNSPRRARSVASQSIIAYTMSLGAENSVAYSNNSIACPTNFTISVTTEILPVSMTKTSVDCTMYICGDSTECSNLLLQYGSFCTQLNRALTGIAVEQDKNTQEVFAQVKQIYKTPPIKDFGGFNFSQILPDSSKPSKRSFIEDLLFNKVTLADAGFIKQYGDCLGDIAARDLICAQKFNGLTVLPPLLTDEMIAQYTSALLAGTITSGWTFGAGAALQIPFAMQMAYRFNGIGVTQNVLYENQKLIANQFNSAIGKIQDSLSSTASALGKLQDVVNQNAQALNTLVKQLSSNFGAISSVLNDILSRLDKVEAEVQIDRLITGRLQSLQTYVTQQLIRAAEIRASANLAATKMSECVLGQSKRVDFCGKGYHLMSFPQSAPHGVVFLHVTYVPAQEKNFTTAPAICHDGKAHFPREGVFVSNGTHWFVTQRNFCEPQIITTDNTFVSGNCDVVIGIVNNTVYDPLQPELDSFKEELDKYFKNHTSPDVDLGDISGINASVVNIQKEIDRLNEVAKNLNESLIDLQELGKYEQYIKGGSGYIPEAPRDGQAYVRKDGEWVLLSTFL

SEQ ID NO: 6088 - protein, 1241 aa, Artificial Sequence
  SARS-CoV-2/Iceland/280/2020__EPI_ISL_417608 spike protein (1-1211)(I714C_Y1110C) Foldon construct
MFVFLVLLPLVSSQCVNLTTRTQLPPAYTNSFTRGVYYPDKVFRSSVLHSTQDLFLPFFSNVTWFHAIHVSGTNGTKRFDNPVLPFNDGVYFASTEKSNIIRGWIFGTTLDSKTQSLLIVNNATNVVIKVCEFQFCNDPFLGVYYHKNNKSWMESEFRVYSSANNCTFEYVSQPFLMDLEGKQGNFKNLREFVFKNIDGYFKIYSKHTPINLVRDLPQGFSALEPLVDLPIGINITRFQTLLALHRSYLTPGDSSSGWTAGAAAYYVGYLQPRTFLLKYNENGTITDAVDCALDPLSETKCTLKSFTVEKGIYQTSNFRVQPTESIVRFPNITNLCPFGEVFNATRFASVYAWNRKRISNCVADYSVLYNSASFSTFKCYGVSPTKLNDLCFTNVYADSFVIRGDEVRQIAPGQTGKIADYNYKLPDDFTGCVIAWNSNNLDSKVGGNYNYLYRLFRKSNLKPFERDISTEIYQAGSTPCNGVEGFNCYFPLQSYGFQPTNGVGYQPYRVVVLSFELLHAPATVCGPKKSTNLVKNKCVNFNFNGLTGTGVLTESNKKFLPFQQFGRDIADTTDAVRDPQTLEILDITPCSFGGVSVITPGTNTSNQVAVLYQGVNCTEVPVAIHADQLTPTWRVYSTGSNVFQTRAGCLIGAEHVNNSYECDIPIGAGICASYHTQTNSPRRARSVASQSIIAYTMSLGAENSVAYSNNSIACPTNFTISVTTEILPVSMTKTSVDCTMYICGDSTECSNLLLQYGSFCTQLNRALTGIAVEQDKNTQEVFAQVKQIYKTPPIKDFGGFNFSQILPDPSKPSKRSFIEDLLFNKVTLADAGFIKQYGDCLGDIAARDLICAQKFNGLTVLPPLLTDEMIAQYTSALLAGTITSGWTFGAGAALQIPFAMQMAYRFNGIGVTQNVLYENQKLIANQFNSAIGKIQDSLSSTASALGKLQDVVNQNAQALNTLVKQLSSNFGAISSVLNDILSRLDKVEAEVQIDRLITGRLQSLQTYVTQQLIRAAEIRASANLAATKMSECVLGQSKRVDFCGKGYHLMSFPQSAPHGVVFLHVTYVPAQEKNFTTAPAICHDGKAHFPREGVFVSNGTHWFVTQRNFCEPQIITTDNTFVSGNCDVVIGIVNNTVYDPLQPELDSFKEELDKYFKNHTSPDVDLGDISGINASVVNIQKEIDRLNEVAKNLNESLIDLQELGKYEQYIKGGSGYIPEAPRDGQAYVRKDGEWVLLSTFL

SEQ ID NO: 6089 - protein, 1241 aa, Artificial Sequence; identical to SEQ ID NO: 6044
  SARS-CoV-2/Iceland/247/2020__EPI_ISL_417575 spike protein (1-1211)(I714C_Y1110C) Foldon construct

SEQ ID NO: 6090 - protein, 1241 aa, Artificial Sequence
  SARS-CoV-2/Iceland/238/2020__EPI_ISL_417566 spike protein (1-1211)(I714C_Y1110C) Foldon construct
MFVFLVLLPLVSSQCVNLTTRTQLPPAYTNSFTRGVYYPDKVFRSSVLHSTQDLFLPFFSNVTWFHAIHVSGTNGTKRFDNPVLPFNDGVYFASTEKSNIIRGWIFGTTLDSKTQSLLIVNNATNVVIKVCEFQFCNDPFLGVYYHKNNKSWMESEFRVYSSANNCTFEYVSQPFLMDLEGKQGNFKNLREFVFKNIDGYFKIYSKHTPINLVRDLPQGFSALEPLVDLPIGINITRFQTLLALHRSYLTPGDSSSGWTAGAAAYYVGYLQPRTFLLKYNENGTITDAVDCALDPLSETKCTLKSFTVEKGIYQTSNFRVQPTESIVRFPNITNLCPFGEVFNATRFASVYAWNRKRISNCVADYSVLYNSASFSTFKCYGVSPTKLNDLCFTNVYADSFVIRGDEVRQIAPGQTGKIADYNYKLPDDFTGCVIAWNSNNLDSKVGGNYNYLYRLFRKSNLKPFERDISTEIYQAGSTPCNGVEGFNCYFPLQSYGFQPTNGVGYQPYRVVVLSFELLHAPATVCGPKKSTNLVKNKCVNFNFNGLTGTGVLTESNKKFLPFQQFGRDIADTTDAVRDPQTLEILDITPCSFGGVSVITPGTNTSNQVAVLYQGVNCTEVPVAIHADQLTPTWRVYSTGSNVFQTRAGCLIGAEHVNNSYECDIPIGAGICASYQTQTNSPRRARSVASQSIIAYTMSLGAENSVAYSNNSIACPTNFTISVTTEILPVSMTKTSVDCTMYICGDSTECSNLLLQYGSFCTQLNRALTGIAVEQDKNTQEVFAQVKQIYKTPPIKDFGGFNFSQILPDPSKPSKRSFIEDLLFNKVTLADVGFIKQYGDCLGDIAARDLICAQKFNGLTVLPPLLTDEMIAQYTSALLAGTITSGWTFGAGAALQIPFAMQMAYRFNGIGVTQNVLYENQKLIANQFNSAIGKIQDSLSSTASALGKLQDVVNQNAQALNTLVKQLSSNFGAISSVLNDILSRLDKVEAEVQIDRLITGRLQSLQTYVTQQLIRAAEIRASANLAATKMSECVLGQSKRVDFCGKGYHLMSFPQSAPHGVVFLHVTYVPAQEKNFTTAPAICHDGKAHFPREGVFVSNGTHWFVTQRNFCEPQIITTDNTFVSGNCDVVIGIVNNTVYDPLQPELDSFKEELDKYFKNHTSPDVDLGDISGINASVVNIQKEIDRLNEVAKNLNESLIDLQELGKYEQYIKGGSGYIPEAPRDGQAYVRKDGEWVLLSTFL

SEQ ID NO: 6091 - protein, 1241 aa, Artificial Sequence
  SARS-CoV-2/Greece/16/2020__EPI_ISL_418265 spike protein (1-1211)(I714C_Y1110C) Foldon construct
MFVFLVLLPLVSSQCVNLTTRTQLPPAYTNSFTRGVYYPDKVFRSSVLHSTQDLFLPFFSNVTWFHAIHVSGTNGTKRFDNPVLPFNDGVYFASTEKSNIIRGWIFGTTLDSKTQSLLIVNNATNVVIKVCEFQFCNDPFLGVYYHKNNKSWMESEFRVYSSANNCTFEYVSQPFLMDLEGKQGNFKNLREFVFKNVDGYFKIYSKHTPINLVRDLPQGFSALEPLVDLPIGINITRFQTLLALHRSYLTPGDSSSGWTAGAAAYYVGYLQPRTFLLKYNENGTITDAVDCALDPLSETKCTLKSFTVEKGIYQTSNFRVQPTESIVRFPNITNLCPFGEVFNATRFASVYAWNRKRISNCVADYSVLYNSASFSTFKCYGVSPTKLNDLCFTNVYADSFVIRGDEVRQIAPGQTGKIADYNYKLPDDFTGCVIAWNSNNLDSKVGGNYNYLYRLFRKSNLKPFERDISTEIYQAGSTPCNGVEGFNCYFPLQSYGFQPTNGVGYQPYRVVVLSFELLHAPATVCGPKKSTNLVKNKCVNFNFNGLTGTGVLTESNKKFLPFQQFGRDIADTTDAVRDPQTLEILDITPCSFGGVSVITPGTNTSNQVAVLYQDVNCTEVPVAIHADQLTPTWRVYSTGSNVFQTRAGCLIGAEHVNNSYECDIPIGAGICASYQTQTNSPRRARSVASQSIIAYTMSLGAENSVAYSNNSIACPTNFTISVTTEILPVSMTKTSVDCTMYICGDSTECSNLLLQYGSFCTQLNRALTGIAVEQDKNTQEVFAQVKQIYKTPPIKDFGGFNFSQILPDPSKPSKRSFIEDLLFNKVTLADAGFIKQYGDCLGDIAARDLICAQKFNGLTVLPPLLTDEMIAQYTSALLAGTITSGWTFGAGAALQIPFAMQMAYRFNGIGVTQNVLYENQKLIANQFNSAIGKIQDSLSSTASALGKLQDVVNQNAQALNTLVKQLSSNFGAISSVLNDILSRLDKVEAEVQIDRLITGRLQSLQTYVTQQLIRAAEIRASANLAATKMSECVLGQSKRVDFCGKGYHLMSFPQSAPHGVVFLHVTYVPAQEKNFTTAPAICHDGKAHFPREGVFVSNGTHWFVTQRNFCEPQIITTDNTFVSGNCDVVIGIVNNTVYDPLQPELDSFKEELDKYFKNHTSPDVDLGDISGINASVVNIQKEIDRLNEVAKNLNESLIDLQELGKYEQYIKGGSGYIPEAPRDGQAYVRKDGEWVLLSTFL

SEQ ID NO: 6092 - protein, 1241 aa, Artificial Sequence
  SARS-CoV-2/Iceland/319/2020__EPI_ISL_417648 spike protein (1-1211)(I714C_Y1110C) Foldon construct
MFVFLVLLPLVSSQCVNLTTRTQLPPAYTNSFTRGVYYPDKVFRSSVLHSTQDLFLPFFSNVTWFHAIHVSGTNGTKRFDNPVLPFNDGVYFASTEKSNIIRGWIFGTTLDSKTQSLLIVNNATNVVIKVCEFQFCNDPFLGVYYHKNNKSWMESEFRVYSSANNCTFEYVSQPFLIDLEGKQGNFKNLREFVFKNIDGYFKIYSKHTPINLVRDLPQGFSALEPLVDLPIGINITRFQTLLALHRSYLTPGDSSSGWTAGAAAYYVGYLQPRTFLLKYNENGTITDAVDCALDPLSETKCTLKSFTVEKGIYQTSNFRVQPTESIVRFPNITNLCPFGEVFNATRFASVYAWNRKRISNCVADYSVLYNSASFSTFKCYGVSPTKLNDLCFTNVYADSFVIRGDEVRQIAPGQTGKIADYNYKLPDDFTGCVIAWNSNNLDSKVGGNYNYLYRLFRKSNLKPFERDISTEIYQAGSTPCNGVEGFNCYFPLQSYGFQPTNGVGYQPYRVVVLSFELLHAPATVCGPKKSTNLVKNKCVNFNFNGLTGTGVLTESNKKFLPFQQFGRDIADTTDAVRDPQTLEILDITPCSFGGVSVITPGTNTSNQVAVLYQGVNCTEVPVAIHADQLTPTWRVYSTGSNVFQTRAGCLIGAEHVNNSYECDIPIGAGICASYQTQTNSPRRARSVASQSIIAYTMSLGAENSVAYSNNSIACPTNFTISVTTEILPVSMTKTSVDCTMYICGDSTECSNLLLQYGSFCTQLNRALTGIAVEQDKNTQEVFAQVKQIYKTPPIKDFGGFNFSQILPDPSKPSKRSFIEDLLFNKVTLADAGFIKQYGDCLGDIAARDLICAQKFNGLTVLPPLLTDEMIAQYTSALLAGTITSGWTFGAGAALQIPFAMQMAYRFNGIGVTQNVLYENQKLIANQFNSAIGKIQDSLSSTASALGKLQDVVNQNAQALNTLVKQLSSNFGAISSVLNDILSRLDKVEAEVQIDRLITGRLQSLQTYVTQQLIRAAEIRASANLAATKMSECVLGQSKRVDFCGKGYHLMSFPQSAPHGVVFLHVTYVPAQEKNFTTAPAICHDGKAHFPREGVFVSNGTHWFVTQRNFCEPQIITTDNTFVSGNCDVVIGIVNNTVYDPLQPELDSFKEELDKYFKNHTSPDVDLGDISGINASVVNIQKEIDRLNEVAKNLNESLIDLQELGKYEQYIKGGSGYIPEAPRDGQAYVRKDGEWVLLSTFL

SEQ ID NO: 6093 - protein, 1241 aa, Artificial Sequence
  SARS-CoV-2/Congo/94/2020__EPI_ISL_417947 spike protein (1-1211)(I714C_Y1110C) Foldon construct
MFVFLVLLPLVSSQCVNLTTRTQLPPAYTNSFTRGVYYPDKVFRSSVLHSTQDLFLPFFSNVTWFHAIHVSGTNGTKRFDNPVLPFNDGVYFASTEKSNIIRGWIFGTTLDSKTQSLLIVNNATNVVIKVCEFQFCNDPFLGVYYHKNNKSWMESEFRVYSSANNCTFEYVSQPFLMDLEGKQGNFKNLREFVFKNIDGYFKIYSKHTPINLVRDLPQGFSALEPLVDLPIGINITRFQTLLALHRSYLTPGDSSSGWTAGAAAYYVGYLQPRTFLLKYNENGTITDAVDCALDPLSETKCTLKSFTVEKGIYQTSNFRVQPTESIVRFPNITNLCPFGEVFNATRFASVYAWNRKRISNCVADYSVLYNSASFSTFKCYGVSPTKLNDLCFTNVYADSFVIRGDEVRQIAPGQTGKIADYNYKLPDDFTGCVIAWNSNNLDSKVGGNYNYLYRLFRKSNLKPFERDISTEIYQAGSTPCNGVEGFNCYFPLQSYGFQPTNGVGYQPYRVVVLSFELLHAPATVCGPKKSTNLVKNKCVNFNFNGLTGTGVLTESNKKFLPFQQFGRDIADTTDAVRDPQTLEILDITPCSFGGVSVITPGTNTSNQVAVLYQGVNCTEVPVAIHADQLTPTWRVYSTGSNVFQTRAGCLIGAEHVNNSYECDIPIGAGICASYQTQTNSPRRARSVASQSIIAYTMSLGAENSVAYSNNSIACPTNFTISVTTEILPVSMTKTSVDCTMYICGDSTECSNLLLQYGSFCTQLNRALTGIAVEQDKNTQEVFAQVKQIYKTPPIKDFGGFNFSQILPDPSKPSKRSFIEDILFNKVTLADAGFIKQYGDCLGDIAARDLICAQKFNGLTVLPPLLTDEMIAQYTSALLAGTITSGWTFGAGAALQIPFAMQMAYRFNGIGVTQNVLYENQKLIANQFNSAIGKIQDSLSSTASALGKLQDVVNQNAQALNTLVKQLSSNFGAISSVLNDILSRLDKVEAEVQIDRLITGRLQSLQTYVTQQLIRAAEIRASANLAATKMSECVLGQSKRVDFCGKGYHLMSFPQSAPHGVVFLHVTYVPAQEKNFTTAPAICHDGKAHFPREGVFVSNGTHWFVTQRNFCEPQIITTDNTFVSGNCDVVIGIVNNTVYDPLQPELDSFKEELDKYFKNHTSPDVDLGDISGINASVVNIQKEIDRLNEVAKNLNESLIDLQELGKYEQYIKGGSGYIPEAPRDGQAYVRKDGEWVLLSTFL

SEQ ID NO: 6094 - protein, 1241 aa, Artificial Sequence
  SARS-CoV-2/Congo/158/2020__EPI_ISL_417950 spike protein (1-1211)(I714C_Y1110C) Foldon construct
MFVFLVLLPLVSSQCVNLTTRTQLPPAYTNSFTRGVYYPDKVFRSSVLHSTQDLFLPFFSNVTWFHAIHVSGTNGTKRFDNPVLPFNDGVYFASTEKSNIIRGWIFGTTLDSKTQSLLIVNNATNVVIKVCEFQFCNDPFLGVYYHKNNKSWMESEFRVYSSANNCTFEYVSQPFLMDLEGKQGNFKNLREFVFKNIDGYFKIYSKHTPINLVRDLPQGFSALEPLVDLPIGINITRFQTLLALHRSYLTPGDSSSGWTAGAAAYYVGYLQPRTFLLKYNENGTITDAVDCALDPLSETKCTLKSFTVEKGIYQTSNFRVQPTESIVRFPNITNLCPFGEVFNATRFASVYAWNRKRISNCVADYSVLYNSASFSTFKCYGVSPTKLNDLCFTNVYADSFVIRGDEVRQIAPGQTGKIADYNYKLPDDFTGCVIAWNSNNLDSKVGGNYNYLYRLFRKSNLKPFERDISTEIYQAGSTPCNGVEGFNCYFPLQSYGFQPTNGVGYQPYRVVVLSFELLHAPATVCGPKKSTNLVKNKCVNFNFNGLTGTGVLTESNKKFLPFQQFGRDIADTTDAVRDPQTLEILDITPCSFGGVSVITPGTNTSNQVAVLYQDVNCTEVPVAIHADQLTPTWRVYSTGSNVFQTRAGCLIGAEHVNNSYECDIPIGAGICASYQTQTNSPRRARSVASQSIIAYTMSLGAENSVAYSNNSIACPTNFTISVTTEILPVSMTKTSVDCTMYICGDSTECSNLLLQYGSFCTQLNRALTGIAVEQDKNTQEVFAQVKQIYKTPPIKDFGGFNFSQILPDPSKPSKRSFIEDLLFNKVTLADAGFIKQYGDCLGDIAARDLICAQKFNGLTVLPPLLTDEMIAQYTSALLAGTITSGWTFGAGAALQIPFAMQMAYRFNGIGVTQNVLYENQKLIANQFNSAIGKIQDSLSSTASALGKLQDVVNQNAQALNTLVKQLSSNFGAISSVLNDILSRLDKVEAEVQIDRLITGRLQSLQTYVTQQLIRAAEIRASANLAATKMSECVLGQSKRVDFCGKGYHLMSFPQSAPHGVVFLHVTYVPAQEKNFTTAPAICHDGKAHFPREGVFVSNGTHWFVTQRNFCEPQIITTDNTFLSGNCDVVIGIVNNTVYDPLQPELDSFKEELDKYFKNHTSPDVDLGDISGINASVVNIQKEIDRLNEVAKNLNESLIDLQELGKYEQYIKGGSGYIPEAPRDGQAYVRKDGEWVLLSTFL

SEQ ID NO: 6095 - protein, 1241 aa, Artificial Sequence
  SARS-CoV-2/USA/UT-00034/2020__EPI_ISL_417977 spike protein (1-1211)(I714C_Y1110C) Foldon construct
MFVFLVLLPLVSSQCVNLTTRTQLPPAYTNSFTRGVYYPDKVFRSSVLHSTQDLFLPFFSNVTWFHAIHVSGTNGTKRFDNPVLPFNDGVYFASTEKSNIIRGWIFGTTLDSKTQSLLIVNNATNVVIKVCEFQFCNDPFLGVYYYKNNKSWMESEFRVYSSANNCTFEYVSQPFLMDLEGKQGNFKNLREFVFKNIDGYFKIYSKHTPINLVRDLPQGFSALEPLVDLPIGINITRFQTLLALHRSYLTPGDSSSGWTAGAAAYYVGYLQPRTFLLKYNENGTITDAVDCALDPLSETKCTLKSFTVEKGIYQTSNFRVQPTESIVRFPNITNLCPFGEVFNATRFASVYAWNRKRISNCVADYSVLYNSASFSTFKCYGVSPTKLNDLCFTNVYADSFVIRGDEVRQIAPGQTGKIADYNYKLPDDFTGCVIAWNSNNLDSKVGGNYNYLYRLFRKSNLKPFERDISTEIYQAGSTPCNGVEGFNCYFPLQSYGFQPTNGVGYQPYRVVVLSFELLHAPATVCGPKKSTNLVKNKCVNFNFNGLTGTGVLTESNKKFLPFQQFGRDIADTTDAVRDPQTLEILDITPCSFGGVSVITPGTNTSNQVAVLYQGVNCTEVPVAIHADQLTPTWRVYSTGSNVFQTRAGCLIGAEHVNNSYECDIPIGAGICASYQTQTNSPRRARSVASQSIIAYTMSLGAENSVAYSNNSIACPTNFTISVTTEILPVSMTKTSVDCTMYICGDSTECSNLLLQYGSFCTQLNRALTGIAVEQDKNTQEVFAQVKQIYKTPPIKDFGGFNFSQILPDPSKPSKRSFIEDLLFNKVTLADAGFIKQYGDCLGDIAARDLICAQKFNGLTVLPPLLTDEMIAQYTSALLAGTITSGWTFGAGAALQIPFAMQMAYRFNGIGVTQNVLYENQKLIANQFNSAIGKIQDSLSSTASALGKLQDVVNQNAQALNTLVKQLSSNFGAISSVLNDILSRLDKVEAEVQIDRLITGRLQSLQTYVTQQLIRAAEIRASANLAATKMSECVLGQSKRVDFCGKGYHLMSFPQSAPHGVVFLHVTYVPAQEKNFTTAPAICHDGKAHFPREGVFVSNGTHWFVTQRNFCEPQIITTDNTFVSGNCDVVIGIVNNTVYDPLQPELDSFKEELDKYFKNHTSPDVDLGDISGINASVVNIQKEIDRLNEVAKNLNESLIDLQELGKYEQYIKGGSGYIPEAPRDGQAYVRKDGEWVLLSTFL

SEQ ID NO: 6096 - protein, 1241 aa, Artificial Sequence
  SARS-CoV-2/USA/UT-00033/2020__EPI_ISL_417976 spike protein (1-1211)(I714C_Y1110C) Foldon construct
MFVFLVLLPLVSSQCVNLTTRTQLPPAYTNSFTRGVYYPDKVFRSSVLHSTQDLFLPFFSNVTWFHAIHVSGTNGTKRFDNPVLPFNDGVYFASTEKSNIIRGWIFGTTLDSKTQSLLIVNNATNVVIKVCEFQFCNDPFLGVYYHKNNKSWMESEFRVYSSANNCTFEYVSQPFLMDLEGKQGNFKNLREFVFKNIDGYFKIYSKHTPINLVRDLPQGFSALEPLVDLPIGINITRFQTLLALHRSYLTPGDSSSGLTAGAAAYYVGYLQPRTFLLKYNENGTITDAVDCALDPLSETKCTLKSFTVEKGIYQTSNFRVQPTESIVRFPNITNLCPFGEVFNATRFASVYAWNRKRISNCVADYSVLYNSASFSTFKCYGVSPTKLNDLCFTNVYADSFVIRGDEVRQIAPGQTGKIADYNYKLPDDFTGCVIAWNSNNLDSKVGGNYNYLYRLFRKSNLKPFERDISTEIYQAGSTPCNGVEGFNCYFPLQSYGFQPTNGVGYQPYRVVVLSFELLHAPATVCGPKKSTNLVKNKCVNFNFNGLTGTGVLTESNKKFLPFQQFGRDIADTTDAVRDPQTLEILDITPCSFGGVSVITPGTNTSNQVAVLYQGVNCTEVPVAIHADQLTPTWRVYSTGSNVFQTRAGCLIGAEHVNNSYECDIPIGAGICASYQTQTNSPRRARSVASQSIIAYTMSLGAENSVAYSNNSIACPTNFTISVTTEILPVSMTKTSVDCTMYICGDSTECSNLLLQYGSFCTQLNRALTGIAVEQDKNTQEVFAQVKQIYKTPPIKDFGGFNFSQILPDPSKPSKRSFIEDLLFNKVTLADAGFIKQYGDCLGDIAARDLICAQKFNGLTVLPPLLTDEMIAQYTSALLAGTITSGWTFGAGAALQIPFAMQMAYRFNGIGVTQNVLYENQKLIANQFNSAIGKIQDSLSSTASALGKLQDVVNQNAQALNTLVKQLSSNFGAISSVLNDILSRLDKVEAEVQIDRLITGRLQSLQTYVTQQLIRAAEIRASANLAATKMSECVLGQSKRVDFCGKGYHLMSFPQSAPHGVVFLHVTYVPAQEKNFTTAPAICHDGKAHFPREGVFVSNGTHWFVTQRNFCEPQIITTDNTFVSGNCDVVIGIVNNTVYDPLQPELDSFKEELDKYFKNHTSPDVDLGDISGINASVVNIQKEIDRLNEVAKNLNESLIDLQELGKYEQYIKGGSGYIPEAPRDGQAYVRKDGEWVLLSTFL

SEQ ID NO: 6097 - protein, 1241 aa, Artificial Sequence
  SARS-CoV-2/USA/WI-13/2020__EPI_ISL_417516 spike protein (1-1211)(I714C_Y1110C) Foldon construct
MFVFLVLLPLVSSQCVNLTTRTQLPPAYTNSFTRGVYYPDKVFRSSVLHSTQDLFLPFFSNVTWFHAIHVSGTNGTKRFDNPVLPFNDGVYFASTEKSNIIRGWIFGTTLDSKTQSLLIVNNATNVVIKVCEFQFCNDPFLGVYYHKNNKSWMESEFRVYSSANNCTFEYVSQPFLMDLEGKQGNFKNLREFVFKNIDGYFKIYSKHTPINLVRDLPQGFSALEPLVDLPIGINITRFQTLLALHRSYLTPGDSSSGWTAGAAAYYVGYLQPRTFLLKYNENGTITDAVDCALDPLSETKCTLKSFTVEKGIYQTSNFRVLPTESIVRFPNITNLCPFGEVFNATRFASVYAWNRKRISNCVADYSVLYNSASFSTFKCYGVSPTKLNDLCFTNVYADSFVIRGDEVRQIAPGQTGKIADYNYKLPDDFTGCVIAWNSNNLDSKVGGNYNYLYRLFRKSNLKPFERDISTEIYQAGSTPCNGVEGFNCYFPLQSYGFQPTNGVGYQPYRVVVLSFELLHAPATVCGPKKSTNLVKNKCVNFNFNGLTGTGVLTESNKKFLPFQQFGRDIADTTDAVRDPQTLEILDITPCSFGGVSVITPGTNTSNQVAVLYQGVNCTEVPVAIHADQLTPTWRVYSTGSNVFQTRAGCLIGAEHVNNSYECDIPIGAGICASYQTQTNSPRRARSVASQSIIAYTMSLGAENSVAYSNNSIACPTNFTISVTTEILPVSMTKTSVDCTMYICGDSTECSNLLLQYGSFCTQLNRALTGIAVEQDKNTQEVFAQVKQIYKTPPIKDFGGFNFSQILPDPSKPSKRSFIEDLLFNKVTLADAGFIKQYGDCLGDIAARDLICAQKFNGLTVLPPLLTDEMIAQYTSALLAGTITSGWTFGAGAALQIPFAMQMAYRFNGIGVTQNVLYENQKLIANQFNSAIGKIQDSLSSTASALGKLQDVVNQNAQALNTLVKQLSSNFGAISSVLNDILSRLDKVEAEVQIDRLITGRLQSLQTYVTQQLIRAAEIRASANLAATKMSECVLGQSKRVDFCGKGYHLMSFPQSAPHGVVFLHVTYVPAQEKNFTTAPAICHDGKAHFPREGVFVSNGTHWFVTQRNFCEPQIITTDNTFVSGNCDVVIGIVNNTVYDPLQPELDSFKEELDKYFKNHTSPDVDLGDISGINASVVNIQKEIDRLNEVAKNLNESLIDLQELGKYEQYIKGGSGYIPEAPRDGQAYVRKDGEWVLLSTFL

SEQ ID NO: 6098 - protein, 1240 aa, Artificial Sequence
  SARS-CoV-2/India/1-27/2020__EPI_ISL_413522 spike protein (1-1210)(I713C_Y1109C) Foldon construct
MFVFLVLLPLVSSQCVNLTTRTQLPPAYTNSFTRGVYYPDKVFRSSVLHSTQDLFLPFFSNVTWFHAIHVSGTNGTKRFDNPVLPFNDGVYFASTEKSNIIRGWIFGTTLDSKTQSLLIVNNATNVVIKVCEFQFCNDPFLGVYHKNNKSWMESEFRVYSSANNCTFEYVSQPFLMDLEGKQGNFKNLREFVFKNIDGYFKIYSKHTPINLVRDLPQGFSALEPLVDLPIGINITRFQTLLALHRSYLTPGDSSSGWTAGAAAYYVGYLQPRTFLLKYNENGTITDAVDCALDPLSETKCTLKSFTVEKGIYQTSNFRVQPTESIVRFPNITNLCPFGEVFNATRFASVYAWNRKRISNCVADYSVLYNSASFSTFKCYGVSPTKLNDLCFTNVYADSFVIRGDEVIQIAPGQTGKIADYNYKLPDDFTGCVIAWNSNNLDSKVGGNYNYLYRLFRKSNLKPFERDISTEIYQAGSTPCNGVEGFNCYFPLQSYGFQPTNGVGYQPYRVVVLSFELLHAPATVCGPKKSTNLVKNKCVNFNFNGLTGTGVLTESNKKFLPFQQFGRDIADTTDAVRDPQTLEILDITPCSFGGVSVITPGTNTSNQVAVLYQDVNCTEVPVAIHADQLTPTWRVYSTGSNVFQTRAGCLIGAEHVNNSYECDIPIGAGICASYQTQTNSPRRARSVASQSIIAYTMSLGAENSVAYSNNSIACPTNFTISVTTEILPVSMTKTSVDCTMYICGDSTECSNLLLQYGSFCTQLNRALTGIAVEQDKNTQEVFAQVKQIYKTPPIKDFGGFNFSQILPDPSKPSKRSFIEDLLFNKVTLADAGFIKQYGDCLGDIAARDLICAQKFNGLTVLPPLLTDEMIAQYTSALLAGTITSGWTFGAGAALQIPFAMQMAYRFNGIGVTQNVLYENQKLIANQFNSAIGKIQDSLSSTASALGKLQDVVNQNAQALNTLVKQLSSNFGAISSVLNDILSRLDKVEAEVQIDRLITGRLQSLQTYVTQQLIRAAEIRASANLAATKMSECVLGQSKRVDFCGKGYHLMSFPQSAPHGVVFLHVTYVPAQEKNFTTAPAICHDGKAHFPREGVFVSNGTHWFVTQRNFCEPQIITTDNTFVSGNCDVVIGIVNNTVYDPLQPELDSFKEELDKYFKNHTSPDVDLGDISGINASVVNIQKEIDRLNEVAKNLNESLIDLQELGKYEQYIKGGSGYIPEAPRDGQAYVRKDGEWVLLSTFL

SEQ ID NO: 6099 - protein, 1235 aa, Artificial Sequence
  SARS-CoV-2/pangolin/Guangxi/P4L/2017__EPI_ISL_410538 spike protein (1-1205)(I708C_Y1104C) Foldon construct
MFVFLFVLPLVSSQCVNLTTRTGIPPGYTNSSTRGVYYPDKVFRSSILHLTQDLFLPFFSNVTWFNTINYQGGFKKFDNPVLPFNDGVYFASTEKSNIIRGWIFGTTLDARTQSLLIVNNATNVVIKVCEFQFCTDPFLGVYYHNNNKTWVENEFRVYSSANNCTFEYISQPFLMDLEGKQGNFKNLREFVFKNVDGYFKIYSKHTPIDLVRDLPRGFAALEPLVDLPIGINITRFQTLLALHRSYLTPGNLESGWTTGAAAYYVGYLQQRTFLLSYNQNGTITDAVDCSLDPLSETKCTLKSLTVEKGIYQTSNFRVQPTISIVRFPNITNLCPFGEVFNASKFASVYAWNRKRISNCVADYSVLYNSTSFSTFKCYGVSPTKLNDLCFTNVYADSFVVKGDEVRQIAPGQTGVIADYNYKLPDDFTGCVIAWNSVKQDALTGGNYGYLYRLFRKSKLKPFERDISTEIYQAGSTPCNGQVGLNCYYPLERYGFHPTTGVNYQPFRVVVLSFELLNGPATVCGPKLSTTLVKDKCVNFNFNGLTGTGVLTTSKKQFLPFQQFGRDISDTTDAVRDPQTLEILDITPCSFGGVSVITPGTNTSNQVAVLYQDVNCTEVPMAIHAEQLTPAWRVYSAGANVFQTRAGCLVGAEHVNNSYECDIPVGAGICASYHSMSSLRSVNQRSIIAYTMSLGAENSVAYSNNSIACPTNFTISVTTEILPVSMTKTSVDCTMYICGDSIECSNLLLQYGSFCTQLNRALTGIAVEQDKNTQEVFAQVKQIYKTPPIKDFGGFNFSQILPDPSKPSKRSFIEDLLFNKVTLADAGFIKQYGDCLGDIAARDLICAQKFNGLTVLPPLLTDEMIAQYTSALLAGTITSGWTFGAGAALQIPFAMQMAYRFNGIGVTQNVLYENQKLIANQFNSAIGKIQDSLSSTASALGKLQDVVNQNAQALNTLVKQLSSNFGAISSVLNDILSRLDKVEAEVQIDRLITGRLQSLQTYVTQQLIRAAEIRASANLAATKMSECVLGQSKRVDFCGKGYHLMSFPQSAPHGVVFLHVTYVPAQEKNFTTAPAICHEGKAHFPREGVFVSNGTHWFITQRNFCEPQIITTDNTFVSGSCDVVIGIVNNTVYDPLQPELDSFKEELDKYFKNHTSPDVDLGDISGINASVVNIQKEIDRLNEVAKNLNESPIDLQELGKYEQYIKGGSGYIPEAPRDGQAYVRKDGEWVLLSTFL

SEQ ID NO: 6100 - protein, 1235 aa, Artificial Sequence
  SARS-CoV-2/pangolin/Guangxi/P5L/2017__EPI_ISL_410540 spike protein (1-1205)(I708C_Y1104C) Foldon construct
MFVFLFVLPLVSSQCVNLTTRTGIPPGYTNSSTRGVYYPDKVFRSSILHLTQDLFLPFFSNVTWFNTINYQGGFKKFDNPVLPFNDGVYFASTEKSNIIRGWIFGTTLDARTQSLLIVNNATNVVIKVCEFQFCTDPFLGVYYHNNNKTWVENEFRVYSSANNCTFEYISQPFLMDLEGKQGNFKNLREFVFKNVDGYFKIYSKHTPIDLVRDLPRGFAALEPLVDLPIGINITRFQTLLALHRSYLTPGKLESGWTTGAAAYYVGYLQQRTFLLSYNQNGTITDAVDCSLDPLSETKCTLKSLTVEKGIYQTSNFRVQPTISIVRFPNITNLCPFGEVFNASKFASVYAWNRKRISNCVADYSVLYNSTSFSTFKCYGVSPTKLNDLCFTNVYADSFVVKGDEVRQIAPGQTGVIADYNYKLPDDFTGCVIAWNSVKQDALTGGNYGYLYRLFRKSKLKPFERDISTEIYQAGSTPCNGQVGLNCYYPLERYGFHPTTGVNYQPFRVVVLSFELLNGPATVCGPKLSTTLVKDKCVNFNFNGLTGTGVLTTSKKQFLPFQQFGRDISDTTDAVRDPQTLEILDITPCSFGGVSVITPGTNTSNQVAVLYQDVNCTEVPMAIHAEQLTPAWRVYSAGANVFQTRAGCLVGAEHVNNSYECDIPVGAGICASYHSMSSFRSVNQRSIIAYTMSLGAENSVAYSNNSIACPTNFTISVTTEILPVSMTKTSVDCTMYICGDSIECSNLLLQYGSFCTQLNRALTGIAVEQDKNTQEVFAQVKQIYKTPPIKDFGGFNFSQILPDPSKPSKRSFIEDLLFNKVTLADAGFIKQYGDCLGDIAARDLICAQKFNGLTVLPPLLTDEMIAQYTSALLAGTITSGWTFGAGAALQIPFAMQMAYRFNGIGVTQNVLYENQKLIANQFNSAIGKIQDSLSSTASALGKLQDVVNQNAQALNTLVKQLSSNFGAISSVLNDILSRLDKVEAEVQIDRLITGRLQSLQTYVTQQLIRAAEIRASANLAATKMSECVLGQSKRVDFCGKGYHLMSFPQSAPHGVVFLHVTYVPAQEKNFTTAPAICHEGKAHFPREGVFVSNGTHWFITQRNFCEPQIITTDNTFVSGSCDVVIGIVNNTVYDPLQPELDSFKEELDKYFKNHTSPDVDLGDISGINASVVNIQKEIDRLNEVAKNLNESLIDLQELGKYEQYIKGGSGYIPEAPRDGQAYVRKDGEWVLLSTFL

SEQ ID NO: 6101 - protein, 1235 aa, Artificial Sequence
  SARS-CoV-2/pangolin/Guangxi/P5E/2017__EPI_ISL_410541 spike protein (1-1205)(I708C_Y1104C) Foldon construct
MFVFLFVLPLVSSQCVNLTTRTGIPPGYTNSSTRGVYYPDKVFRSSILHLTQDLFLPFFSNVTWFNTITYQGGSKKFDNPVLPFNDGVYFASTEKSNIIRGWIFGTTLDARTQSLLIVNNATNVVIKVCEFQFCTDPFLGVYYHNNNKTWVENEFRVYSSANNCTFEYISQPFLMDLEGKQGNFKNLREFVFKNVDGYFKIYSKHTPIDLVRDLPRGFAALEPLVDLPIGINITRFQTLLALHRSYLTPGKLESGWTTGAAAYYVGYLQQRTFLLSYNQNGTITDAVDCSLDPLSETKCTLKSLTVEKGIYQTSNFRVQPTISIVRFPNITNLCPFGEVFNASKFASVYAWNRKRISNCVADYSVLYNSTSFSTFKCYGVSPTKLNDLCFTNVYADSFVVKGDEVRQIAPGQTGVIADYNYKLPDDFTGCVIAWNSVKQDALTGDNYGYLYRLFRKSKLKPFERDISTEIYQAGSTPCNGQVGLNCYYPLERYGFHPTTGVNYQPFRVVVLSFELLNGPATVCGPKLSTTLVKDKCVNFNFNGLTGTGVLTTSKKQFLPFQQFGRDISDTTDAVRDPQTLEILDITPCSFGGVSVITPGTNTSNQVAVLYQDVNCTEVPMAIHAEQLTPAWRVYSAGANVFQTRAGCLVGAEHVNNSYECDIPVGAGICASYHSMSSFRSVNQRSIIAYTMSLGAENSVAYSNNSIACPTNFTISVTTEILPVSMTKTSVDCTMYICGDSIECSNLLLQYGSFCTQLNRALTGIAVEQDKNTQEVFAQVKQIYKTPPIKDFGGFNFSQILPDPSKPSKRSFIEDLLFNKVTLADAGFIKQYGDCLGDIAARDLICAQKFNGLTVLPPLLTDEMIAQYTSALLAGTITSGWTFGAGAALQIPFAMQMAYRFNGIGVTQNVLYENQKLIANQFNSAIGKIQDSLSSTASALGKLQDVVNQNAQALNTLVKQLSSNFGAISSVLNDILSRLDKVEAEVQIDRLITGRLQSLQTYVTQQLIRAAEIRASANLAATKMSECVLGQSKRVDFCGKGYHLMSFPQSAPHGVVFLHVTYVPAQEKNFTTAPAICHEGKAHFPREGVFVSNGTHWFITQRNFCEPQIITTDNTFVSGSCDVVIGIVNNTVYDPLQPELDSFKEELDKYFKNHTSPDVDLGDISGINASVVNIQKEIDRLNEVAKNLNESLIDLQELGKYEQYIKGGSGYIPEAPRDGQAYVRKDGEWVLLSTFL

SEQ ID NO: 6102 - protein, 1233 aa, Artificial Sequence
  SARS-CoV-2/pangolin/Guangxi/P1E/2017__EPI_ISL_410539 spike protein (1-1203)(I706C_Y1102C) Foldon construct
MFVFLFVLPLVSSQCVNLTTRTGIQPGYTNSSTRGVYYPDKVFRSSILHLTQDLFLPFFSNVTWFNTINYQGGFKKFDNPVLPFNDGVYFASTEKSNIIRGWIFGTTLDARTQSLLIVNNATNVVIKVCEFQFCTDPFLGVYYHNNNKTWVENEFRVYSSANNCTFEYISQPFLMDLEGKQGNFKNLREFVFKNVDGYFKIYSKHTPIDLVRDLPRGFAALEPLVDLPIGINITRFQTLLALHRSYLTPGKLESGWTTGAAAYYVGYLQQRTFLLSYNQNGTITDAVDCSLDPLSETKCTLKSLTVEKGIYQTSNFRVQPTISIVRFPNITNLCPFGEVFNASKFASVYAWNRKRISNCVADYSVLYNSTSFSTFKCYGVSPTKLNDLCFTNVYADSFVVKGDEVRQIAPGQTGVIADYNYKLPDDFTGCVIAWNSVKQDALTGGNYLYRLFRKSKLKPFERDISTEIYQAGSTPCNGQVGLNCYYPLERYGFHPTTGVNYQPFRVVVLSFELLNGPATVCGPKLSTTLVKDKCVNFNFNGLTGTGVLTTSKKQFLPFQQFGRDISDTTDAVRDPQTLEILDITPCSFGGVSVITPGTNTSNQVAVLYQDVNCTEVPMAIHAEQLTPAWRVYSAGANVFQTRAGCLVGAEHVNNSYECDIPVGAGICASYHSMSSLRSVNQRSIIAYTMSLGAENSVAYSNNSIACPTNFTISVTTEILPVSMTKTSVDCTMYICGDSIECSNLLLQYGSFCTQLNRALTGIAVEQDKNTQEVFAQVKQIYKTPPIKDFGGFNFSQILPDPSKPSKRSFIEDLLFNKVTLADAGFIKQYGDCLGDIAARDLICAQKFNGLTVLPPLLTDEMIAQYTSALLAGTITSGWTFGAGAALQIPFAMQMAYRFNGIGVTQNVLYENQKLIANQFNSAIGKIQDSLSSTASALGKLQDVVNQNAQALNTLVKQLSSNFGAISSVLNDILSRLDKVEAEVQIDRLITGRLQSLQTYVTQQLIRAAEIRASANLAATKMSECVLGQSKRVDFCGKGYHLMSFPQSAPHGVVFLHVTYVPAQEKNFTTAPAICHEGKAHFPREGVFVSNGTHWFITQRNFCEPQIITTDNTFVSGSCDVVIGIVNNTVYDPLQPELDSFKEELDKYFKNHTSPDVDLGDISGINASVVNIQKEIDRLNEVAKNLNESLIDLQELGKYEQYIKGGSGYIPEAPRDGQAYVRKDGEWVLLSTFL

SEQ ID NO: 6103 - protein, 1241 aa, Artificial Sequence
  SARS-CoV-2/Wuhan/WIV05/2019__EPI_ISL_402128 spike protein (1-1211)(P715C_P1069C) Foldon construct
MFVFLVLLPLVSSQCVNLTTRTQLPPAYTNSFTRGVYYPDKVFRSSVLHSTQDLFLPFFSNVTWFHAIHVSGTNGTKRFDNPVLPFNDGVYFASTEKSNIIRGWIFGTTLDSKTQSLLIVNNATNVVIKVCEFQFCNDPFLGVYYHKNNKSWMESEFRVYSSANNCTFEYVSQPFLMDLEGKQGNFKNLREFVFKNIDGYFKIYSKHTPINLVRDLPQGFSALEPLVDLPIGINITRFQTLLALHRSYLTPGDSSSGWTAGAAAYYVGYLQPRTFLLKYNENGTITDAVDCALDPLSETKCTLKSFTVEKGIYQTSNFRVQPTESIVRFPNITNLCPFGEVFNATRFASVYAWNRKRISNCVADYSVLYNSASFSTFKCYGVSPTKLNDLCFTNVYADSFVIRGDEVRQIAPGQTGKIADYNYKLPDDFTGCVIAWNSNNLDSKVGGNYNYLYRLFRKSNLKPFERDISTEIYQAGSTPCNGVEGFNCYFPLQSYGFQPTNGVGYQPYRVVVLSFELLHAPATVCGPKKSTNLVKNKCVNFNFNGLTGTGVLTESNKKFLPFQQFGRDIADTTDAVRDPQTLEILDITPCSFGGVSVITPGTNTSNQVAVLYQDVNCTEVPVAIHADQLTPTWRVYSTGSNVFQTRAGCLIGAEHVNNSYECDIPIGAGICASYQTQTNSPRRARSVASQSIIAYTMSLGAENSVAYSNNSIAICTNFTISVTTEILPVSMTKTSVDCTMYICGDSTECSNLLLQYGSFCTQLNRALTGIAVEQDKNTQEVFAQVKQIYKTPPIKDFGGFNFSQILPDPSKPSKRSFIEDLLFNKVTLADAGFIKQYGDCLGDIAARDLICAQKFNGLTVLPPLLTDEMIAQYTSALLAGTITSGWTFGAGAALQIPFAMQMAYRFNGIGVTQNVLYENQKLIANQFNSAIGKIQDSLSSTASALGKLQDVVNQNAQALNTLVKQLSSNFGAISSVLNDILSRLDKVEAEVQIDRLITGRLQSLQTYVTQQLIRAAEIRASANLAATKMSECVLGQSKRVDFCGKGYHLMSFPQSAPHGVVFLHVTYVCAQEKNFTTAPAICHDGKAHFPREGVFVSNGTHWFVTQRNFYEPQIITTDNTFVSGNCDVVIGIVNNTVYDPLQPELDSFKEELDKYFKNHTSPDVDLGDISGINASVVNIQKEIDRLNEVAKNLNESLIDLQELGKYEQYIKGGSGYIPEAPRDGQAYVRKDGEWVLLSTFL

SEQ ID NO: 6104 - protein, 1237 aa, Artificial Sequence
  SARS-CoV-2/bat/Yunnan/RaTG13/2013__EPI_ISL_402131 spike protein (1-1207)(P711C_P1065C) Foldon construct
MFVFLVLLPLVSSQCVNLTTRTQLPPAYTNSSTRGVYYPDKVFRSSVLHLTQDLFLPFFSNVTWFHAIHVSGTNGIKRFDNPVLPFNDGVYFASTEKSNIIRGWIFGTTLDSKTQSLLIVNNATNVVIKVCEFQFCNDPFLGVYYHKNNKSWMESEFRVYSSANNCTFEYVSQPFLMDLEGKQGNFKNLREFVFKNIDGYFKIYSKHTPINLVRDLPPGFSALEPLVDLPIGINITRFQTLLALHRSYLTPGDSSSGWTAGAAAYYVGYLQPRTFLLKYNENGTITDAVDCALDPLSETKCTLKSFTVEKGIYQTSNFRVQPTDSIVRFPNITNLCPFGEVFNATTFASVYAWNRKRISNCVADYSVLYNSTSFSTFKCYGVSPTKLNDLCFTNVYADSFVITGDEVRQIAPGQTGKIADYNYKLPDDFTGCVIAWNSKHIDAKEGGNFNYLYRLFRKANLKPFERDISTEIYQAGSKPCNGQTGLNCYYPLYRYGFYPTDGVGHQPYRVVVLSFELLNAPATVCGPKKSTNLVKNKCVNFNFNGLTGTGVLTESNKKFLPFQQFGRDIADTTDAVRDPQTLEILDITPCSFGGVSVITPGTNASNQVAVLYQDVNCTEVPVAIHADQLTPTWRVYSTGSNVFQTRAGCLIGAEHVNNSYECDIPIGAGICASYQTQTNSRSVASQSIIAYTMSLGAENSVAYSNNSIAICTNFTISVTTEILPVSMTKTSVDCTMYICGDSTECSNLLLQYGSFCTQLNRALTGIAVEQDKNTQEVFAQVKQIYKTPPIKDFGGFNFSQILPDPSKPSKRSFIEDLLFNKVTLADAGFIKQYGDCLGDIAARDLICAQKFNGLTVLPPLLTDEMIAQYTSALLAGTITSGWTFGAGAALQIPFAMQMAYRFNGIGVTQNVLYENQKLIANQFNSAIGKIQDSLSSTASALGKLQDVVNQNAQALNTLVKQLSSNFGAISSVLNDILSRLDKVEAEVQIDRLITGRLQSLQTYVTQQLIRAAEIRASANLAATKMSECVLGQSKRVDFCGKGYHLMSFPQSAPHGVVFLHVTYVCAQEKNFTTAPAICHDGKAHFPREGVFVSNGTHWFVTQRNFYEPQIITTDNTFVSGSCDVVIGIVNNTVYDPLQPELDSFKEELDKYFKNHTSPDVDLGDISGINASVVNIQKEIDRLNEVAKNLNESLIDLQELGKYEQYIKGGSGYIPEAPRDGQAYVRKDGEWVLLSTFL

SEQ ID NO: 6105 - protein, 1241 aa, Artificial Sequence
  SARS-CoV-2/Wuhan/HBCDC-HB-01/2019__EPI_ISL_402132 spike protein (1-1211)(P715C_P1069C) Foldon construct
MFVFLVLLPLVSSQCVNLTTRTQLPPAYTNSITRGVYYPDKVFRSSVLHSTQDLFLPFFSNVTWFHAIHVSGTNGTKRFDNPVLPFNDGVYFASTEKSNIIRGWIFGTTLDSKTQSLLIVNNATNVVIKVCEFQFCNDPFLGVYYHKNNKSWMESEFRVYSSANNCTFEYVSQPFLMDLEGKQGNFKNLREFVFKNIDGYFKIYSKHTPINLVRDLPQGFSALEPLVDLPIGINITRFQTLLALHRSYLTPGDSSSGWTAGAAAYYVGYLQPRTFLLKYNENGTITDAVDCALDPLSETKCTLKSFTVEKGIYQTSNFRVQPTESIVRFPNITNLCPFGEVFNATRFASVYAWNRKRISNCVADYSVLYNSASFSTFKCYGVSPTKLNDLCFTNVYADSFVIRGDEVRQIAPGQTGKIADYNYKLPDDFTGCVIAWNSNNLDSKVGGNYNYLYRLFRKSNLKPFERDISTEIYQAGSTPCNGVEGFNCYFPLQSYGFQPTNGVGYQPYRVVVLSFELLHAPATVCGPKKSTNLVKNKCVNFNFNGLTGTGVLTESNKKFLPFQQFGRDIADTTDAVRDPQTLEILDITPCSFGGVSVITPGTNTSNQVAVLYQDVNCTEVPVAIHADQLTPTWRVYSTGSNVFQTRAGCLIGAEHVNNSYECDIPIGAGICASYQTQTNSPRRARSVASQSIIAYTMSLGAENSVAYSNNSIAICTNFTISVTTEILPVSMTKTSVDCTMYICGDSTECSNLLLQYGSFCTQLNRALTGIAVEQDKNTQEVFAQVKQIYKTPPIKDFGGFNFSQILPDPSKPSKRSFIEDLLFNKVTLADAGFIKQYGDCLGDIAARDLICAQKFNGLTVLPPLLTDEMIAQYTSALLAGTITSGWTFGAGAALQIPFAMQMAYRFNGIGVTQNVLYENQKLIANQFNSAIGKIQDSLSSTASALGKLQDVVNQNAQALNTLVKQLSSNFGAISSVLNDILSRLDKVEAEVQIDRLITGRLQSLQTYVTQQLIRAAEIRASANLAATKMSECVLGQSKRVDFCGKGYHLMSFPQSAPHGVVFLHVTYVCAQEKNFTTAPAICHDGKAHFPREGVFVSNGTHWFVTQRNFYEPQIITTDNTFVSGNCDVVIGIVNNTVYDPLQPELDSFKEELDKYFKNHTSPDVDLGDISGINASVVNIQKEIDRLNEVAKNLNESLIDLQELGKYEQYIKGGSGYIPEAPRDGQAYVRKDGEWVLLSTFL

SEQ ID NO: 6106 - protein, 1241 aa, Artificial Sequence
  SARS-CoV-2/Guangdong/20SF028/2020__EPI_ISL_403936 spike protein (1-1211)(P715C_P1069C) Foldon construct
MFVFLVLLPLVSSQCVNLTTRTQLPPAYTNSFTRGVYYPDKVFRSSVLYSTQDLFLPFFSNVTWFHAIHVSGTNGTKRFDNPVLPFNDGVYFASTEKSNIIRGWIFGTTLDSKTQSLLIVNNATNVVIKVCEFQFCNDPFLGVYYHKNNKSWMESEFRVYSSANNCTFEYVSQPFLMDLEGKQGNFKNLREFVFKNIDGYFKIYSKHTPINLVRDLPQGFSALEPLVDLPIGINITRFQTLLALHRSYLTPGDSSSGWTAGAAAYYVGYLQPRTFLLKYNENGTITDAVDCALDPLSETKCTLKSFTVEKGIYQTSNFRVQPTESIVRFPNITNLCPFGEVFNATRFASVYAWNRKRISNCVADYSVLYNSASFSTFKCYGVSPTKLNDLCFTNVYADSFVIRGDEVRQIAPGQTGKIADYNYKLPDDFTGCVIAWNSNNLDSKVGGNYNYLYRLFRKSNLKPFERDISTEIYQAGSTPCNGVEGFNCYFPLQSYGFQPTNGVGYQPYRVVVLSFELLHAPATVCGPKKSTNLVKNKCVNFNFNGLTGTGVLTESNKKFLPFQQFGRDIADTTDAVRDPQTLEILDITPCSFGGVSVITPGTNTSNQVAVLYQDVNCTEVPVAIHADQLTPTWRVYSTGSNVFQTRAGCLIGAEHVNNSYECDIPIGAGICASYQTQTNSPRRARSVASQSIIAYTMSLGAENSVAYSNNSIAICTNFTISVTTEILPVSMTKTSVDCTMYICGDSTECSNLLLQYGSFCTQLNRALTGIAVEQDKNTQEVFAQVKQIYKTPPIKDFGGFNFSQILPDPSKPSKRSFIEDLLFNKVTLADAGFIKQYGDCLGDIAARDLICAQKFNGLTVLPPLLTDEMIAQYTSALLAGTITSGWTFGAGAALQIPFAMQMAYRFNGIGVTQNVLYENQKLIANQFNSAIGKIQDSLSSTASALGKLQDVVNQNAQALNTLVKQLSSNFGAISSVLNDILSRLDKVEAEVQIDRLITGRLQSLQTYVTQQLIRAAEIRASANLAATKMSECVLGQSKRVDFCGKGYHLMSFPQSAPHGVVFLHVTYVCAQEKNFTTAPAICHDGKAHFPREGVFVSNGTHWFVTQRNFYEPQIITTDNTFVSGNCDVVIGIVNNTVYDPLQPELDSFKEELDKYFKNHTSPDVDLGDISGINASVVNIQKEIDRLNEVAKNLNESLIDLQELGKYEQYIKGGSGYIPEAPRDGQAYVRKDGEWVLLSTFL

SEQ ID NO: 6107 - protein, 1241 aa, Artificial Sequence
  SARS-CoV-2/Shenzhen/SZTH-001/2020__EPI_ISL_406592 spike protein (1-1211)(P715C_P1069C) Foldon construct
MFVFLVLLPLVSSQCVNLTTRTQLPPAYTNSFTRGVYYPDKVFRSSVLHSTQDLFLPFFSNVTWFHAIHVSGTNGTKRFDNPVLPFNDGVYFASTEKSNIIRGWIFGTTLDSKTQSLLIVNNATNVVIKVCEFQFCNDPFLGVYYHKNNKSWMESEFRVYSSANNCTFEYVSQPFLMDLEGKQGNFKNLREFVFKNIDGYFKIYSKHTPINLVRDLPQGFSALEPLVDLPIGINITRFQTLLALHRSYLTPGDSSSGWTAGAAAYYVGYLQPRTFLLKYNENGTITDAVDCALDPLSETKCTLKSFTVEKGIYQTSNFRVQPTESIVRFPNITNLCPFGEVFNATRFASVYAWNRKRISNCVADYSVLYNSASFSTFKCYGVSPTKLNDLCFTNVYADSFVIRGDEVRQIAPGQTGKIADYNYKLPDDFTGCVIAWNSNNLDSKVGGNYNYLYRLFRKSNLKPFERDISTEIYQAGSTPCNGVEGFNCYFPLQSYGFQPTNGVGYQPYRVVVLSFELLHAPATVCGPKKSTNLVKNKCVNFNFNGLTGTGVLTESNKKFLPFQQFGRDIADTTDAVRDPQTLEILDITPCSFGGVSVITPGTNTSNQVAVLYQDVNCTEVPVAIHADQLTPTWRVYSTGSNVFQTRAGCLIGAEHVNNSYECDIPIGAGICASYQTQTNSPRRARSVASQSIIAYTMSLGAENSVAYSNNSIAICTNFTISVTTEILPVSMTKTSVDCTMYICGDSTECSNLLLQYGSFCTQLNRALTGIAVEQDKNTQEVFAQVKQIYKTPPIKDFGGFNFSQILPDPSKPSKRSFIEDLLFNKVTLADAGFIKQYGDCLGDIAARDLICAQKFNGLTVLPPLLTDEMIAQYTSALLAGTITSGWTFGAGAALQIPFAMQMAYRFNGIGVTQNVLYENQKLIANQFNSAIGKIQDSLSSTASALGKLQDVVNQNAQALNTLVKQLSSNFGAISSVLNDILSRLDKVEAEVQIDRLITGRLQSLQTYVTQQLIRAAEIRASANLAATKMSECVLGQSKRVDFCGKGYHLMSFPQSAPHGVVFLHVTYVCAQEKNFTTAPAICHDGKAHFPREGVFVSNGTHWFVTQRNFYEPQIITTDNTFVSGNCDVLIGIVNNTVYDPLQPELDSFKEELDKYFKNHTSPDVDLGDISGINASVVNIQKEIDRLNEVAKNLNESLIDLQELGKYEQYIKGGSGYIPEAPRDGQAYVRKDGEWVLLSTFL

SEQ ID NO: 6108 - protein, 1241 aa, Artificial Sequence
  SARS-CoV-2/Shenzhen/SZTH-004/2020__EPI_ISL_406595 spike protein (1-1211)(P715C_P1069C) Foldon construct
MFVFLVLLPLVSSQCVNLTTRTQLPPAYTNSFTRGVYYPDKVFRSSVLHSTQDLFLPFFSNVTWFHAIHVSGTNGTKRFDNPVLPFNDGVYFASTEKSNIIRGWIFGTTLDSKTQSLLIVNNATNVVIKVCEFQFCNDPFLGVYYHKNNKSWMESEFRVYSSANNCTFEYVSQPFLMDLEGKQGNFKNLREFVFKNIDGYFKIYSKHTPINLVRDLPQGFSALEPLVDLPIGINITRFQTLLALHRSYLTPGDSSSGWTAGAAAYYVGYLQPRTFLLKYNENGTITDAVDCALDPLSETKCTLKSFTVEKGIYQTSNFRVQPTESIVRFPNITNLCPFGEVFNATRFASVYAWDRKRISNCVAYYSVLYNSASFSTFKCYGVSPTKLNDLCFTNVYADSFVIRGDEVRQIAPGQTGKIADYNYKLPDDFTGCVIAWNSNNLDSKVGGNYNYLYRLFRKSNLKPFERDISTEIYQAGSTPCNGVEGFNCYFPLQSYGFQPTNGVGYQPYRVVVLSFELLHAPATVCGPKKSTNLVKNKCVNFNFNGLTGTGVLTESNKKFLPFQQFGRDIADTTDAVRDPQTLEILDITPCSFGGVSVITPGTNTSNQVAVLYQDVNCTEVPVAIHADQLTPTWRVYSTGSNVFQTRAGCLIGAEHVNNSYECDIPIGAGICASYQTQTNSPRRARSVASQSIIAYTMSLGAENSVAYSNNSIAICTNFTISVTTEILPVSMTKTSVDCTMYICGDSTECSNLLLQYGSFCTQLNRALTGIAVEQDKNTQEVFAQVKQIYKTPPIKDFGGFNFSQILPDPSKPSKRSFIEDLLFNKVTLADAGFIKQYGDCLGDIAARDLICAQKFNGLTVLPPLLTDEMIAQYTSALLAGTITSGWTFGAGAALQIPFAMQMAYRFNGIGVTQNVLYENQKLIANQFNSAIGKIQDSLSSTASALGKLQDVVNQNAQALNTLVKQLSSNFGAISSVLNDILSRLDKVEAEVQIDRLITGRLQSLQTYVTQQLIRAAEIRASANLAATKMSECVLGQSKRVDFCGKGYHLMSFPQSAPHGVVFLHVTYVCAQEKNFTTAPAICHDGKAHFPREGVFVSNGTHWFVTQRNFYEPQIITTDNTFVSGNCDVVIGIVNNTVYDPLQPELDSFKEELDKYFKNHTSPDVDLGDISGINASVVNIQKEIDRLNEVAKNLNESLIDLQELGKYEQYIKGGSGYIPEAPRDGQAYVRKDGEWVLLSTFL

SEQ ID NO: 6109 - protein, 1241 aa, Artificial Sequence
  SARS-CoV-2/France/IDF0372/2020__EPI_ISL_406596 spike protein (1-1211)(P715C_P1069C) Foldon construct
MFVFLVLLPLVSSQCVNLTTRTQLPPAYTNSFTRGVYYPDKVFRSSVLHSTQDLFLPFFSNVTWFHAIHVSGTNGTKRFDNPVLPFNDGVYFASTEKSNIIRGWIFGTTLDSKTQSLLIVNNATNVVIKVCEFQFCNDPFLGVYYHKNNKSWMESEFRVYSSANNCTFEYVSQPFLMDLEGKQGNFKNLREFVFKNIDGYFKIYSKHTPINLVRDLPQGFSALEPLVDLPIGINITRFQTLLALHRSYLTPGDSSSGWTAGAAAYYVGYLQPRTFLLKYNENGTITDAVDCALDPLSETKCTLKSFTVEKGIYQTSNFRVQPTESIVRFPNITNLCPFGEVFNATRFASVYAWNRKRISNCVADYSFLYNSASFSTFKCYGVSPTKLNDLCFTNVYADSFVIRGDEVRQIAPGQTGKIADYNYKLPDDFTGCVIAWNSNNLDSKVGGNYNYLYRLFRKSNLKPFERDISTEIYQAGSTPCNGVEGFNCYFPLQSYGFQPTNGVGYQPYRVVVLSFELLHAPATVCGPKKSTNLVKNKCVNFNFNGLTGTGVLTESNKKFLPFQQFGRDIADTTDAVRDPQTLEILDITPCSFGGVSVITPGTNTSNQVAVLYQDVNCTEVPVAIHADQLTPTWRVYSTGSNVFQTRAGCLIGAEHVNNSYECDIPIGAGICASYQTQTNSPRRARSVASQSIIAYTMSLGAENSVAYSNNSIAICTNFTISVTTEILPVSMTKTSVDCTMYICGDSTECSNLLLQYGSFCTQLNRALTGIAVEQDKNTQEVFAQVKQIYKTPPIKDFGGFNFSQILPDPSKPSKRSFIEDLLFNKVTLADAGFIKQYGDCLGDIAARDLICAQKFNGLTVLPPLLTDEMIAQYTSALLAGTITSGWTFGAGAALQIPFAMQMAYRFNGIGVTQNVLYENQKLIANQFNSAIGKIQDSLSSTASALGKLQDVVNQNAQALNTLVKQLSSNFGAISSVLNDILSRLDKVEAEVQIDRLITGRLQSLQTYVTQQLIRAAEIRASANLAATKMSECVLGQSKRVDFCGKGYHLMSFPQSAPHGVVFLHVTYVCAQEKNFTTAPAICHDGKAHFPREGVFVSNGTHWFVTQRNFYEPQIITTDNTFVSGNCDVVIGIVNNTVYDPLQPELDSFKEELDKYFKNHTSPDVDLGDISGINASVVNIQKEIDRLNEVAKNLNESLIDLQELGKYEQYIKGGSGYIPEAPRDGQAYVRKDGEWVLLSTFL

SEQ ID NO: 6110 - protein, 1241 aa, Artificial Sequence
  SARS-CoV-2/Australia/VIC01/2020__EPI_ISL_406844 spike protein (1-1211)(P715C_P1069C) Foldon construct
MFVFLVLLPLVSSQCVNLTTRTQLPPAYTNSFTRGVYYPDKVFRSSVLHSTQDLFLPFFSNVTWFHAIHVSGTNGTKRFDNPVLPFNDGVYFASTEKSNIIRGWIFGTTLDSKTQSLLIVNNATNVVIKVCEFQFCNDPFLGVYYHKNNKSWMESEFRVYSSANNCTFEYVSQPFLMDLEGKQGNFKNLREFVFKNIDGYFKIYSKHTPINLVRDLPQGFSALEPLVDLPIGINITRFQTLLALHRRYLTPGDSSSGWTAGAAAYYVGYLQPRTFLLKYNENGTITDAVDCALDPLSETKCTLKSFTVEKGIYQTSNFRVQPTESIVRFPNITNLCPFGEVFNATRFASVYAWNRKRISNCVADYSVLYNSASFSTFKCYGVSPTKLNDLCFTNVYADSFVIRGDEVRQIAPGQTGKIADYNYKLPDDFTGCVIAWNSNNLDSKVGGNYNYLYRLFRKSNLKPFERDISTEIYQAGSTPCNGVEGFNCYFPLQSYGFQPTNGVGYQPYRVVVLSFELLHAPATVCGPKKSTNLVKNKCVNFNFNGLTGTGVLTESNKKFLPFQQFGRDIADTTDAVRDPQTLEILDITPCSFGGVSVITPGTNTSNQVAVLYQDVNCTEVPVAIHADQLTPTWRVYSTGSNVFQTRAGCLIGAEHVNNSYECDIPIGAGICASYQTQTNSPRRARSVASQSIIAYTMSLGAENSVAYSNNSIAICTNFTISVTTEILPVSMTKTSVDCTMYICGDSTECSNLLLQYGSFCTQLNRALTGIAVEQDKNTQEVFAQVKQIYKTPPIKDFGGFNFSQILPDPSKPSKRSFIEDLLFNKVTLADAGFIKQYGDCLGDIAARDLICAQKFNGLTVLPPLLTDEMIAQYTSALLAGTITSGWTFGAGAALQIPFAMQMAYRFNGIGVTQNVLYENQKLIANQFNSAIGKIQDSLSSTASALGKLQDVVNQNAQALNTLVKQLSSNFGAISSVLNDILSRLDKVEAEVQIDRLITGRLQSLQTYVTQQLIRAAEIRASANLAATKMSECVLGQSKRVDFCGKGYHLMSFPQSAPHGVVFLHVTYVCAQEKNFTTAPAICHDGKAHFPREGVFVSNGTHWFVTQRNFYEPQIITTDNTFVSGNCDVVIGIVNNTVYDPLQPELDSFKEELDKYFKNHTSPDVDLGDISGINASVVNIQKEIDRLNEVAKNLNESLIDLQELGKYEQYIKGGSGYIPEAPRDGQAYVRKDGEWVLLSTFL

SEQ ID NO: 6111 - protein, 1241 aa, Artificial Sequence
  SARS-CoV-2/Germany/BavPat1/2020__EPI_ISL_406862 spike protein (1-1211)(P715C_P1069C) Foldon construct
MFVFLVLLPLVSSQCVNLTTRTQLPPAYTNSFTRGVYYPDKVFRSSVLHSTQDLFLPFFSNVTWFHAIHVSGTNGTKRFDNPVLPFNDGVYFASTEKSNIIRGWIFGTTLDSKTQSLLIVNNATNVVIKVCEFQFCNDPFLGVYYHKNNKSWMESEFRVYSSANNCTFEYVSQPFLMDLEGKQGNFKNLREFVFKNIDGYFKIYSKHTPINLVRDLPQGFSALEPLVDLPIGINITRFQTLLALHRSYLTPGDSSSGWTAGAAAYYVGYLQPRTFLLKYNENGTITDAVDCALDPLSETKCTLKSFTVEKGIYQTSNFRVQPTESIVRFPNITNLCPFGEVFNATRFASVYAWNRKRISNCVADYSVLYNSASFSTFKCYGVSPTKLNDLCFTNVYADSFVIRGDEVRQIAPGQTGKIADYNYKLPDDFTGCVIAWNSNNLDSKVGGNYNYLYRLFRKSNLKPFERDISTEIYQAGSTPCNGVEGFNCYFPLQSYGFQPTNGVGYQPYRVVVLSFELLHAPATVCGPKKSTNLVKNKCVNFNFNGLTGTGVLTESNKKFLPFQQFGRDIADTTDAVRDPQTLEILDITPCSFGGVSVITPGTNTSNQVAVLYQGVNCTEVPVAIHADQLTPTWRVYSTGSNVFQTRAGCLIGAEHVNNSYECDIPIGAGICASYQTQTNSPRRARSVASQSIIAYTMSLGAENSVAYSNNSIAICTNFTISVTTEILPVSMTKTSVDCTMYICGDSTECSNLLLQYGSFCTQLNRALTGIAVEQDKNTQEVFAQVKQIYKTPPIKDFGGFNFSQILPDPSKPSKRSFIEDLLFNKVTLADAGFIKQYGDCLGDIAARDLICAQKFNGLTVLPPLLTDEMIAQYTSALLAGTITSGWTFGAGAALQIPFAMQMAYRFNGIGVTQNVLYENQKLIANQFNSAIGKIQDSLSSTASALGKLQDVVNQNAQALNTLVKQLSSNFGAISSVLNDILSRLDKVEAEVQIDRLITGRLQSLQTYVTQQLIRAAEIRASANLAATKMSECVLGQSKRVDFCGKGYHLMSFPQSAPHGVVFLHVTYVCAQEKNFTTAPAICHDGKAHFPREGVFVSNGTHWFVTQRNFYEPQIITTDNTFVSGNCDVVIGIVNNTVYDPLQPELDSFKEELDKYFKNHTSPDVDLGDISGINASVVNIQKEIDRLNEVAKNLNESLIDLQELGKYEQYIKGGSGYIPEAPRDGQAYVRKDGEWVLLSTFL

SEQ ID NO: 6112 - protein, 1241 aa, Artificial Sequence
  SARS-CoV-2/Wuhan/HBCDC-HB-02/2020__EPI_ISL_412978 spike protein (1-1211)(P715C_P1069C) Foldon construct
MFVFLVLLPLVSSQCVNLTTRTQLPPAYTNSFTRGVYYPDKVFRSSVLHSTQDLFLPFFSNVTWFHAIHVSGTNGTKRFDNPVLPFNDGVYFASTEKSNIIRGWIFGTTLDSKTQSLLIVNNATNVVIKVCEFQFCNDPFLGVYYHKNNKSWMESEFRVYSSANNCTFEYVSQPFLMDLEGKQGNFKNLREFVFKNIDGYFKIYSKHTPINLVRDLPQGFSALEPLVDLPIGINITRFQTLLALHRSYLTPGDSSSGWTAGAAAYYVGYLQPRTFLLKYNENGTITDAVDCALDPLSETKCTLKSFTVEKGIYQTSNFRVQPTESIVRFPNITNLCPFGEVFNATRFASVYAWNRKRISNCVADYSVLYNSASFSTFKCYGVSPTKLNDLCFTNVYADSFVIRGDEVRQIAPGQTGKIADYNYKLPDDFTGCVIAWNSNNLDSKVGGNYNYLYRLFRKSNLKPFERDISTEIYQAGSTPCNGVEGFNCYFPLQSYGFQPTNGVGYQPYRVVVLSFELLHAPATVCGPKKSTNLVKNKCVNFNFNGLTGTGVLTESNKKFLPFQQFGRDIADTTDAVRDPQTLEILDITPCSFGGVSVITPGTNTSNQVAVLYQDVNCTEVPVAIHADQLTPTWRVYSTGSNVFQTRAGCLIGAEHVNNSYECDIPIGAGICASYQTQTNSPRRARSVASQSIIAYTMSLGAENSVAYSNNSIAICTNFTISVTTEILPVSMTKTSVDCTMYICGDSTECSNFLLQYGSFCTQLNRALTGIAVEQDKNTQEVFAQVKQIYKTPPIKDFGGFNFSQILPDPSKPSKRSFIEDLLFNKVTLADAGFIKQYGDCLGDIAARDLICAQKFNGLTVLPPLLTDEMIAQYTSALLAGTITSGWTFGAGAALQIPFAMQMAYRFNGIGVTQNVLYENQKLIANQFNSAIGKIQDSLSSTASALGKLQDVVNQNAQALNTLVKQLSSNFGAISSVLNDILSRLDKVEAEVQIDRLITGRLQSLQTYVTQQLIRAAEIRASANLAATKMSECVLGQSKRVDFCGKGYHLMSFPQSAPHGVVFLHVTYVCAQEKNFTTAPAICHDGKAHFPREGVFVSNGTHWFVTQRNFYEPQIITTDNTFVSGNCDVVIGIVNNTVYDPLQPELDSFKEELDKYFKNHTSPDVDLGDISGINASVVNIQKEIDRLNEVAKNLNESLIDLQELGKYEQYIKGGSGYIPEAPRDGQAYVRKDGEWVLLSTFL

SEQ ID NO: 6113 - protein, 1241 aa, Artificial Sequence
  SARS-CoV-2/Australia/QLD02/2020__EPI_ISL_407896 spike protein (1-1211)(P715C_P1069C) Foldon construct
MFVFLVLLPLVSSQCVNLTTRTQLPPAYTNSFTRGVYYPDKVFRSSVLHSTQDLFLPFFSNVTWFHAIHVSGTNGTKRFDNPVLPFNDGVYFASTEKSNIIRGWIFGTTLDSKTQSLLIVNNATNVVIKVCEFQFCNDPFLGVYYHKNNKSWMESEFRVYSSANNCTFEYVSQPFLMDLEGKQGNFKNLREFVFKNIDGYFKIYSKHTPINLVRDLPQGFSALEPLVDLPIGINITRFQTLLALHRSYLTPGDSSSGWTAGAAAYYVGYLQPRTFLLKYNENGTITDAVDCALDPLSETKCTLKSFTVEKGIYQTSNFRVQPTESIVRFPNITNLCPFGEVFNATRFASVYAWNRKRISNCVADYSVLYNSASFSTFKCYGVSPTKLNDLCFTNVYADSFVIRGDEVRQIAPGQTGKIADYNYKLPDDFTGCVIAWNSNNLDSKVGGNYNYLYRLFRKSNLKPFERDISTEIYQAGSTPCNGVEGFNCYFPLQSYGFQPTNGVGYQPYRVVVLSFELLHAPATVCGPKKSTNLVKNKCVNFNFNGLTGTGVLTESNKKFLPFQQFGRDIADTTDAVRDPQTLEILDITPCSFGGVSVITPGTNTSNQVAVLYQDVNCTEVPVAIHADQLTPTWRVYSTGSNVFQTRAGCLIGAEHVNNSYECDIPIGAGICASYQTQTNSPRRARSVASQSIIAYTMSLGAENSVAYSNNSIAICTNFTISVTTEILPVSMTKTSVDCTMYICGDSTECSNLLLQYGSFCTQLNRALTGIAVEQDKNTQEVFAQVKQIYKTPPIKDFGGFNFSQILPDPSKPSKRSFIEDLLFNKVTLADAGFIKQYGDCLGDIAARDLICAQKFNGLTVLPPLLTDEMIAQYTSALLAGTITSGWTFGAGAALQIPFAMQMAYRFNGIGVTQNVLYENQKLIANQFNSAIGKIQDSLSSTASALGKLQDVVNQNAQALNTLVKQLSSNFGAISSVLNDILSRLDKVEAEVQIDRLITGRLQSLQTYVTQQLIRAAEIRASANLAATKMSECVLGQSKRVDFCGKGYHLMSFPQSAPHGVVFLHVTYVCAQEKNFTTAPAICHDGKAHFPREGVFVSNGTHWFVTQRNFYEPQIITTDNTFVSGNCDVVIGIVNNTVYDPLQLELDSFKEELDKYFKNHTSPDVDLGDISGINASVVNIQKEIDRLNEVAKNLNESLIDLQELGKYEQYIKGGSGYIPEAPRDGQAYVRKDGEWVLLSTFL

SEQ ID NO: 6114 - protein, 1241 aa, Artificial Sequence
  SARS-CoV-2/India/1-31/2020__EPI_ISL_413523 spike protein (1-1211)(P715C_P1069C) Foldon construct
MFVFLVLLPLVSSQCVNLTTRTQLPPAYTNSFTRGVYYPDKVFRSSVLHSTQDLFLPFFSNVTWFHAIHVSGTNGTKRFDNPVLPFNDGVYFASTEKSNIIRGWIFGTTLDSKTQSLLIVNNATNVVIKVCEFQFCNDPFLGVYYHKNNKSWMESEFRVYSSANNCTFEYVSQPFLMDLEGKQGNFKNLREFVFKNIDGYFKIYSKHTPINLVRDLPQGFSALEPLVDLPIGINITRFQTLLALHRSYLTPGDSSSGWTAGAAAYYVGYLQPRTFLLKYNENGTITDAVDCALDPLSETKCTLKSFTVEKGIYQTSNFRVQPTESIVRFPNITNLCPFGEVFNATRFASVYAWNRKRISNCVADYSVLYNSASFSTFKCYGVSPTKLNDLCFTNVYADSFVIRGDEVRQIAPGQTGKIADYNYKLPDDFTGCVIAWNSNNLDSKVGGNYNYLYRLFRKSNLKPFERDISTEIYQAGSTPCNGVEGFNCYFPLQSYGFQPTNGVGYQPYRVVVLSFELLHAPATVCGPKKSTNLVKNKCVNFNFNGLTGTGVLTESNKKFLPFQQFGRDIADTTDAVRDPQTLEILDITPCSFGGVSVITPGTNTSNQVAVLYQDVNCTEVPVAIHADQLTPTWRVYSTGSNVFQTRAGCLIGAEHVNNSYECDIPIGAGICASYQTQTNSPRRARSVASQSIIAYTMSLGAENSVAYSNNSIAICTNFTISVTTEILPVSMTKTSVDCTMYICGDSTECSNLLLQYGSFCTQLNRALTGIAVEQDKNTQEVFAQVKQIYKTPPIKDFGGFNFSQILPDPSKPSKRSFIEDLLFNKVTLADAGFIKQYGDCLGDIAARDLICAQKFNGLTVLPPLLTDEMIAQYTSALLAGTITSGWTFGAGAALQIPFAMQMAYRFNGIGVTQNVLYENQKLIANQFNSVIGKIQDSLSSTASALGKLQDVVNQNAQALNTLVKQLSSNFGAISSVLNDILSRLDKVEAEVQIDRLITGRLQSLQTYVTQQLIRAAEIRASANLAATKMSECVLGQSKRVDFCGKGYHLMSFPQSAPHGVVFLHVTYVCAQEKNFTTAPAICHDGKAHFPREGVFVSNGTHWFVTQRNFYEPQIITTDNTFVSGNCDVVIGIVNNTVYDPLQPELDSFKEELDKYFKNHTSPDVDLGDISGINASVVNIQKEIDRLNEVAKNLNESLIDLQELGKYEQYIKGGSGYIPEAPRDGQAYVRKDGEWVLLSTFL

SEQ ID NO: 6115 - protein, 1241 aa, Artificial Sequence
  SARS-CoV-2/Guangdong/GD2020087-P0008/2020__EPI_ISL_413863 spike protein (1-1211)(P715C_P1069C) Foldon construct
MFVFLVLLPLVSSQCVNLTTRTQLPPAYTNSFTRGVYYPDKVFRSSVLHSTQDLFLPFFSNVTWFHAIHVSGTNGTKRFDNPVLPFNDGVYFASTEKSNIIRGWIFGTTLDSKTQSLLIVNNATNVVIKVCEFQFCNDPFLGVYYHKNNKSWMESEFRVYSSANNCTFEYVSQPFLMDLEGKQGNFKNLREFVFKNIDGYFKIYSKHTPINLVRDLPQGFSALEPLVDLPIGINITRFQTLLALHRSYLTPGDSSSGWTAGAAAYYVGYLQPRTFLLKYNENGTITDAVDCALDPLSETKCTLKSFTVEKGIYQTSNFRVQPTESIVRFPNITNLCPFGEVFNATRFASVYAWNRKRISNCVADYSVLYNSASFSTFKCYGVSPTKLNDLCFTNVYADSFVIRGDEVREIAPGQTGKIADYNYKLPDDFTGCVIAWNSNNLDSKVGGNYNYLYRLFRKSNLKPFERDISTEIYQAGSTPCNGVEGFNCYFPLQSYGFQPTNGVGYQPYRVVVLSFELLHAPATVCGPKKSTNLVKNKCVNFNFNGLTGTGVLTESNKKFLPFQQFGRDIADTTDAVRDPQTLEILDITPCSFGGVSVITPGTNTSNQVAVLYQDVNCTEVPVAIHADQLTPTWRVYSTGSNVFQTRAGCLIGAEHVNNSYECDIPIGAGICASYQTQTNSPRRARSVASQSIIAYTMSLGAENSVAYSNNSIAICTNFTISVTTEILPVSMTKTSVDCTMYICGDSTECSNLLLQYGSFCTQLNRALTGIAVEQDKNTQEVFAQVKQIYKTPPIKDFGGFNFSQILPDPSKPSKRSFIEDLLFNKVTLADAGFIKQYGDCLGDIAARDLICAQKFNGLTVLPPLLTDEMIAQYTSALLAGTITSGWTFGAGAALQIPFAMQMAYRFNGIGVTQNVLYENQKLIANQFNSAIGKIQDSLSSTASALGKLQDVVNQNAQALNTLVKQLSSNFGAISSVLNDILSRLDKVEAEVQIDRLITGRLQSLQTYVTQQLIRAAEIRASANLAATKMSECVLGQSKRVDFCGKGYHLMSFPQSAPHGVVFLHVTYVCAQEKNFTTAPAICHDGKAHFPREGVFVSNGTHWFVTQRNFYEPQIITTDNTFVSGNCDVVIGIVNNTVYDPLQPELDSFKEELDKYFKNHTSPDVDLGDISGINASVVNIQKEIDRLNEVAKNLNESLIDLQELGKYEQYIKGGSGYIPEAPRDGQAYVRKDGEWVLLSTFL

SEQ ID NO: 6116 - protein, 1241 aa, Artificial Sequence
  SARS-CoV-2/Sweden/01/2020__EPI_ISL_411951 spike protein (1-1211)(P715C_P1069C) Foldon construct
MFVFLVLLPLVSSQCVNLTTRTQLPPAYTNSFTRGVYYPDKVFRSSVLHSTQDLFLPFFSNVTWFHAIHVSGTNGTKRFDNPVLPFNDGVYFASTEKSNIIRGWIFGTTLDSKTQSLLIVNNATNVVIKVCEFQFCNDPFLGVYYHKNNKSWMESEFRVYSSANNCTFEYVSQPFLMDLEGKQGNFKNLREFVFKNIDGYFKIYSKHTPINLVRDLPQGFSALEPLVDLPIGINITRFQTLLALHRSYLTPGDSSSGWTAGAAAYYVGYLQPRTFLLKYNENGTITDAVDCALDPLSETKCTLKSFTVEKGIYQTSNFRVQPTESIVRFPNITNLCPFGEVFNATRFASVYAWNRKRISNCVADYSVLYNSASFSTFKCYGVSPTKLNDLCFTNVYADSFVIRGDEVRQIAPGQTGKIADYNYKLPDDFTGCVIAWNSNNLDSKVGGNYNYLYRLFRKSNLKPFERDISTEIYQAGSTPCNGVEGFNCYFPLQSYGFQPTNGVGYQPYRVVVLSFELLHAPATVCGPKKSTNLVKNKCVNFNFNGLTGTGVLTESNKKFLPFQQFGRDIADTTDAVRDPQTLEILDITPCSFGGVSVITPGTNTSNQVAVLYQDVNCTEVPVAIHADQLTPTWRVYSTGSNVFQTRAGCLIGAEHVNNSYECDIPIGAGICASYQTQTNSPRRARSVASQSIIAYTMSLGAENSVAYSNNSIAICTNFTISVTTEILPVSMTKTSVDCTMYICGDSTECSNLLLQYGSFCTQLNRALTGIAVEQDKNTQEVFAQVKQIYKTPPIKDCGGFNFSQILPDPSKPSKRSFIEDLLFNKVTLADAGFIKQYGDCLGDIAARDLICAQKFNGLTVLPPLLTDEMIAQYTSALLAGTITSGWTFGAGAALQIPFAMQMAYRFNGIGVTQNVLYENQKLIANQFNSAIGKIQDSLSSTASALGKLQDVVNQNAQALNTLVKQLSSNFGAISSVLNDILSRLDKVEAEVQIDRLITGRLQSLQTYVTQQLIRAAEIRASANLAATKMSECVLGQSKRVDFCGKGYHLMSFPQSAPHGVVFLHVTYVCAQEKNFTTAPAICHDGKAHFPREGVFVSNGTHWFVTQRNFYEPQIITTDNTFVSGNCDVVIGIVNNTVYDPLQPELDSFKEELDKYFKNHTSPDVDLGDISGINASVVNIQKEIDRLNEVAKNLNESLIDLQELGKYEQYIKGGSGYIPEAPRDGQAYVRKDGEWVLLSTFL

SEQ ID NO: 6117 - protein, 1241 aa, Artificial Sequence
  SARS-CoV-2/Tianmen/HBCDC-HB-07/2020__EPI_ISL_412983 spike protein (1-1211)(P715C_P1069C) Foldon construct
MFVFLVLLPLVSSQCVNLTTRTQLPPAYTNSFTRGVYYPDKVFRSSVLHSTQDLFLPFFSNVTWFHAIHVSGTNGTKRFDNPVLPFNDGVYFASTEKSNIIRGWIFGTTLDSKTQSLLIVNNATNVVIKVCEFQFCNDPFLGVYYHKNNKSWMESEFRVYSSANNCTFEYVSQPFLMDLEGKQGNFKNLREFVFKNIDGYFKIYSKHTPINLVRDLPQGFSALEPLVDLPIGINITRFQTLLALHRSYLTPGDSSSGWTAGAAAYYVGYLQPRTFLLKYNENGTITDAVDCALDPLSETKCTLKSFTVEKGIYQTSNFRVQPTESIVRFPNITNLCPFGEVFNATRFASVYAWNRKRISNCVADYSVLYNSASFSTFKCYGVSPTKLNDLCFTNVYADSFVIRGDEVRQIAPGQTGKIADYNYKLPDDFTGCVIAWNSNNLDSKVGGNYNYLYRLFRKSNLKPFERDISTEIYQAGSTPCNGVEGFNCYFPLQSYGFQPTNGVGYQPYRVVVLSFELLHAPATVCGPKKSTNLVKNKCVNFNFNGLTGTGVLTESNKKFLPFQQFGRDIADTTDAVRDPQTLEILDITPCSFGGVSVITPGTNTSNQVAVLYQDLNCTEVPVAIHADQLTPTWRVYSTGSNVFQTRAGCLIGAEHVNNSYECDIPIGAGICASYQTQTNSPRRARSVASQSIIAYTMSLGAENSVAYSNNSIAICTNFTISVTTEILPVSMTKTSVDCTMYICGDSTECSNLLLQYGSFCTQLNRALTGIAVEQDKNTQEVFAQVKQIYKTPPIKDFGGFNFSQILPDPSKPSKRSFIEDLLFNKVTLADAGFIKQYGDCLGDIAARDLICAQKFNGLTVLPPLLTDEMIAQYTSALLAGTITSGWTFGAGAALQIPFAMQMAYRFNGIGVTQNVLYENQKLIANQFNSAIGKIQDSLSSTASALGKLQDVVNQNAQALNTLVKQLSSNFGAISSVLNDILSRLDKVEAEVQIDRLITGRLQSLQTYVTQQLIRAAEIRASANLAATKMSECVLGQSKRVDFCGKGYHLMSFPQSAPHGVVFLHVTYVCAQEKNFTTAPAICHDGKAHFPREGVFVSNGTHWFVTQRNFYEPQIITTDNTFVSGNCDVVIGIVNNTVYDPLQPELDSFKEELDKYFKNHTSPDVDLGDISGINASVVNIQKEIDRLNEVAKNLNESLIDLQELGKYEQYIKGGSGYIPEAPRDGQAYVRKDGEWVLLSTFL

SEQ ID NO: 6118 - protein, 1241 aa, Artificial Sequence
  SARS-CoV-2/Hong Kong/case42_VM20002493/2020__EPI_ISL_414527 spike protein (1-1211)(P715C_P1069C) Foldon construct
MFVFLVLLPLVSSQCVNLTTRTQLPPAYTNSFTRGVYYPDKVFRSSVLHSTQDLFLPFFSNVTWFHAIHVSGTNGTKRFDNPVLPFNDGVYFASTEKSNIIRGWIFGTTLDSKTQSLLIVNNATNVVIKVCEFQFCNDPFLGVYYHKNNKSWMESEFRVYSSANNCTFEYVSQPFLMDLEGKQGNFKNLREFVFKNIDGYFKIYSKHTPINLVRDLPQGFSALEPLVDLPIGINITRFQTLLALHRSYLTPGDSSSGWTAGAAAYYVGYLQPRTFLLKYNENGTITDAVDCALDPLSETKCTLKSFTVEKGIYQTSNFRVQPTESIVRFPNITNLCPFGEVFNATRFASVYAWNRKRISNCVADYSVLYNSASFSTFKCYGVSPTKLNDLCFTNVYADSFVIRGDEVRQIAPGQTGKIADYNYKLPDDFTGCVIAWNSNNLDSKVGGNYNYLYRLFRKSNLKPFERDISTEIYQAGSTPCNGVEGFNCYFPLQSYGFQPTNGVGYQPYRVVVLSFELLHAPATVCGPKKSTNLVKNKCVNFNFNGLTGTGVLTESNKKFLPFQQFGRDIADTTDAVRDPQTLEILDITPCSFGGVSVITPGTNTSNQVAVLYQDVNCTEVPVAIHADQLTPTWRVYSTGSNVFQTRAGCLIGAEHVNNSYECDIPIGAGICASYQTQTNSPRRARSVASQSIIAYTMSLGAENSVAYSNNSIAICTNFAISVTTEILPVSMTKTSVDCTMYICGDSTECSNLLLQYGSFCTQLNRALTGIAVEQDKNTQEVFAQVKQIYKTPPIKDFGGFNFSQILPDPSKPSKRSFIEDLLFNKVTLADAGFIKQYGDCLGDIAARDLICAQKFNGLTVLPPLLTDEMIAQYTSALLAGTITSGWTFGAGAALQIPFAMQMAYRFNGIGVTQNVLYENQKLIANQFNSAIGKIQDSLSSTASALGKLQDVVNQNAQALNTLVKQLSSNFGAISSVLNDILSRLDKVEAEVQIDRLITGRLQSLQTYVTQQLIRAAEIRASANLAATKMSECVLGQSKRVDFCGKGYHLMSFPQSAPHGVVFLHVTYVCAQEKNFTTAPAICHDGKAHFPREGVFVSNGTHWFVTQRNFYEPQIITTDNTFVSGNCDVVIGIVNNTVYDPLQPELDSFKEELDKYFKNHTSPDVDLGDISGINASVVNIQKEIDRLNEVAKNLNESLIDLQELGKYEQYIKGGSGYIPEAPRDGQAYVRKDGEWVLLSTFL

SEQ ID NO: 6119 - protein, 1241 aa, Artificial Sequence
  SARS-CoV-2/USA/CruiseA-23/2020__EPI_ISL_414482 spike protein (1-1211)(P715C_P1069C) Foldon construct
MFVFLVLLPLVSSQCVNLTTRTQLPPAYTNSFTRGVYYPDKVFRSSVLHSTQDLFLPFFSNVTWFHAIHVSGTNGTKRFDNPVLPFNDGVYFASTEKSNIIRGWIFGTTLDSKTQSLLIVNNATNVVIKVCEFQFCNDPFLGVYYHKNNKSWMESEFRVYSSANNCTFEYVSQPFLMDLEVKQGNFKNLREFVFKNIDGYFKIYSKHTPINLVRDLPQGFSALEPLVDLPIGINITRFQTLLALHRSYLTPGDSSSGWTAGAAAYYVGYLQPRTFLLKYNENGTITDAVDCALDPLSETKCTLKSFTVEKGIYQTSNFRVQPTESIVRFPNITNLCPFGEVFNATRFASVYAWNRKRISNCVADYSVLYNSASFSTFKCYGVSPTKLNDLCFTNVYADSFVIRGDEVRQIAPGQTGKIADYNYKLPDDFTGCVIAWNSNNLDSKVGGNYNYLYRLFRKSNLKPFERDISTEIYQAGSTPCNGVEGFNCYFPLQSYGFQPTNGVGYQPYRVVVLSFELLHAPATVCGPKKSTNLVKNKCVNFNFNGLTGTGVLTESNKKFLPFQQFGRDIADTTDAVRDPQTLEILDITPCSFGGVSVITPGTNTSNQVAVLYQDVNCTEVPVAIHADQLTPTWRVYSTGSNVFQTRAGCLIGAEHVNNSYECDIPIGAGICASYQTQTNSPRRARSVASQSIIAYTMSLGAENSVAYSNNSIAICTNFTISVTTEILPVSMTKTSVDCTMYICGDSTECSNLLLQYGSFCTQLNRALTGIAVEQDKNTQEVFAQVKQIYKTPPIKDFGGFNFSQILPDPSKPSKRSFIEDLLFNKVTLADAGFIKQYGDCLGDIAARDLICAQKFNGLTVLPPLLTDEMIAQYTSALLAGTITSGWTFGAGAALQIPFAMQMAYRFNGIGVTQNVLYENQKLIANQFNSAIGKIQDSLSSTASALGKLQDVVNQNAQALNTLVKQLSSNFGAISSVLNDILSRLDKVEAEVQIDRLITGRLQSLQTYVTQQLIRAAEIRASANLAATKMSECVLGQSKRVDFCGKGYHLMSFPQSAPHGVVFLHVTYVCAQEKNFTTAPAICHDGKAHFPREGVFVSNGTHWFVTQRNFYEPQIITTDNTFVSGNCDVVIGIVNNTVYDPLQPELDSFKEELDKYFKNHTSPDVDLGDISGINASVVNIQKEIDRLNEVAKNLNESLIDLQELGKYEQYIKGGSGYIPEAPRDGQAYVRKDGEWVLLSTFL

SEQ ID NO: 6120 - protein, 1241 aa, Artificial Sequence
  SARS-CoV-2/Hong Kong/case85_VM20002868/2020__EPI_ISL_414519 spike protein (1-1211)(P715C_P1069C) Foldon construct
MFVFLVLVPLVSSQCVNLTTRTQLPPAYTNSFTRGVYYPDKVFRSSVLHSTQDLFLPFFSNVTWFHAIHVSGTNGTKRFDNPVLPFNDGVYFASTEKSNIIRGWIFGTTLDSKTQSLLIVNNATNVVIKVCEFQFCNDPFLGVYYHKNNKSWMESEFRVYSSANNCTFEYVSQPFLMDLEGKQGNFKNLREFVFKNIDGYFKIYSKHTPINLVRDLPQGFSALEPLVDLPIGINITRFQTLLALHRSYLTPGDSSSGWTAGAAAYYVGYLQPRTFLLKYNENGTITDAVDCALDPLSETKCTLKSFTVEKGIYQTSNFRVQPTESIVRFPNITNLCPFGEVFNATRFASVYAWNRKRISNCVADYSVLYNSASFSTFKCYGVSPTKLNDLCFTNVYADSFVIRGDEVRQIAPGQTGKIADYNYKLPDDFTGCVIAWNSNNLDSKVGGNYNYLYRLFRKSNLKPFERDISTEIYQAGSTPCNGVEGFNCYFPLQSYGFQPTNGVGYQPYRVVVLSFELLHAPATVCGPKKSTNLVKNKCVNFNFNGLTGTGVLTESNKKFLPFQQFGRDIADTTDAVRDPQTLEILDITPCSFGGVSVITPGTNTSNQVAVLYQDVNCTEVPVAIHADQLTPTWRVYSTGSNVFQTRAGCLIGAEHVNNSYECDIPIGAGICASYQTQTNSPRRARSVASQSIIAYTMSLGAENSVAYSNNSIAICTNFTISVTTEILPVSMTKTSVDCTMYICGDSTECSNLLLQYGSFCTQLNRALTGIAVEQDKNTQEVFAQVKQIYKTPPIKDFGGFNFSQILPDPSKPSKRSFIEDLLFNKVTLADAGFIKQYGDCLGDIAARDLICAQKFNGLTVLPPLLTDEMIAQYTSALLAGTITSGWTFGAGAALQIPFAMQMAYRFNGIGVTQNVLYENQKLIANQFNSAIGKIQDSLSSTASALGKLQDVVNQNAQALNTLVKQLSSNFGAISSVLNDILSRLDKVEAEVQIDRLITGRLQSLQTYVTQQLIRAAEIRASANLAATKMSECVLGQSKRVDFCGKGYHLMSFPQSAPHGVVFLHVTYVCAQEKNFTTAPAICHDGKAHFPREGVFVSNGTHWFVTQRNFYEPQIITTDNTFVSGNCDVVIGIVNNTVYDPLQPELDSFKEELDKYFKNHTSPDVDLGDISGINASVVNIQKEIDRLNEVAKNLNESLIDLQELGKYEQYIKGGSGYIPEAPRDGQAYVRKDGEWVLLSTFL

SEQ ID NO: 6121 - protein, 1241 aa, Artificial Sequence; identical to SEQ ID NO: 6111
  SARS-CoV-2/England/200990660/2020__EPI_ISL_414523 spike protein (1-1211)(P715C_P1069C) Foldon construct

SEQ ID NO: 6122 - protein, 1241 aa, Artificial Sequence
  SARS-CoV-2/Australia/NSW09/2020__EPI_ISL_413595 spike protein (1-1211)(P715C_P1069C) Foldon construct
MFVFLVLLPLVSSQCVNLTTRTQLPPAYTNSFTRGVYYPDKVFRSSVLHSTQDLFLPFFSNVTWFHAIHVSGTNGTKRFDNPVLPFNDGVYFASTEKSNIIRGWIFGTTLDSKTQSLLIVNNATNVVIKVCEFQFCNDPFLGVYYHKNNKSWMESEFRVYSSANNCTFEYVSQPFLMDLEGKQGNFKNLREFVFKNIDGYFKIYSKHTPINLVRDLPQGFSALEPLVDLPIGINITRFQTLLALHRSYLTPGDSSSGWTAGAAAYYVGYLQPRTFLLKYNENGTITDAVDCALDPLSETKCTLKSFTVEKGIYQTSNFRVQPTESIVRFPNITNLCPFGEVFNATRFASVYAWNRKRISNCVADYSVLYNSASFSTFKCYGVSPTKLNDLCFTNVYADSFVIRGDEVRQIAPGQTGKIADYNYKLPDDFTGCVIAWNSNNLDSKVGGNYNYLYRLFRKSNLKPFERDISTEIYQAGSTPCNGVEGFNCYFPLQSYGFQPTNGVGYQPYRVVVLSFELLHAPATVCGPKKSTNLVKNKCVNFNFNGLTGTGVLTESNKKFLPFQQFGRDIADTTDAVRDPQTLEILDITPCSFGGVSVITPGTNTSNQVAVLYQDVNCTEVPVAIHADQLTPTWRVYSTGSNVFQTRAGCLIGAEHVNNSYECDIPIGAGICASYQTQTNSPRRARSVASQSIIAYTMSLGAENSVAYSNNSIAICTNFTISVTTEILPVSMTKTSVDCTMYICGDSTECSNLLLQYGSFCTQLNRALTGIAVEQDKNTQEVFAQVKQIYKTPPIKDFGGFNFSQILPDPSKPSKRSFIEDLLFNKVTLADAGFIKQYGDCLGDIAARDLICAQKFNGLTVLPPLLTDEMIAQYTSALLAGTITSGWTFGAGAALQIPFAMQMAYRFNGIGVTQNVLYENQKLIANQFNSAIGKIQDSLSFTASALGKLQDVVNQNAQALNTLVKQLSSNFGAISSVLNDILSRLDKVEAEVQIDRLITGRLQSLQTYVTQQLIRAAEIRASANLAATKMSECVLGQSKRVDFCGKGYHLMSFPQSAPHGVVFLHVTYVCAQEKNFTTAPAICHDGKAHFPREGVFVSNGTHWFVTQRNFYEPQIITTDNTFVSGNCDVVIGIVNNTVYDPLQPELDSFKEELDKYFKNHTSPDVDLGDISGINASVVNIQKEIDRLNEVAKNLNESLIDLQELGKYEQYIKGGSGYIPEAPRDGQAYVRKDGEWVLLSTFL

SEQ ID NO: 6123 - protein, 1241 aa, Artificial Sequence; identical to SEQ ID NO: 6103
  SARS-CoV-2/Australia/NSW10/2020__EPI_ISL_413596 spike protein (1-1211)(P715C_P1069C) Foldon construct

SEQ ID NO: 6124 - protein, 1241 aa, Artificial Sequence
  SARS-CoV-2/Switzerland/1000477797/2020__EPI_ISL_413023 spike protein (1-1211)(P715C_P1069C) Foldon construct
MFVFLVLLPLVSSQCVNLTTRTQLPPAYTNSFTRGVYYPDKVFRSSVLHSTQDLFLPFFSNVTWFHAIHVSGTNGTKRFDNPVLPFNDGVYFASTEKSNIIRGWIFGTTLDSKTQSLLIVNNATNVVIKVCEFQFCNDPFLGVYYHKNNKSWMESEFRVYSSANNCTFEYVSQPFLMDLEGKQGNFKNLREFVFKNIDGYFNIYSKHTPINLVRDLPQGFSALEPLVDLPIGINITRFQTLLALHRSYLTPGDSSSGWTAGAAAYYVGYLQPRTFLLKYNENGTITDAVDCALDPLSETKCTLKSFTVEKGIYQTSNFRVQPTESIVRFPNITNLCPFGEVFNATRFASVYAWNRKRISNCVADYSVLYNSASFSTFKCYGVSPTKLNDLCFTNVYADSFVIRGDEVRQIAPGQTGKIADYNYKLPDDFTGCVIAWNSNNLDSKVGGNYNYLYRLFRKSNLKPFERDISTEIYQAGSTPCNGVEGFNCYFPLQSYGFQPTNGVGYQPYRVVVLSFELLHAPATVCGPKKSTNLVKNKCVNFNFNGLTGTGVLTESNKKFLPFQQFGRDIADTTDAVRDPQTLEILDITPCSFGGVSVITPGTNTSNQVAVLYQGVNCTEVPVAIHADQLTPTWRVYSTGSNVFQTRAGCLIGAEHVNNSYECDIPIGAGICASYQTQTNSPRRARSVASQSIIAYTMSLGAENSVAYSNNSIAICTNFTISVTTEILPVSMTKTSVDCTMYICGDSTECSNLLLQYGSFCTQLNRALTGIAVEQDKNTQEVFAQVKQIYKTPPIKDFGGFNFSQILPDPSKPSKRSFIEDLLFNKVTLADAGFIKQYGDCLGDIAARDLICAQKFNGLTVLPPLLTDEMIAQYTSALLAGTITSGWTFGAGAALQIPFAMQMAYRFNGIGVTQNVLYENQKLIANQFNSAIGKIQDSLSSTASALGKLQDVVNQNAQALNTLVKQLSSNFGAISSVLNDILSRLDKVEAEVQIDRLITGRLQSLQTYVTQQLIRAAEIRASANLAATKMSECVLGQSKRVDFCGKGYHLMSFPQSAPHGVVFLHVTYVCAQEKNFTTAPAICHDGKAHFPREGVFVSNGTHWFVTQRNFYEPQIITTDNTFVSGNCDVVIGIVNNTVYDPLQPELDSFKEELDKYFKNHTSPDVDLGDISGINASVVNIQKEIDRLNEVAKNLNESLIDLQELGKYEQYIKGGSGYIPEAPRDGQAYVRKDGEWVLLSTFL

SEQ ID NO: 6125 - protein, 1241 aa, Artificial Sequence
  SARS-CoV-2/Belgium/BA-02291/2020__EPI_ISL_415159 spike protein (1-1211)(P715C_P1069C) Foldon construct
MFVFLVLLPLVSSQCVNLTTRTQLPPAYTNSFTRGVYYPDKVFRSSVLHSTQDLFLPFFSNVTWFHAIHVSGTNGTKRFDNPVLPFNDGVYFASTEKSNIIRGWIFGTTLDSKTQSLLIVNNATNVVIKVCEFQFCNDPFLGVYYHKNNKSWMESEFRVYSSANNCTFEYVSQPFLMDLEGKQGNFKNLREFVFKNIDGYFKIYSKHTPINLVRDLPQGFSALEPLVDLPIGINITRFQTLLALHRSYLTPGDSSSGWTAGAAAYYVGYLQPRTFLLKYNENGTITDAVDCALDPLSETKCTLKSFTVEKGIYQTSNFRVQPTESIVRFPNITNLCPFGEVFNATRFASVYAWNRKRISNCVADYSVLYNSASFSTFKCYGVSPTKLNDLCFTNVYADSFVIRGDEVRQIAPGQTGKIADYNYKLPDDFTGCVIAWNSNNLDSKVGGNYNYLYRLFRRSNLKPFERDISTEIYQAGSTPCNGVEGFNCYFPLQSYGFQPTNGVGYQPYRVVVLSFELLPAPATVCGPKKSTNLVKNKCVNFNFNGLTGTGVLTESNKKFLPFQQFGRDIADTTDAVRDPQTLEILDITPCSFGGVSVITPGTNTSNQVAVLYQGVNCTEVPVAIHADQLTPTWRVYSTGSNVFQTRAGCLIGAEHVNNSYECDIPIGAGICASYQTQTNSPRRARSVASQSIIAYTMSLGAENSVAYSNNSIAICTNFTISVTTEILPVSMTKTSVDCTMYICGDSTECSNLLLQYGSFCTQLNRALTGIAVEQDKNTQEVFAQVKQIYKTPPIKDFGGFNFSQILPDPSKPSKRSFIEDLLFNKVTLADAGFIKQYGDCLGDIAARDLICAQKFNGLTVLPPLLTDEMIAQYTSALLAGTITSGWTFGAGAALQIPFAMQMAYRFNGIGVTQNVLYENQKLIANQFNSAIGKIQDSLSSAAPALGKLQDVVNQNAQALNTLVKQLSSNFGAISSVLNDILSRLDKVEAEVQIDRLITGRLQSLQTYVTQQLIRAAEIRASANLAATKMSECVLGQSKRVDFCGKGYHLMSFPQSAPHGVVFLHVTYVCAQEKNFTTAPAICHDGKAHFPREGVFVSNGTHWFVTQRNFYEPQIITTDNTFVSGNCDVVIGIVNNTVYDPLQPELDSFKEELDKYFKNHTSPDVDLGDISGINASVVNIQKEIDRLNEVAKNLNESLIDLQELGKYEQYIKGGSGYIPEAPRDGQAYVRKDGEWVLLSTFL

SEQ ID NO: 6126 - protein, 1241 aa, Artificial Sequence
  SARS-CoV-2/USA/WA8-UW5/2020__EPI_ISL_413486 spike protein (1-1211)(P715C_P1069C) Foldon construct
MFVFLVLLPLVSSQCVNLTTRTQLPPAYTNSFTRGVYYPDKVFRSSVLHSTQDLFLPFFSNVTWFHAIHVSGTNGTKRFDNPVLPFNDGVYFASTEKSNIIRGWIFGTTLDSKTQSLLIVNNATNVVIKVCEFQFCNDPFLGVYYHKNNKSWMESEFRVYSSANNCTFEYVSQPFLMDLEGKQGNFKNLREFVFKNIDGYFKIYSKHTPINLVRDLPQGFSALEPLVDLPIGINITRFQTLLALHRSYLTPGDSSSGWTAGAAAYYVGYLQPRTFLLKYNENGTITDAVDCALDPLSETKCTLKSFTVEKGIYQTSNFRVQPTESIVRFPNITNLCPFGEVFNATRFASVYAWNRKRISNCVADYSVLYNSASFSTFKCYGVSPTKLNDLCFTNVYADSFVIRGDEVRQIAPGQTGKIADYNYKLPDDFTGCVIAWNSNNLDSKVGGNYNYLYRLFRKSNLKPFERDISTEIYQAGSTPCNGVEGFNCYFPLQSYGFQPTNGVGYQPYRVVVLSFELLHAPATVCGPKKSTNLVKNKCVNFNFNGLTGTGVLTESNKKFLPFQQFGRDIADTTDAVRDPQTLEILDITPCSFGGVSVITPGTNTSNQVAVLYQDVNCTEVPVAIHADQLTPTWRVYSTGSNVFQTRAGCLIGAEYVNNSYECDIPIGAGICASYQTQTNSPRRARSVASQSIIAYTMSLGAENSVAYSNNSIAICTNFTISVTTEILPVSMTKTSVDCTMYICGDSTECSNLLLQYGSFCTQLNRALTGIAVEQDKNTQEVFAQVKQIYKTPPIKDFGGFNFSQILPDPSKPSKRSFIEDLLFNKVTLADAGFIKQYGDCLGDIAARDLICAQKFNGLTVLPPLLTDEMIAQYTSALLAGTITSGWTFGAGAALQIPFAMQMAYRFNGIGVTQNVLYENQKLIANQFNSAIGKIQDSLSSTASALGKLQDVVNQNAQALNTLVKQLSSNFGAISSVLNDILSRLDKVEAEVQIDRLITGRLQSLQTYVTQQLIRAAEIRASANLAATKMSECVLGQSKRVDFCGKGYHLMSFPQSAPHGVVFLHVTYVCAQEKNFTTAPAICHDGKAHFPREGVFVSNGTHWFVTQRNFYEPQIITTDNTFVSGNCDVVIGIVNNTVYDPLQPELDSFKEELDKYFKNHTSPDVDLGDISGINASVVNIQKEIDRLNEVAKNLNESLIDLQELGKYEQYIKGGSGYIPEAPRDGQAYVRKDGEWVLLSTFL

SEQ ID NO: 6127 - protein, 1241 aa, Artificial Sequence
  SARS-CoV-2/England/20102000506/2020__EPI_ISL_415147 spike protein (1-1211)(P715C_P1069C) Foldon construct
MFVFLVLLPLVSSQCVNLTTRTQLPPAYTNSFTRGVYYPDKVFRSSVLHSTQDLFLPFFSNVTWFHAIHVSGTNGTKRFDNPVLPFNDGVYFASTEKSNIIRGWIFGTTLDSKTQSLLIVNNATNVVIKVCEFQFCNDPFLGVYYHKNNKSWMESEFRVYSSANNCTFEYVSQPFLMDLEGKQGNFKNLREFVFKNIDGYFKIYSKHTPINLVRDLPQGFSALEPLVDLPIGINITRFQTLLALHRSYLTPGDSSSGWTAGAAAYYVGYLQPRTFLLKYNENGTITDAVDCALDPLSETKCTLKSFTVEKGIYQTSNFRVQPTESIVRFPNITNLCPFGEVFNATRFASVYAWNRKRISNCVADYSVLYNSASFSTFKCYGVSPTKLNDLCFTNVYADSFVIRGDEVRQIAPGQTGKIADYNYKLPDDFTGCVIAWNSNNLDSKVGGNYNYLYRLFRKSNLKPFERDISTEIYQAGSTPCNGVEGFNCYFPLQSYGFQPTNGVGYQPYRVVVLSFELLHAPATVCGPKKSTNLVKNKCVNFNFNGLTGTGVLTESNKKFLPFQQFGRDIADTTDAVRDPQTLEILDITPCSFGGVSVITPGTNTSNQVAVLYQGVNCTEVPVAIHADQLTPTWRVYSTGSNVFQTRAGCLIGAEHVNNSYECDIPIGAGICASYQTQTNSPRRARSVASQSIIAYTMSLGAENSVAYSNNSIAICTNFTISVTTEILPVSMTKTSVDCTMYICGDSTECSNLLLQYGSFCTQLNRALTGIAVEQDKNTQEVFAQVKQIYKTPPIKDFGGFNFSQILPDPSKPSKRSFIEDLLFNKVTLADAGFIKQYGYCLGDIAARDLICAQKFNGLTVLPPLLTDEMIAQYTSALLAGTITSGWTFGAGAALQIPFAMQMAYRFNGIGVTQNVLYENQKLIANQFNSAIGKIQDSLSSTASALGKLQDVVNQNAQALNTLVKQLSSNFGAISSVLNDILSRLDKVEAEVQIDRLITGRLQSLQTYVTQQLIRAAEIRASANLAATKMSECVLGQSKRVDFCGKGYHLMSFPQSAPHGVVFLHVTYVCAQEKNFTTAPAICHDGKAHFPREGVFVSNGTHWFVTQRNFYEPQIITTDNTFVSGNCDVVIGIVNNTVYDPLQPELDSFKEELDKYFKNHTSPDVDLGDISGINASVVNIQKEIDRLNEVAKNLNESLIDLQELGKYEQYIKGGSGYIPEAPRDGQAYVRKDGEWVLLSTFL

SEQ ID NO: 6128 - protein, 1241 aa, Artificial Sequence
  SARS-CoV-2/Belgium/VAG-03013/2020__EPI_ISL_415155 spike protein (1-1211)(P715C_P1069C) Foldon construct
MFVFLVLLPLVSSQCVNLTTRTQLPPAYTNSFTRGVYYPDKVFRSSVLHSTQDLFLPFFSNVTWFHAIHVSGTNGTKRFDNPVLPFNDGVYFASTEKSNIIRGWIFGTTLDSKTQSLLIVNNATNVVIKVCEFQFCNDPFLGVYYHKNNKSWMESEFRVYSSANNCTFEYVSQPFLMDLEGKQGNFKNLREFVFKNIDGYFKIYSKHTPINLVRDLPQGFSALEPLVDLPIGINITRFQTLLALHRSYLTPGDSSSGWTAGAAAYYVGYLQPRTFLLKYNENGTITDAVDCALDPLSETKCTLKSFTVEKGIYQTSNFRVQPTESIVRFPNITNLCPFGEVFNATRFASVYAWNRKRISNCVADYSVLYNSASFSTFKCYGVSPTKLNDLCFTNVYADSFVIRGDEVRQIAPGQTGKIADYNYKLPDDFTGCVIAWNSNNLDSKVGGNYNYLYRLFRKSNLKPFERDISTEIYQAGSTPCNGVEGFNCYFPLQSYGFQPTNGVGYQPYRVVVLSFELLHAPATVCGPKKSTNLVKNKCVNFNFNGLTGTGVLTESNKKFLPFQQFGRDIADTTDAVRDPQTLEILDITPCSFGGVSVITPGTNTSNQVAVLYQGVNCTEVPVAIHADQLTPTWRVYSTGSNVFQTRAGCLIGAEHVNNSYECDIPIGAGICASYQTQTNSPRRARSVASQSIIAYTMSLGAENSVAYSNNSIAICTNFTISVTTEILPVSMTKTSVDCTMYICGDSTECSNLLLQYGSFCTQLNRALTGIAVEQDKNTQEVFAQVKQIYKTPPIKDFGGFNFSQILPDPSKPSKRSFIEDLLFNKVTLADAGFIKQYGDCLGDIAARDLICAQKFNGLTVLPPLLTDEMIAQYTSALLAGTITSGWTFGAGAALQIPFAMQMAYRFNGIGVTQNVLYENQKLIANQFNSAIGKIQDSLSSTATALGKLQDVVNQNAQALNTLVKQLSSNFGAISSVLNDILSRLDKVEAEVQIDRLITGRLQSLQTYVTQQLIRAAEIRASANLAATKMSECVLGQSKRVDFCGKGYHLMSFPQSAPHGVVFLHVTYVCAQEKNFTTAPAICHDGKAHFPREGVFVSNGTHWFVTQRNFYEPQIITTDNTFVSGNCDVVIGIVNNTVYDPLQPELDSFKEELDKYFKNHTSPDVDLGDISGINASVVNIQKEIDRLNEVAKNLNESLIDLQELGKYEQYIKGGSGYIPEAPRDGQAYVRKDGEWVLLSTFL

SEQ ID NO: 6129 - protein, 1241 aa, Artificial Sequence
  SARS-CoV-2/Belgium/BC-03016/2020__EPI_ISL_415157 spike protein (1-1211)(P715C_P1069C) Foldon construct
MFVFLVLLPLVSSQCVNLTTRTQLPPAYTNSFTRGVYYPDKVFRSSVLHSTQDLFLPFFSNVTWFHAIHVSGTNGTKRFDNPVLPFNDGVYFASTEKSNIIRGWIFGTTLDSKTQSLLIVNNATNVVIKVCEFQFCNDPFLGVYYHKNNKSWMESEFRVYSSANNCTFEYVSQPFLMDLEGKQGNFKNLREFVFKNIDGYFKIYSKHTPINLVRDLPQGFSALEPLVDLPIGINITRFQTLLALHRSYLTPGDSSSGWTAGAAAYYVGYLQPRTFLLKYNENGTITDAVDCALDPLSETKCTLKSFTVEKGIYQTSNFRVQPTESIVRFPNITNLCPFGEVFNATRFASVYAWNRKRISNCVADYSVLYNSASFSTFKCYGVSPTKLNDLCFTNVYADSFVIRGDEVRQIAPGQTGKIADYNYKLPDDFTGCVIAWNSNNLDSKVGGNYNYLYRLFRKSNLKPFERDISTEIYQAGSTPCNGVEGFNCYFPLQSYGFQPTNGVGYQPYRVVVLSFELLHAPATVCGPKKSTNLVKNKCVNFNFNGLTGTGVLTESNKKFLPFQQFGRDIADTTDAVRDPQTLEILDITPCSFGGVSVITPGTNTSNQVAVLYQGVNCTEVPVAIHADQLTPTWRVYSTGSNVFQTRAGCLIGAEHVNNSYECDIPIGAGICASYQTQTNSPRRARSVASQSIIAYTMSLGAENSVAYSNNSIAICTNFTISVTTEILPVSMTKTSVDCTMYICGDSTECSNLLLQYGSFCTQLNRALTGIAVEQDKNTQEVFAQVKQIYKTPPIKDFGGFNFSQILPDPSKPSKRSFIEDLLFNKVTLADAGFIKQYGDCLGDIAARDLICAQKFNGLTVLPPLLTDEMIAQYTSALLAGTITSGWTFGAGAALQIPFAMQMAYRFNGIGVTQNVLYENQKLIANQFNSAIGKIQDSLSSTAPALGKLQDVVNQNAQALNTLVKQLSSNFGAISSVLNDILSRLDKVEAEVQIDRLITGRLQSLQTYVTQQLIRAAEIRASANLAATKMSECVLGQSKRVDFCGKGYHLMSFPQSAPHGVVFLHVTYVCAQEKNFTTAPAICHDGKAHFPREGVFVSNGTHWFVTQRNFYEPQIITTDNTFVSGNCDVVIGIVNNTVYDPLQPELDSFKEELDKYFKNHTSPDVDLGDISGINASVVNIQKEIDRLNEVAKNLNESLIDLQELGKYEQYIKGGSGYIPEAPRDGQAYVRKDGEWVLLSTFL

SEQ ID NO: 6130 - protein, 1241 aa, Artificial Sequence
  SARS-CoV-2/Germany/BavPat3/2020__EPI_ISL_414521 spike protein (1-1211)(P715C_P1069C) Foldon construct
MFVFLVLLPLVSSQCVNLTTRTQLPPAYTNSFTRGVYYPDKVFRSSVLHSTQDLFLPFFSNVTWFHAIHVSGTNGTKRFDNPVLPFNDGVYFASTEKSNIIRGWIFGTTLDSKTQSLLIVNNATNVVIKVCEFQFCNDPFLGVYYHKNNKSWMESEFRVYSSANNCTFEYVSQPFLMDLEGKQGNFKNLREFVFKNIDGYFKIYSKHTPINLVRDLPQGFSALEPLVDLPIGINITRFQTLLALHRSYLTPGDSSSGWTAGAAAYYVGYLQPRTFLLKYNENGTITDAVDCALDPLSETKCTLKSFTVEKGIYQTSNFRVQPTESIVRFPNITNLCPFGEVFNATRFASVYAWNRKRISNCVADYSVLYNSASFSTFKCYGVSPTKLNDLCFTNVYADSFVIRGDEVRQIAPGQTGKIADYNYKLPDDFTGCVIAWNSNNLDSKVGGNYNYLYRLFRKSNLKPFERDISTEIYQAGSTPCNGVEGFNCYFPLQSYGFQPTNGVGYQPYRVVVLSFELLHAPATVCGPKKSTNLVKNKCVNFNFNGLTGTGVLTESNKKFLPFQQFGRDIADTTDAVRDPQTLEILDITPCSFGGVSVITPGTNTSNQVAVLYQDVNCTEVPVAIHADQLTPTWRVYSTGSNVFQTRAGCLIGAEHVNNSYECDIPIGAGICASYQTQTNSPRRARSVASQSIIAYTMSLGAENSVAYSNNSIAICTNFTISVTTEILPVSMTKTSVDCTMYICGDSTECSNLLLQYGSFCTQLNRALTGIAVEQDKNTQQVFAQVKQIYKTPPIKDFGGFNFSQILPDPSKPSKRSFIEDLLFNKVTLADAGFIKQYGDCLGDIAARDLICAQKFNGLTVLPPLLTDEMIAQYTSALLAGTITSGWTFGAGAALQIPFAMQMAYRFNGIGVTQNVLYENQKLIANQFNSAIGKIQDSLSSTASALGKLQDVVNQNAQALNTLVKQLSSNFGAISSVLNDILSRLDKVEAEVQIDRLITGRLQSLQTYVTQQLIRAAEIRASANLAATKMSECVLGQSKRVDFCGKGYHLMSFPQSAPHGVVFLHVTYVCAQEKNFTTAPAICHDGKAHFPREGVFVSNGTHWFVTQRNFYEPQIITTDNTFVSGNCDVVIGIVNNTVYDPLQPELDSFKEELDKYFKNHTSPDVDLGDISGINASVVNIQKEIDRLNEVAKNLNESLIDLQELGKYEQYIKGGSGYIPEAPRDGQAYVRKDGEWVLLSTFL

SEQ ID NO: 6131 - protein, 1241 aa, Artificial Sequence
  SARS-CoV-2/France/HF1805/2020__EPI_ISL_414628 spike protein (1-1211)(P715C_P1069C) Foldon construct
MFVFLVLLPLVSSQCVNLTTRTQLPPAYTNSFTRGVYYPDKVFRSSVLHSTQDLFLPFFSNVTWFHAIHVSGTNGTKRFDNPVLPFNDGVYFASTEKSNIIRGWIFGTTLDSKTQSLLIVNNATNVVIKVCEFQFCNDPFLGVYYHKNNKSWMESEFRVYSSANNCTFEYVSQPFLMDLEGKQGNFKNLREFVFKNIDGYFKIYSKHTPINLVRDLPQGFSALEPLVDLPIGINITRFQTLLALHRSYLTPGDSSSGWTAGAAAYYVGYLQPRTFLLKYNENGTITDAVDCALDPLSETKCTLKSFTVEKGIYQTSNFRVQPTESIVRFPNITNLCPFGEVFNATRFASVYAWNRKRISNCVADYSVLYNSASFSTFKCYGVSPTKLNDLCFTNVYADSFVIRGDEVRQIAPGQTGKIADYNYKLPDDFTGCVIAWNSNNLDSKVGGNYNYLYRLFRKSNLKPFERDISTEIYQAGSTPCNGVEGFNCYFPLQSYGFQPTNGVGYQPYRVVVLSFELLHAPATVCGPKKSTNLVKNKCVNFNFNGLTGTGVLTESNKKFLPFQQFGRDIADTTDAVRDPQTLEILDITPCSFGGVSVITPGTNTSNQVAVLYQGVNCTEVPVAIHADQLTPTWRVYSTGSNVFQTRAGCLIGAEHVNNSYECDIPIGAGICASYQTQTNSPRRARSVASQSIIAYTMSLGAENSVAYSNNSIAICTNFTISVTTEILPVSMTKTSVDCTMYICGDSTECSNLLLQYGSFCTQLNRALTGIAVEQDKNTQEVFAQVKQIYKTPPIKDFGGFNFSQILPDPSKPSKRSFIEDLLFNKVTLADAGFIKQYGDCLGDIAARDLICAQKFNGLTVLPPLLTDEMIAQYTSALLAGTITSGWTFGAGAALQIPFAMQMAYRFNGIGVTQNVLYENQKLIANQFNSAIGKIQDSLSSTASALGKLQDVVNQNAQALNTLVKQLSSNFGAISSVLNDILSRLDKVEAEVQIDRLITGRLQSLQTYVTQQLIRAAEIRASANLAATKMSECVLGQSKRVDFCGKGYHLMSFPQSAPHGVVFLHVTYVCAQEKNFTTAPAICHDGKAHFPREGVFVSNGTHWFVTQRNFYEPQIITTDNTFVSGNCDVVIGVVNNTVYDPLQPELDSFKEELDKYFKNHTSPDVDLGDISGINASVVNIQKEIDRLNEVAKNLNESLIDLQELGKYEQYIKGGSGYIPEAPRDGQAYVRKDGEWVLLSTFL

SEQ ID NO: 6132 - protein, 1241 aa, Artificial Sequence
  SARS-CoV-2/Netherlands/ZuidHolland_9/2020__EPI_ISL_414445 spike protein (1-1211)(P715C_P1069C) Foldon construct
MFVFLVLLPLVSSQCVNLTTRTQLPPAYTNSFTRGVYYPDKVFRSSVLHSTQDLFLPFFSNVTWFHAIHVSGTNGTKRFDNPVLPFNDGVYFASTEKSNIIRGWIFGTTLDSKTQSLLIVNNATNVVIKVCEFQFCNDPFLGVYYHKNNKSWMESEFRVYSSANNCTFEYVSQPFLMDLEGKQGNFKNLREFVFKNIDGYFKIYSKHTPINLVRDLPQGFSALEPLVDLPIGINITRFQTLLALHRSYLTPGDSSSGWTAGAAAYYVGYLQPRTFLLKYNENGTITDAVDCALDPLSETKCTLKSFTVEKGIYQTSNFRVQPTESIVRFPNITNLCPFGEVFNATRFASVYAWNRKRISNCVADYSVLYNSASFSTFKCYGVSPTKLNDLCFTNVYADSFVIRGDEVRQIAPGQTGKIADYNYKLPDDFTGCVIAWNSNNLDSKVGGNYNYLYRLFRKSNLKPFERDISTEIYQAGSTPCNGVEGFNCYFPLQSYGFQPTNGVGYQPYRVVVLSFELLHAPATVCGPKKSTNLVKNKCVNFNFNGLTGTGVLTESNKKFLPFQQFGRDIADTTDAVRDPQTLEILDITPCSFGGVSVITPGTNTSNQVAVLYQGVNCTEVPVAIHADQLTPTWRVYSTGSNVFQTRAGCLIGAEHVNNSYECDIPIGAGICASYQTQTNSPRRARSVASQSIIAYTMSLGAENSVAYSNNSIAICTNFTISVTTEILPVSMTKTSVDCTMYICGDSTECSNLLLQYGSFCTQLNRALTGIAVEQDKNTQEVFAQVKQIYKTPPIKDFGGFNFSQILPDPSKPSKRSFIEDLLFNKVTLADAGFIKQYGDCLGDIAARDLICVQKFNGLTVLPPLLTDEMIAQYTSALLAGTITSGWTFGAGAALQIPFAMQMAYRFNGIGVTQNVLYENQKLIANQFNSAIGKIQDSLSSTASALGKLQDVVNQNAQALNTLVKQLSSNFGAISSVLNDILSRLDKVEAEVQIDRLITGRLQSLQTYVTQQLIRAAEIRASANLAATKMSECVLGQSKRVDFCGKGYHLMSFPQSAPHGVVFLHVTYVCAQEKNFTTAPAICHDGKAHFPREGVFVSNGTHWFVTQRNFYEPQIITTDNTFVSGNCDVVIGIVNNTVYDPLQPELDSFKEELDKYFKNHTSPDVDLGDISGINASVVNIQKEIDRLNEVAKNLNESLIDLQELGKYEQYIKGGSGYIPEAPRDGQAYVRKDGEWVLLSTFL

SEQ ID NO: 6133 - protein, 1241 aa, Artificial Sequence
  SARS-CoV-2/Finland/FIN03032020A/2020__EPI_ISL_413602 spike protein (1-1211)(P715C_P1069C) Foldon construct
MFVFLVLLPLVSSQCVNLTTRTQLPPAYTNSFTRGVYYPDKVFRSSVLHSTQDLFLPFFSNVTWFHAIHVSGTNGTKRFDNPVLPFNDGVYFASTEKSNIIRGWIFGTTLDSKTQSLLIVNNATNVVIKVCEFQFCNDPFLGVYYHKNNKSWMESEFRVYSSANNCTFEYVSQPFLMDLEGKQGNFKNLREFVFKNIDGYFKIYSKHTPINLVRDLPQGFSALEPLVDLPIGINITRFQTLLALHRSYLTPGDSSSGWTAGAAAYYVGYLQPRTFLLKYNENGTITDAVDCALDPLSETKCTLKSFTVEKGIYQTSNFRVQPTESIVRFPNITNLCPFGEVFNATRFASVYAWNRKRISNCVADYSVLYNSASFSTFKCYGVSPTKLNDLCFTNVYADSFVIRGDEVRQIAPGQTGKIADYNYKLPDDFTGCVISWNSNNLDSKVGGNYNYLYRLFRKSNLKPFERDISTEIYQAGSTPCNGVEGFNCYFPLQSYGFQPTNGVGYQPYRVVVLSFELLHAPATVCGPKKSTNLVKNKCVNFNFNGLTGTGVLTESNKKFLPFQQFGRDIADTTDAVRDPQTLEILDITPCSFGGVSVITPGTNTSNQVAVLYQGVNCTEVPVAIHADQLTPTWRVYSTGSNVFQTRAGCLIGAEHVNNSYECDIPIGAGICASYQTQTNSPRRARSVASQSIIAYTMSLGAENSVAYSNNSIAICTNFTISVTTEILPVSMTKTSVDCTMYICGDSTECSNLLLQYGSFCTQLNRALTGIAVEQDKNTQEVFAQVKQIYKTPPIKDFGGFNFSQILPDPSKPSKRSFIEDLLFNKVTLADAGFIKQYGDCLGDIAARDLICAQKFNGLTVLPPLLTDEMIAQYTSALLAGTITSGWTFGAGAALQIPFAMQMAYRFNGIGVTQNVLYENQKLIANQFNSAIGKIQDSLSSTASALGKLQDVVNQNAQALNTLVKQLSSNFGAISSVLNDILSRLDKVEAEVQIDRLITGRLQSLQTYVTQQLIRAAEIRASANLAATKMSECVLGQSKRVDFCGKGYHLMSFPQSAPHGVVFLHVTYVCAQEKNFTTAPAICHDGKAHFPREGVFVSNGTHWFVTQRNFYEPQIITTDNTFVSGNCDVVIGIVNNTVYDPLQPELDSFKEELDKYFKNHTSPDVDLGDISGINASVVNIQKEIDRLNEVAKNLNESLIDLQELGKYEQYIKGGSGYIPEAPRDGQAYVRKDGEWVLLSTFL

SEQ ID NO: 6134 - protein, 1241 aa, Artificial Sequence
  SARS-CoV-2/France/GE1977/2020__EPI_ISL_414632 spike protein (1-1211)(P715C_P1069C) Foldon construct
MFVFLVLLPLVSSQCVNLTTRTQLPPAYTNSFTRGVYYPDKVFRSSVLHSTQDLFLPFFSNVTWFHAIHVSGTNGTKRFDNPVLPFNDGVYFASTEKSNIIRGWIFGTTLDSKTQSLLIVNNATNVVIKVCEFQFCNDPFLGVYYHKNNKSWMESEFRVYSSANNCTFEYVSQPFLMDLEGKQGNFKNLREFVFKNIDGYFKIYSKHTPINLVRDLPQGFSALEPLVDLPIGINITRFQTLLALHRSYLTPGDSSSGWTAGAAAYYVGYLQPRTFLLKYNENGTITDAVDCALDPLSETKCTLKSFTVEKGIYQTSNFRVQPTESIVRFPNITNLCPFGEVFNATRFASVYAWNRKRISNCVADYSVLYNSASFSTFKCYGVSPTKLNDLCFTNVYADSFVIRGDEVRQIAPGQTGKIADYNYKLPDDFTGCVIAWNSNNLDSKVGGNYNYLYRLFRKSNLKPFERDISTEIYQAGSTPCNGVEGFNCYFPLQSYGFQPTNGVGYQPYRVVVLSFELLHAPATVCGPKKSTNLVKNKCVNFNFNGLTGTGVLTESNKKFLPFQQFGRDIADTTDAVRDPQTLEILDITPCSFGGVSVITPGTNTSNQVAVLYQGVNCTEVPVAIHADQLTPTWRVYSTGSNVFQTRAGCLIGAEHVNNSYECDIPIGAGICASYQTQTNSPRRARSVASQSIIAYTMSLGAENSVAYSNNSIAICTNFTISVTTEILPVSMTKTSVDCTMYICGDSTECSNLLLQYGSFCTQLNRALTGIAVEQDKNTQEVFAQVKQIYKTPPIKDFGGFNFSQILPDPSKPSKRSFIEDLLFNKVTLADAGFIKQYGDCLGDIAARDLICAQKFNGLTVLPPLLTDEMIAQYTSALLAGTITSGWTFGAGAALQIPFAMQMAYRFNGIGVTQNVLYENQKLIANQFNSAIGKIQDSLFSTASALGKLQDVVNQNAQALNTLVKQLSSNFGAISSVLNDILSRLDKVEAEVQIDRLITGRLQSLQTYVTQQLIRAAEIRASANLAATKMSECVLGQSKRVDFCGKGYHLMSFPQSAPHGVVFLHVTYVCAQEKNFTTAPAICHDGKAHFPREGVFVSNGTHWFVTQRNFYEPQIITTDNTFVSGNCDVVIGIVNNTVYDPLQPELDSFKEELDKYFKNHTSPDVDLGDISGINASVVNIQKEIDRLNEVAKNLNESLIDLQELGKYEQYIKGGSGYIPEAPRDGQAYVRKDGEWVLLSTFL

SEQ ID NO: 6135 - protein, 1241 aa, Artificial Sequence
  SARS-CoV-2/Finland/FIN-313/2020__EPI_ISL_414641 spike protein (1-1211)(P715C_P1069C) Foldon construct
MFVFLVLLPLVSSQCVNLTTRTQLPPAYTNSFTRGVYYPDKVFRSSVLHSTQDLFLPFFSNVTWFHAIHVSGTNGTKRFDNPVLPFNDGVYFASTEKSNIIRGWIFGTTLDSKTQSLLIVNNATNVVIKVCEFQFCNDPFLGVYYHKNNKSWMESEFRVYSSANNCTFEYVSQPFLMDLEGKQGNFKNLREFVFKNIDGYFKIYSKHTPINLVRDLPQGFSALEPLVDLPIGINITRFKTLLALHRSYLTPGDSSSGWTAGAAAYYVGYLQPRTFLLKYNENGTITDAVDCALDPLSETKCTLKSFTVEKGIYQTSNFRVQPTESIVRFPNITNLCPFGEVFNATRFASVYAWNRKRISNCVADYSVLYNSASFSTFKCYGVSPTKLNDLCFTNVYADSFVIRGDEVRQIAPGQTGKIADYNYKLPDDFTGCVIAWNSNNLDSKVGGNYNYLYRLFRKSNLKPFERDISTEIYQAGSTPCNGVEGFNCYFPLQSYGFQPTNGVGYQPYRVVVLSFELLHAPATVCGPKKSTNLVKNKCVNFNFNGLTGTGVLTESNKKFLPFQQFGRDIADTTDAVRDPQTLEILDITPCSFGGVSVITPGTNTSNQVAVLYQGVNCTEVPVAIHADQLTPTWRVYSTGSNVFQTRAGCLIGAEHVNNSYECDIPIGAGICASYQTQTNSPRRARSVASQSIIAYTMSLGAENSVAYSNNSIAICTNFTISVTTEILPVSMTKTSVDCTMYICGDSTECSNLLLQYGSFCTQLNRALTGIAVEQDKNTQEVFAQVKQIYKTPPIKDFGGFNFSQILPDPSKPSKRSFIEDLLFNKVTLADAGFIKQYGDCLGDIAARDLICAQKFNGLTVLPPLLTDEMIAQYTSALLAGTITSGWTFGAGAALQIPFAMQMAYRFNGIGVTQNVLYENQKLIANQFNSAIGKIQDSLSSTASALGKLQDVVNQNAQALNTLVKQLSSNFGAISSVLNDILSRLDKVEAEVQIDRLITGRLQSLQTYVTQQLIRAAEIRASANLAATKMSECVLGQSKRVDFCGKGYHLMSFPQSAPHGVVFLHVTYVCAQEKNFTTAPAICHDGKAHFPREGVFVSNGTHWFVTQRNFYEPQIITTDNTFVSGNCDVVIGIVNNTVYDPLQPELDSFKEELDKYFKNHTSPDVDLGDISGINASVVNIQKEIDRLNEVAKNLNESLIDLQELGKYEQYIKGGSGYIPEAPRDGQAYVRKDGEWVLLSTFL

SEQ ID NO: 6136 - protein, 1241 aa, Artificial Sequence
  SARS-CoV-2/Netherlands/ZuidHolland_2/2020__EPI_ISL_414556 spike protein (1-1211)(P715C_P1069C) Foldon construct
MFVFLVLLPLVSSQCVNLTTRTQLPPAYTNSFTRGVYYPDKVFRSSVLHSTQDLFLPFFSNVTWFHAIHVSGTNGTKRFDNPVLPFNDGVYFASTEKSNIIRGWIFGTTLDSKTQSLLIVNNATNVVIKVCEFQFCNDPFLGVYYHKNNKSWMESEFRVYSSANNCTFEYVSQPFLMDLEGKQGNFKNLREFVFKNIDGYFKIYSKHTPINLVRDLPQGFSALEPLVDLPIGINITRFQTLLALHRSYLTPGDSSSGWTAGAAAYYVGYLQPRTFLLKYNENGTITDAVDCALDPLSETKCTLKSFTVEKGIYQTSNFRVQPTESIVRFPNITNLCPFGEVFNATRFASVYAWNRKRISNCVADYSVLYNSASFSTFKCYGVSPTKLNDLCFTNVYADSFVIRGDEVRQIAPGQTGKIADYNYKLPDDFTGCVIAWNSNNLDSKVGGNYNYLYRLFRKSNLKPFERDISTEIYQAGSTPCNGVEGFNCYFPLQSYGFQPTNGVGYQPYRVVVLSFELLHAPATVCGPKKSTNLVKNKCVNFNFNGLTGTGVLTESNKKFLPFQQFGRDIADTTDAVRDPQTLEILDITPCSFGGVSVITPGTNTSNQVAVLYQGVNCTEVPVAIHADQLTPTWRVYSTGSNVFQTRAGCLIGAEHVNNSYECDIPIGAGICASYQTQTNSPRRARSVASQSIIAYTMSLGAENSVAYSNNSIAICTNFTISVTTEILPVSMTKTSVDCTMYICGDSTECSNLLLQYGSFCTQLNRALTGIALEQDKNTQEVFAQVKQIYKTPPIKDFGGFNFSQILPDPSKPSKRSFIEDLLFNKVTLADAGFIKQYGDCLGDIAARDLICAQKFNGLTVLPPLLTDEMIAQYTSALLAGTITSGWTFGAGAALQIPFAMQMAYRFNGIGVTQNVLYENQKLIANQFNSAIGKIQDSLSSTASALGKLQDVVNQNAQALNTLVKQLSSNFGAISSVLNDILSRLDKVEAEVQIDRLITGRLQSLQTYVTQQLIRAAEIRASANLAATKMSECVLGQSKRVDFCGKGYHLMSFPQSAPHGVVFLHVTYVCAQEKNFTTAPAICHDGKAHFPREGVFVSNGTHWFVTQRNFYEPQIITTDNTFVSGNCDVVIGIVNNTVYDPLQPELDSFKEELDKYFKNHTSPDVDLGDISGINASVVNIQKEIDRLNEVAKNLNESLIDLQELGKYEQYIKGGSGYIPEAPRDGQAYVRKDGEWVLLSTFL

SEQ ID NO: 6137 - protein, 1241 aa, Artificial Sequence
  SARS-CoV-2/USA/WA-UW31/2020__EPI_ISL_414618 spike protein (1-1211)(P715C_P1069C) Foldon construct
MFVFLVLLPLVSSQCVNLTTRTQLPPAYTNSFTRGVYYPDKVFRSSVLHSTQDLFLPFFSNVTWFHAIHVSGTNGTKRFDNPVLPFNDGVYFASTEKSNIIRGWIFGTTLDSKTQSLLIVNNATNVVIKVCEFQFCNDPFLGVYYHKNNKSWMESEFRVYSSANNCTFEYVSQPFLMDLEGKQGNFKNLREFVFKNIDGYFKIYSKHTPINLVRDLPQGFSALEPLVDLPIGINITRFQTLLALHRSYLTPGDSSSGWTAGAAAYYVGYLQPRTFLLKYNENGTITDAVDCALDPLSETKCTLKSFTVEKGIYQTSNFRVQPTESIVRFPNITNLCPFGEVFNATRFASVYAWNRKRISNCVADYSVLYNSASFSTFKCYGVSPTKLNDLCFTNVYADSFVIRGDEVRQIAPGQTGKIADYNYKLPDDFTGCVIAWNSNNLDSKVGGNYNYLYRLFRKSNLKPFERDISTEIYQAGSTPCNGAEGFNCYFPLQSYGFQPTNGVGYQPYRVVVLSFELLHAPATVCGPKKSTNLVKNKCVNFNFNGLTGTGVLTESNKKFLPFQQFGRDIADTTDAVRDPQTLEILDITPCSFGGVSVITPGTNTSNQVAVLYQDVNCTEVPVAIHADQLTPTWRVYSTGSNVFQTRAGCLIGAEHVNNSYECDIPIGAGICASYQTQTNSPRRARSVASQSIIAYTMSLGAENSVAYSNNSIAICTNFTISVTTEILPVSMTKTSVDCTMYICGDSTECSNLLLQYGSFCTQLNRALTGIAVEQDKNTQEVFAQVKQIYKTPPIKDFGGFNFSQILPDPSKPSKRSFIEDLLFNKVTLADAGFIKQYGDCLGDIAARDLICAQKFNGLTVLPPLLTDEMIAQYTSALLAGTITSGWTFGAGAALQIPFAMQMAYRFNGIGVTQNVLYENQKLIANQFNSAIGKIQDSLSSTASALGKLQDVVNQNAQALNTLVKQLSSNFGAISSVLNDILSRLDKVEAEVQIDRLITGRLQSLQTYVTQQLIRAAEIRASANLAATKMSECVLGQSKRVDFCGKGYHLMSFPQSAPHGVVFLHVTYVCAQEKNFTTAPAICHDGKAHFPREGVFVSNGTHWFVTQRNFYEPQIITTDNTFVSGNCDVVIGIVNNTVYDPLQPELDSFKEELDKYFKNHTSPDVDLGDISGINASVVNIQKEIDRLNEVAKNLNESLIDLQELGKYEQYIKGGSGYIPEAPRDGQAYVRKDGEWVLLSTFL

SEQ ID NO: 6138 - protein, 1241 aa, Artificial Sequence
  SARS-CoV-2/South Korea/SNU01/2020__EPI_ISL_411929 spike protein (1-1211)(P715C_P1069C) Foldon construct
MFVFLVLLPLVSSQCVNLTTRTQLPPAYTNSFTRGVYYPDKVFRSSVLHSTQDLFLPFFSNVTWFHAIHVSGTNGTKRFDNPVLPFNDGVYFASTEKSNIIRGWIFGTTLDSKTQSLLIVNNATNVVIKVCEFQFCNDPFLGVYYHKNNKSWMESEFRVYSSANNCTFEYVSQPFLMDLEGKQGNFKNLREFVFKNIDGYFKIYSKHTPINLVRDLPQGFWALEPLVDLPIGINITRFQTLLALHRSYLTPGDSSSGWTAGAAAYYVGYLQPRTFLLKYNENGTITDAVDCALDPLSETKCTLKSFTVEKGIYQTSNFRVQPTESIVRFPNITNLCPFGEVFNATRFASVYAWNRKRISNCVADYSVLYNSASFSTFKCYGVSPTKLNDLCFTNVYADSFVIRGDEVRQIAPGQTGKIADYNYKLPDDFTGCVIAWNSNNLDSKVGGNYNYLYRLFRKSNLKPFERDISTEIYQAGSTPCNGVEGFNCYFPLQSYGFQPTNGVGYQPYRVVVLSFELLHAPATVCGPKKSTNLVKNKCVNFNFNGLTGTGVLTESNKKFLPFQQFGRDIADTTDAVRDPQTLEILDITPCSFGGVSVITPGTNTSNQVAVLYQDVNCTEVPVAIHADQLTPTWRVYSTGSNVFQTRAGCLIGAEHVNNSYECDIPIGAGICASYQTQTNSPRRARSVASQSIIAYTMSLGAENSVAYSNNSIAICTNFTISVTTEILPVSMTKTSVDCTMYICGDSTECSNLLLQYGSFCTQLNRALTGIAVEQDKNTQEVFAQVKQIYKTPPIKDFGGFNFSQILPDPSKPSKRSFIEDLLFNKVTLADAGFIKQYGDCLGDIAARDLICAQKFNGLTVLPPLLTDEMIAQYTSALLAGTITSGWTFGAGAALQIPFAMQMAYRFNGIGVTQNVLYENQKLIANQFNSAIGKIQDSLSSTASALGKLQDVVNQNAQALNTLVKQLSSNFGAISSVLNDILSRLDKVEAEVQIDRLITGRLQSLQTYVTQQLIRAAEIRASANLAATKMSECVLGQSKRVDFCGKGYHLMSFPQSAPHGVVFLHVTYVCAQEKNFTTAPAICHDGKAHFPREGVFVSNGTHWFVTQRNFYEPQIITTDNTFVSGNCDVVIGIVNNTVYDPLQPELDSFKEELDKYFKNHTSPDVDLGDISGINASVVNIQKEIDRLNEVAKNLNESLIDLQELGKYEQYIKGGSGYIPEAPRDGQAYVRKDGEWVLLSTFL

SEQ ID NO: 6139 - protein, 1241 aa, Artificial Sequence
  SARS-CoV-2/China/WF0004/2020__EPI_ISL_413694 spike protein (1-1211)(P715C_P1069C) Foldon construct
MFVFLVLLPLVSSQCVNLTTRTQLPPAYTNSFTRGVYYPDKVFRSSVLHSTQDLFLPFFSNVTWFHAIHVSGTNGTKRFDNPVLPFNDGVYFASTEKSNIIRGWIFGTTLDSKTQSLLIVNNATNVVIKVCEFQFCNDPFLGVYYHKNNKSWTESEFRVYSSANNCTFEYVSQPFLMDLEGKQGNFKNLREFVFKNIDGYFKIYSKHTPINLVRDLPQGFSALEPLVDLPIGINITRFQTLLALHRSYLTPGDSSSGWTAGAAAYYVGYLQPRTFLLKYNENGTITDAVDCALDPLSETKCTLKSFTVEKGIYQTSNFRVQPTESIVRFPNITNLCPFGEVFNATRFASVYAWNRKRISNCVADYSVLYNSASFSTFKCYGVSPTKLNDLCFTNVYADSFVIRGDEVRQIAPGQTGKIADYNYKLPDDFTGCVIAWNSNNLDSKVGGNYNYLYRLFRKSNLKPFERDISTEIYQAGSTPCNGVEGFNCYFPLQSYGFQPTNGVGYQPYRVVVLSFELLHAPATVCGPKKSTNLVKNKCVNFNFNGLTGTGVLTESNKKFLPFQQFGRDIADTTDAVRDPQTLEILDITPCSFGGVSVITPGTNTSNQVAVLYQDVNCTEVPVAIHADQLTPTWRVYSTGSNVFQTRAGCLIGAEHVNNSYECDIPIGAGICASYQTQTNSPRRARSVASQSIIAYTMSLGAENSVAYSNNSIAICTNFTISVTTEILPVSMTKTSVDCTMYICGDSTECSNLLLQYGSFCTQLNRALTGIAVEQDKNTQEVFAQVKQIYKTPPIKDFGGFNFSQILPDPSKPSKRSFIEDLLFNKVTLADAGFIKQYGDCLGDIAARDLICAQKFNGLTVLPPLLTDEMIAQYTSALLAGTITSGWTFGAGAALQIPFAMQMAYRFNGIGVTQNVLYENQKLIANQFNSAIGKIQDSLSSTASALGKLQDVVNQNAQALNTLVKQLSSNFGAISSVLNDILSRLDKVEAEVQIDRLITGRLQSLQTYVTQQLIRAAEIRASANLAATKMSECVLGQSKRFDFCGKGYHLMSFPQSAPHGVVFLHVTYVCAQEKNFTTAPAICHDGKAHFPREGVFVSNGTHWFVTQRNFYEPQIITTDNTFVSGNCDVVIGIVNNTVYDPLQPELDSFKEELDKYFKNHTSPDVDLGDISGINASVVNIQKEIDRLNEVAKNLNESLIDLQELGKYEQYIKGGSGYIPEAPRDGQAYVRKDGEWVLLSTFL

SEQ ID NO: 6140 - protein, 1241 aa, Artificial Sequence
  SARS-CoV-2/China/WF0028/2020__EPI_ISL_413791 spike protein (1-1211)(P715C_P1069C) Foldon construct
MFVFLVLLPLVSSQCVNLTTRTQLPPAYTNSFTRGVYYPDKVFRSSVLHSTQDLFLPFFSNVTWFHAIHVSGTNGTKRFDNPVLPFNDGVYFASTEKSNIIRGWIFGTTLDSKTQSLLIVNNATNVVIKVCEFQFCNDPFLGVYYHKNNKSWMESEFRVYSSANNCTFEYVSQPFLMDLEGKQGNFKNLREFVFKNIDGYFKIYSKHTPINLVRDLPQGFSALEPLVDLPIGINITRFQTLLALHRSYLTPGDSSSGWTAGAAAYYVGYLQPRTFLLKYNENGTITDAVDCALDPLSETKCTLKSFTVEKGIYQTSNFRVQPTESIVRFPNITNLCPFGEVFNATRFASVYAWNRKRISNCVADYSVLYNSASFSTFKCYGVSPTKLNDLCFTNVYADSFVIRGDEVRQIAPGQTGKIADYNYKLPDDFTGCVIAWNSNNLDSKVGGNYNYLYRLFRKSNLKPFERDISTEIYQAGSTPCNGVEGFNCYFPLQSYGFQPTNGVGYQPYRVVVLSFELLHAPATVCGPKKSTNLVKNKCVNFNFNGLTGTGVLTESNKKFLPFQQFGRDIADTTDAVRDPQTLEILDITPCSFGGVSVITPGTNTSNQVAVLYQDVNCTEVPVAIHADQLTPTWRVYSTGSNVFQTRAGCLIGAEHVNNSYECDIPIGAGICASYQTQTNSPRRARSVASQSIIAYTMSLGAENSVAYSNNSIAICTNFTISVTTEILPVSMTKTSVDCTMYICGDSTECSNLLLQYGSFCTQLNRALTGIAVEQDKNTQEVFAQVKQIYKTPPIKDFGGFNFSQILPDPSKPSKRSFIEDLLFNKVTLADAGFIKQYGDCLGDIAARDLICAQKFNGLTVLPPLLTDEMIAQYTSALLAGTITSGWTFGAGAALQIPFAMQMAYRFNGIGVTQNVLYENQKLIANQFNSAIGKIQDSLSSTASALGKLQDVVNQNAQALNTLVKQLSSNFGAISSVLNDILSRLDKVEAEVQIDRLITGRLQSLQTYVTQQLIRAAEIRASANLAATKMSECVLGQSKRVDFCGKGYHLMSFPQSAPHGVVFLHVTYVCAQEKNFTTAPAICHDGKAHFPREGVFVSNGTHWFVTQRNFYEPQIITTDNTFVSGNCDVVIGIVNNTVYDPLQPELESFKEELDKYFKNHTSPDVDLGDISGINASVVNIQKEIDRLNEVAKNLNESLIDLQELGKYEQYIKGGSGYIPEAPRDGQAYVRKDGEWVLLSTFL

SEQ ID NO: 6141 - protein, 1241 aa, Artificial Sequence
  SARS-CoV-2/2019-nCoV/USA-CruiseA-18/2020__MT159716.1 spike protein (1-1211)(P715C_P1069C) Foldon construct
MFVFLVLLPLVSSQCVNLTTRTQLPPAYTNSFTRGVYYPDKVFRSSVLHSTQDLFLPFFSNVTWFHAIHVSGTNGTKRFDNPVLPFNDGVYFASTEKSNIIRGWIFGTTLDSKTQSLLIVNNATNVVIKVCEFQFCNDPFLGVYYHKNNKSWMESELRVYSSANNCTFEYVSQPFLMDLEGKQGNFKNLREFVFKNIDGYFKIYSKHTPINLVRDLPQGFSALEPLVDLPIGINITRFQTLLALHRSYLTPGDSSSGWTAGAAAYYVGYLQPRTFLLKYNENGTITDAVDCALDPLSETKCTLKSFTVEKGIYQTSNFRVQPTESIVRFPNITNLCPFGEVFNATRFASVYAWNRKRISNCVADYSVLYNSASFSTFKCYGVSPTKLNDLCFTNVYADSFVIRGDEVRQIAPGQTGKIADYNYKLPDDFTGCVIAWNSNNLDSKVGGNYNYLYRLFRKSNLKPFERDISTEIYQAGSTPCNGVEGFNCYFPLQSYGFQPTNGVGYQPYRVVVLSFELLHAPATVCGPKKSTNLVKNKCVNFNFNGLTGTGVLTESNKKFLPFQQFGRDIADTTDAVRDPQTLEILDITPCSFGGVSVITPGTNTSNQVAVLYQDVNCTEVPVAIHADQLTPTWRVYSTGSNVFQTRAGCLIGAEHVNNSYECDIPIGAGICASYQTQTNSPRRARSVASQSIIAYTMSLGAENSVAYSNNSIAICTNFTISVTTEILPVSMTKTSVDCTMYICGDSTECSNLLLQYGSFCTQLNRALTGIAVEQDKNTQEVFAQVKQIYKTPPIKDFGGFNFSQILPDPSKPSKRSFIEDLLFNKVTLADAGFIKQYGDCLGDIAARDLICAQKFNGLTVLPPLLTDEMIAQYTSALLAGTITSGWTFGAGAALQIPFAMQMAYRFNGIGVTQNVLYENQKLIANQFNSAIGKIQDSLSSTASALGKLQDVVNQNAQALNTLVKQLSSNFGAISSVLNDILSRLDKVEAEVQIDRLITGRLQSLQTYVTQQLIRAAEIRASANLAATKMSECVLGQSKRVDFCGKGYHLMSFPQSAPHGVVFLHVTYVCAQEKNFTTAPAICHDGKAHFPREGVFVSNGTHWFVTQRNFYEPQIITTDNTFVSGNCDVVIGIVNNTVYDPLQPELDSFKEELDKYFKNHTSPDVDLGDISGINASVVNIQKEIDRLNEVAKNLNESLIDLQELGKYEQYIKGGSGYIPEAPRDGQAYVRKDGEWVLLSTFL

SEQ ID NO: 6142 - protein, 1241 aa, Artificial Sequence
  SARS-CoV-2/SARS-CoV-2/Yunnan-01/human/2020/CHN__MT049951.1 spike protein (1-1211)(P715C_P1069C) Foldon construct
MFVFLVLLPLVSSQCVNLTTRTQLPPANTNSFTRGVYYPDKVFRSSVLHSTQDLFLPFFSNVTWFHAIHVSGTNGTKRFDNPVLPFNDGVYFASTEKSNIIRGWIFGTTLDSKTQSLLIVNNATNVVIKVCEFQFCNDPFLGVYYHKNNKSWMESEFRVYSSANNCTFEYVSQPFLMDLEGKQGNFKNLREFVFKNIDGYFKIYSKHTPINLVRDLPQGFSALEPLVDLPIGINITRFQTLLALHRSYLTPGDSSSGWTAGAAAYYVGYLQPRTFLLKYNENGTITDAVDCALDPLSETKCTLKSFTVEKGIYQTSNFRVQPTESIVRFPNITNLCPFGEVFNATRFASVYAWNRKRISNCVADYSVLYNSASFSTFKCYGVSPTKLNDLCFTNVYADSFVIRGDEVRQIAPGQTGKIADYNYKLPDDFTGCVIAWNSNNLDSKVGGNYNYLYRLFRKSNLKPFERDISTEIYQAGSTPCNGVEGFNCYFPLQSYGFQPTNGVGYQPYRVVVLSFELLHAPATVCGPKKSTNLVKNKCVNFNFNGLTGTGVLTESNKKFLPFQQFGRDIADTTDAVRDPQTLEILDITPCSFGGVSVITPGTNTSNQVAVLYQDVNCTEVPVAIHADQLTPTWRVYSTGSNVFQTRAGCLIGAEHVNNSYECDIPIGAGICASYQTQTNSPRRARSVASQSIIAYTMSLGAENSVAYSNNSIAICTNFTISVTTEILPVSMTKTSVDCTMYICGDSTECSNLLLQYGSFCTQLNRALTGIAVEQDKNTQEVFAQVKQIYKTPPIKDFGGFNFSQILPDPSKPSKRSFIEDLLFNKVTLADAGFIKQYGDCLGDIAARDLICAQKFNGLTVLPPLLTDEMIAQYTSALLAGTITSGWTFGAGAALQIPFAMQMAYRFNGIGVTQNVLYENQKLIANQFNSAIGKIQDSLSSTASALGKLQDVVNQNAQALNTLVKQLSSNFGAISSVLNDILSRLDKVEAEVQIDRLITGRLQSLQTYVTQQLIRAAEIRASANLAATKMSECVLGQSKRVDFCGKGYHLMSFPQSAPHGVVFLHVTYVCAQEKNFTTAPAICHDGKAHFPREGVFVSNGTHWFVTQRNFYEPQIITTDNTFVSGNCDVVIGIVNNTVYDPLQPELDSFKEELDKYFKNHTSPDVDLGDISGINASVVNIQKEIDRLNEVAKNLNESLIDLQELGKYEQYIKGGSGYIPEAPRDGQAYVRKDGEWVLLSTFL

SEQ ID NO: 6143 - protein, 1241 aa, Artificial Sequence
  SARS-CoV-2/USA/WA-UW292/2020__EPI_ISL_418077 spike protein (1-1211)(P715C_P1069C) Foldon construct
MFVFLVLLPLVSSQCVNLTTRTQLPPAYTNSFTRGVYYPDKVFRSSVLHSTQDLFLPFFSNVTWFHAIHVSGTNGTKRFDNPVLPFNDGVYFASTEKSNIIRGWIFGTTLDSKTQSLLIVNNATNVVIKVCEFQFCNDPFLGVYYHKNNKSWMESEFRVYSSANNCTFEYVSQPFLMDLEGKQGNFKNLREFVFKNIDGYFKIYSKHTPINLVRDLPQGFSALEPLVDLPIGINITRFQTLLALHRSYLTPGDSSSGWTAGAAAYYVGYLQPRTFLLKYNENGTITDAVDCALDPLSETKCTLKSFTVEKGIYQTSNFRVQPTESIVRFPNITNLCPFGEVFNATRFASVYAWNRKRISNCVADYSVLYNSASFSTFKCYGVSPTKLNDLCFTNVYADSFVIRGDEVRQIAPGQTGKIADYNYKLPDDFTGCVIAWNSNNLDSKVGGNYNYLYRLFRKSNLKPFERDISTEIYQASSTPCNGVEGFNCYFPLQSYGFQPTNGVGYQPYRVVVLSFELLHAPATVCGPKKSTNLVKNKCVNFNFNGLTGTGVLTESNKKFLPFQQFGRDIADTTDAVRDPQTLEILDITPCSFGGVSVITPGTNTSNQVAVLYQDVNCTEVPVAIHADQLTPTWRVYSTGSNVFQTRAGCLIGAEHVNNSYECDIPIGAGICASYQTQTNSPRRARSVASQSIIAYTMSLGAENSVAYSNNSIAICTNFTISVTTEILPVSMTKTSVDCTMYICGDSTECSNLLLQYGSFCTQLNRALTGIAVEQDKNTQEVFAQVKQIYKTPPIKDFGGFNFSQILPDPSKPSKRSFIEDLLFNKVTLADAGFIKQYGDCLGDIAARDLICAQKFNGLTVLPPLLTDEMIAQYTSALLAGTITSGWTFGAGAALQIPFAMQMAYRFNGIGVTQNVLYENQKLIANQFNSAIGKIQDSLSSTASALGKLQDVVNQNAQALNTLVKQLSSNFGAISSVLNDILSRLDKVEAEVQIDRLITGRLQSLQTYVTQQLIRAAEIRASANLAATKMSECVLGQSKRVDFCGKGYHLMSFPQSAPHGVVFLHVTYVCAQEKNFTTAPAICHDGKAHFPREGVFVSNGTHWFVTQRNFYEPQIITTDNTFVSGNCDVVIGIVNNTVYDPLQPELDSFKEELDKYFKNHTSPDVDLGDISGINASVVNIQKEIDRLNEVAKNLNESLIDLQELGKYEQYIKGGSGYIPEAPRDGQAYVRKDGEWVLLSTFL

SEQ ID NO: 6144 - protein, 1241 aa, Artificial Sequence
  SARS-CoV-2/Iceland/192/2020__EPI_ISL_417819 spike protein (1-1211)(P715C_P1069C) Foldon construct
MFVFFVLLPLVSSQCVNLTTRTQLPPAYTNSFTRGVYYPDKVFRSSVLHSTQDLFLPFFSNVTWFHAIHVSGTNGTKRFDNPVLPFNDGVYFASTEKSNIIRGWIFGTTLDSKTQSLLIVNNATNVVIKVCEFQFCNDPFLGVYYHKNNKSWMESEFRVYSSANNCTFEYVSQPFLMDLEGKQGNFKNLREFVFKNIDGYFKIYSKHTPINLVRDLPQGFSALEPLVDLPIGINITRFQTLLALHRSYLTPGDSSSGWTAGAAAYYVGYLQPRTFLLKYNENGTITDAVDCALDPLSETKCTLKSFTVEKGIYQTSNFRVQPTESIVRFPNITNLCPFGEVFNATRFASVYAWNRKRISNCVADYSVLYNSASFSTFKCYGVSPTKLNDLCFTNVYADSFVIRGDEVRQIAPGQTGKIADYNYKLPDDFTGCVIAWNSNNLDSKVGGNYNYLYRLFRKSNLKPFERDISTEIYQAGSTPCNGVEGFNCYFPLQSYGFQPTNGVGYQPYRVVVLSFELLHAPATVCGPKKSTNLVKNKCVNFNFNGLTGTGVLTESNKKFLPFQQFGRDIADTTDAVRDPQTLEILDITPCSFGGVSVITPGTNTSNQVAVLYQGVNCTEVPVAIHADQLTPTWRVYSTGSNVFQTRAGCLIGAEHVNNSYECDIPIGAGICASYQTQTNSPRRARSVASQSIIAYTMSLGAENSVAYSNNSIAICTNFTISVTTEILPVSMTKTSVDCTMYICGDSTECSNLLLQYGSFCTQLNRALTGIAVEQDKNTQEVFAQVKQIYKTPPIKDFGGFNFSQILPDPSKPSKRSFIEDLLFNKVTLADAGFIKQYGDCLGDIAARDLICAQKFNGLTVLPPLLTDEMIAQYTSALLAGTITSGWTFGAGAALQIPFAMQMAYRFNGIGVTQNVLYENQKLIANQFNSAIGKIQDSLSSTASALGKLQDVVNQNAQALNTLVKQLSSNFGAISSVLNDILSRLDKVEAEVQIDRLITGRLQSLQTYVTQQLIRAAEIRASANLAATKMSECVLGQSKRVDFCGKGYHLMSFPQSAPHGVVFLHVTYVCAQEKNFTTAPAICHDGKAHFPREGVFVSNGTHWFVTQRNFYEPQIITTDNTFVSGNCDVVIGIVNNTVYDPLQPELDSFKEELDKYFKNHTSPDVDLGDISGINASVVNIQKEIDRLNEVAKNLNESLIDLQELGKYEQYIKGGSGYIPEAPRDGQAYVRKDGEWVLLSTFL

SEQ ID NO: 6145 - protein, 1241 aa, Artificial Sequence
  SARS-CoV-2/Belgium/ULG-6939/2020__EPI_ISL_417020 spike protein (1-1211)(P715C_P1069C) Foldon construct
MFVFLVLLPLVSSQCVNLTTRTQLPPAYTNSFTRGVYYPDKVFRSSVLHSTQDLFLPFFSNVTWFHAIHVSGTNGTKRFDNPVLPFNDGVYFASTEKSNIIRGWIFGTTLDSKTQSLLIVNNATNVVIKVCEFQFCNDPFLGVYYHKNNKSWMESEFRVYSSANNCTFEYVSQPFLMDLEGKQGNFKNLREFVFKNIDGYFKIYSKHTPINLVRDLPQGFSALEPLVDLPIGINITRFQTLLALHRSYLTPGDSSSGWTAGAAAYYVGYLQPRTFLLKYNENGTITDAVDCALDPLSETKCTLKSFTVEKGIYQTSNFRVQPTESIVRFPNITNLCPFGEVFNATRFASVYAWNRKRISNCVADYSVLYNSASFSTFKCYGVSPTKLNDLCFTNVYADSFVIRGDEVRQIAPGQTGKIADYNYKLPDDFTGCVIAWNSNNLDSKVGGNYNYLYRLFRKSNLKPFERDISTEIYQAGSTPCNGVEGFNCYFPLQSYGFQPTNGVGYQPYRVVVLSFELLHAPATVCGPKKSTNLVKNKCVNFNFNGLTGTGVLTESNKKFLPFQQFGRDIADTTDAVRDPQTLEILDITPCSFGGVSVITPGTNTSNQVAVLYQGVNCTEVPVAIHADQLTPTWRVYSTGSNVFQTRAGCLIGAEHVNNSYECDIPIGAGICASYQTQTNSPRRARSVASQSIIAYTMSLGAENSVVYSNNSIAICTNFTISVTTEILPVSMTKTSVDCTMYICGDSTECSNLLLQYGSFCTQLNRALTGIAVEQDKNTQEVFAQVKQIYKTPPIKDFGGFNFSQILPDPSKPSKRSFIEDLLFNKVTLADAGFIKQYGDCLGDIAARDLICAQKFNGLTVLPPLLTDEMIAQYTSALLAGTITSGWTFGAGAALQIPFAMQMAYRFNGIGVTQNVLYENQKLIANQFNSAIGKIQDSLSSTASALGKLQDVVNQNAQALNTLVKQLSSNFGAISSVLNDILSRLDKVEAEVQIDRLITGRLQSLQTYVTQQLIRAAEIRASANLAATKMSECVLGQSKRVDFCGKGYHLMSFPQSAPHGVVFLHVTYVCAQEKNFTTAPAICHDGKAHFPREGVFVSNGTHWFVTQRNFYEPQIITTDNTFVSGNCDVVIGIVNNTVYDPLQPELDSFKEELDKYFKNHTSPDVDLGDISGINASVVNIQKEIDRLNEVAKNLNESLIDLQELGKYEQYIKGGSGYIPEAPRDGQAYVRKDGEWVLLSTFL

SEQ ID NO: 6146 - protein, 1241 aa, Artificial Sequence
  SARS-CoV-2/France/HF2496/2020__EPI_ISL_418231 spike protein (1-1211)(P715C_P1069C) Foldon construct
MFVFLVLLPLVSSQCVNLTTRTQLPPAYTNSFTRGVYYPDKVFRSSVLHSTQDLFLPFFSNVTWFHAIHVSGTNGTKRFDNPVLPFNDGVYFASTEKSNIIRGWIFGTTLDSKTQSLLIVNNATNVVIKVCEFQFCNDPFLGVYYHKNNKSWMESEFRVYSSANNCTFEYVSQPFLMDLEGKQGNFKNLREFVFKNIDGYFKIYSKHTPINLVRDLPQGFSALEPLVDLPIGINITRFQTLLALHRSYLTPGDSSSGWTAGAAAYYVGYLQPRTFLLKYNENGTITDAVDCALDPLSETKCTLKSFTVEKGIYQTSNFRVQPTESIVRFPNITNLCPFGEVFNATRFASVYAWNRKRISNCVADYSVLYNSASFSTFKCYGVSPTKLNDLCFTNVYADSFVIRGDEVRQIAPGQTGKIADYNYKLPDDFTGCVIAWNSNNLDSKVGGNYNYLYRLFRKSNLKPFERDISTEIYQAGSTPCNGVEGFNCYFPLQSYGFQPTNGVGYQPYRVVVLSFELLHAPATVCGPKKSTNLVKNKCVNFNFNGLTGTGVLTESNKKFLPFQQFGRDIADTTDAVRDPQTLEILDITPCSFGGVSVITPGTNTSNQVAVLYQGVNCTEVPVAIHADQLTPTWRVYSTGSNVFQTRAGCLIGAEHVNNSYECDIPIGAGICASYQTQTNSPRRARSVASQSIIAYTMSLGAENSVAYSNNSIAICTNFTISVTTEILPVSMTKTSVDCTMYICGDSTECSNLLLQYGSFCTQLNRALTGIAVEQDKNTQEVFAQVKQIYKTPPIKDFGGFNFSQILPDPSKPSKRSFIEDLLFNKVTLADAGFIKQYGDCLGDIVARDLICAQKFNGLTVLPPLLTDEMIAQYTSALLAGTITSGWTFGAGAALQIPFAMQMAYRFNGIGVTQNVLYENQKLIANQFNSAIGKIQDSLSSTASALGKLQDVVNQNAQALNTLVKQLSSNFGAISSVLNDILSRLDKVEAEVQIDRLITGRLQSLQTYVTQQLIRAAEIRASANLAATKMSECVLGQSKRVDFCGKGYHLMSFPQSAPHGVVFLHVTYVCAQEKNFTTAPAICHDGKAHFPREGVFVSNGTHWFVTQRNFYEPQIITTDNTFVSGNCDVVIGIVNNTVYDPLQPELDSFKEELDKYFKNHTSPDVDLGDISGINASVVNIQKEIDRLNEVAKNLNESLIDLQELGKYEQYIKGGSGYIPEAPRDGQAYVRKDGEWVLLSTFL

SEQ ID NO: 6147 - protein, 1241 aa, Artificial Sequence
  SARS-CoV-2/USA/WA-UW291/2020__EPI_ISL_418076 spike protein (1-1211)(P715C_P1069C) Foldon construct
MFVFLVLLPLVSSQCVNLTTRTQLPPAYTNSFTRGVYYPDKVFRSSVLHSTQDLFLPFFSNVTWFHAIHVSGTNGTKRFDNPVLPFNDGVYFASTEKSNIIRGWIFGTTLDSKTQSLLIVNNATNVVIKVCEFQFCNDPFLGVYYHKNNKSWMESEFRVYSSANNCTFEYVSQPFLMDLEGKQGNFKNLREFVFKNIDGYFKIYSKHTPINLVRDLPQGFSALEPLVDLPIGINITRFQTLLALHRSYLTPGDSSSGWTAGAAAYYVGYLQPRTFLLKYNENGTITDAVDCALDPLSETKCTLKSFTVEKGIYQTSNFRVQPTESIVRFPNITNLCPFGEVFNATRFASVYAWNRKRISNCVADYSVLYNSASFSTFKCYGVSPTKLNDLCFTNVYADSFVIRGDEVRQIAPGQTGKIADYNYKLPDDFTGCVIAWNSNNLDSKVGGNYNYLYRLFRKSNLKPFERDISTEIYQAGSTPCNGVEGFNCYFPLQSYGFQPTNGVGYQPYRVVVLSFELLHAPATVCGPKKSTNLVKNKCVNFNFNGLTGTGVLTESNKKFLPFQQFGRDIADTTDAVRDPQTLEILDITPCSFGGVSVITPGTNTSNQVAVLYQGVNCTEVPVAIHADQLTPTWRVYSTGSNVFQTRAGCLIGAEHVNNSYECDIPIGAGICASYQTQTNSPRRARSVASQSIIAYTMSLGAENSVAYSNNSIAICTNFTISVTTEILPVSMTKTSVDCTMYICGDSTECSNLLLQYGSFCTQLNRALTGIAVEQDKNTQEVFAQVKQIYKTPPIKDFGGFNFSQILPDPSKPSKRSFIEDLLFNKVTLADAGFIKQYGDCLGDIAARDLICAQKFNGLTVLPPLLTDEMIAQYTSALLAGTITSGWTFGAGAALQIPFAMQMAYRFNGIGVTQNVLYENQKLIANQFNSAIGKIQYSLSSTASALGKLQDVVNQNAQALNTLVKQLSSNFGAISSVLNDILSRLDKVEAEVQIDRLITGRLQSLQTYVTQQLIRAAEIRASANLAATKMSECVLGQSKRVDFCGKGYHLMSFPQSAPHGVVFLHVTYVCAQEKNFTTAPAICHDGKAHFPREGVFVSNGTHWFVTQRNFYEPQIITTDNTFVSGNCDVVIGIVNNTVYDPLQPELDSFKEELDKYFKNHTSPDVDLGDISGINASVVNIQKEIDRLNEVAKNLNESLIDLQELGKYEQYIKGGSGYIPEAPRDGQAYVRKDGEWVLLSTFL

SEQ ID NO: 6148 - protein, 1241 aa, Artificial Sequence; identical to SEQ ID NO: 6111
  SARS-CoV-2/Portugal/PT0034/2020__EPI_ISL_418019 spike protein (1-1211)(P715C_P1069C) Foldon construct

SEQ ID NO: 6149 - protein, 1241 aa, Artificial Sequence
  SARS-CoV-2/Iceland/202/2020__EPI_ISL_417750 spike protein (1-1211)(P715C_P1069C) Foldon construct
MFVFLVLLPLVSSQCVNLTTRTQLPPAYTNSFTRGVYYPDKVFRSSVLHSTQDLFLPFFSNVTWFHAIHVSGTNGTKRFDNPVLPFNDGVYFASTEKSNIIRGWIFGTTLDSKTQSLLIVNNATNVVIKVCEFQFCNDPFLGVYYHKNNKSWMESEFRVYSSANNCTFEYVSQPFLMDLEGKQGNFKNLREFVFKNIDGYFKIYSKHTPINLVRDLPQGFSALEPLVDLPIGINITRFQTLLALHRSYLTPGDSSSGWTAGAAAYYVGYLQPRTFLLKYNENGTITDAVDCALDPLSETKCTLKSFTVEKGIYQTSNFRVQPTESIVRFPNITNLCPFGEVFNATRFASVYAWNRKRISNCVADYSVLYNSASFSTFKCYGVSPTKLNDLCFTNVYADSFVIRGDEVRQIAPGQTGKIADYNYKLPDDFTGCVIAWNSNNLDSKVGGNYNYLYRLFRKSNLKPFERDISTEIYQAGSTPCNGVEGFNCYFPLQSYGFQPTNGVGYQPYRVVVLSFELLHAPATVCGPKKSTNLVKNKCVNFNFNGLTGTGVLTESNKKFLPFQQFGRDIADTTDAVRDPQTLEILDITPCSFGGVSVITPGTNTSNQVAVLYQDVNCTEVPVAIHADQLTPTWRVYSTGSNVFQTRAGCLIGAEHVNNSYECDIPIGAGICASYQTQTNSPRRARSVASQSIIAYTMSLGAENSVAYSNNSIAICTNFTISVTTEILPVSMTKTSVDCTMYICGDSTECSNLLLQYGSFCTQLNRALTGIAVEQDKNTQEVFAQVKQIYKTPPIKDFGGFNFSQILPDPSKPSKRSFIEDLLFNKVTLADAGFIKQYGDCLGDIAARDLICAQKFNGLTVLPPLLTDEMIAQYTSALLAGTITSGWTFGAGAALQIPFAMQMAYRFNGIGVTQNVLYENQKLIANQFNSAIGKIQDSLSSTASALGKLQDVVNQNAQALNTLVKQLSSNFGAISSVLNDILSRLDKVEAEVQIDRLITGRLQSLQTYVTQQLIRAAEIRASANLAATKMSECVLGQSKRVDFCGKGYHLMSFPQSAPHGVVFLHVTYVCAQEKNFTTAPAICHDGKAHFPREGVFVSNGTHWFVTQRNFYEPQIITTDNTFVSGNCDVVIGIVNNTVYDPLQPELDSFKEELDKYFKNHTSPDVDLGDIPGINASVVNIQKEIDRLNEVAKNLNESLIDLQELGKYEQYIKGGSGYIPEAPRDGQAYVRKDGEWVLLSTFL

SEQ ID NO: 6150 - protein, 1241 aa, Artificial Sequence
  SARS-CoV-2/USA/WA-UW261/2020__EPI_ISL_418046 spike protein (1-1211)(P715C_P1069C) Foldon construct
MFVFLVLLPLVSSQCVNLTTRTQLPPAYTNSFTRGVYYPDKVFRSSVLHSTQDLFLPFFSNVTWFHAIHVSGTNGTKRFDNPVLPFNDGVYFASTEKSNIIRGWIFGTTLDSKTQSLLIVNNATNVVIKVCEFQFCNDPFLGVYYHKNNKSWMESEFRVYSSANNCTFEYVSQPFLMDLEGKQGNFKNLREFVFKNIDGYFKIYSKHTPINLVRDLPQGFSALEPLVDLPIGINITRFQTLLALHRSYLTPGDSSSGWTAGAAAYYVGYLQPRTFLLKYNENGTITDAVDCALDPLSETKCTLKSFTVEKGIYQTSNFRVQPTESIVRFPNITNLCPFGEVFNATRFTSVYAWNRKRISNCVADYSVLYNSASFSTFKCYGVSPTKLNDLCFTNVYADSFVIRGDEVRQIAPGQTGKIADYNYKLPDDFTGCVIAWNSNNLDSKVGGNYNYLYRLFRKSNLKPFERDISTEIYQAGSTPCNGVEGFNCYFPLQSYGFQPTNGVGYQPYRVVVLSFELLHAPATVCGPKKSTNLVKNKCVNFNFNGLTGTGVLTESNKKFLPFQQFGRDIADTTDAVRDPQTLEILDITPCSFGGVSVITPGTNTSNQVAVLYQDVNCTEVPVAIHADQLTPTWRVYSTGSNVFQTRAGCLIGAEHVNNSYECDIPIGAGICASYQTQTNSPRRARSVASQSIIAYTMSLGAENSVAYSNNSIAICTNFTISVTTEILPVSMTKTSVDCTMYICGDSTECSNLLLQYGSFCTQLNRALTGIAVEQDKNTQEVFAQVKQIYKTPPIKDFGGFNFSQILPDPSKPSKRSFIEDLLFNKVTLADAGFIKQYGDCLGDIAARDLICAQKFNGLTVLPPLLTDEMIAQYTSALLAGTITSGWTFGAGAALQIPFAMQMAYRFNGIGVTQNVLYENQKLIANQFNSAIGKIQDSLSSTASALGKLQDVVNQNAQALNTLVKQLSSNFGAISSVLNDILSRLDKVEAEVQIDRLITGRLQSLQTYVTQQLIRAAEIRASANLAATKMSECVLGQSKRVDFCGKGYHLMSFPQSAPHGVVFLHVTYVCAQEKNFTTAPAICHDGKAHFPREGVFVSNGTHWFVTQRNFYEPQIITTDNTFVSGNCDVVIGIVNNTVYDPLQPELDSFKEELDKYFKNHTSPDVDLGDISGINASVVNIQKEIDRLNEVAKNLNESLIDLQELGKYEQYIKGGSGYIPEAPRDGQAYVRKDGEWVLLSTFL

SEQ ID NO: 6151 - protein, 1241 aa, Artificial Sequence
  SARS-CoV-2/Portugal/PT0035/2020__EPI_ISL_418020 spike protein (1-1211)(P715C_P1069C) Foldon construct
MFVFLVLLPLVSSQCVNLTTRTQLPPAYTNSFTRGVYYPDKVFRSSVLHSTQDLFLPFFSNVTWFHAIHVSGTNGTKRFDNPVLPFNDGVYFASTEKSNIIRGWIFGTTLDSKTQSLLIVNNATNVVIKVCEFQFCNDPFLGVYYHKNNKSWMESEFRVYSSANNCTFEYVSQPFLMDLEGKQGNFKNLREFVFKNIDGYFKIYSKHTPINLVRDLPQGFSALEPLVDLPIGINITRFQTLLALHRSYLTPGDSSSGWTAGAAAYYVGYLQPRTFLLKYNENGTITDAVDCALDPLSETKCTLKSFTVEKGIYQTSNFRVQPTESIVRFPNITNLCPFGEVFNATRFASVYAWNRKRISNCVADYSVLYNSASFSTFKCYGVSPTKLNDLCFTNVYADSFVIRGDEVRQIAPGQTGKIADYNYKLPDDFTGCVIAWNSNNLDSKVGGNYNYLYRLFRKSNLKPFERDISTEIYQAGSTPCNGVEGFNCYFPLQSYGFQPTNGVGYQPYRVVVLSFELLHAPATVCGPKKSTNLVKNKCVNFNFNGLTGTGVLTESNKKFLPFQQFGRDIADTTDAVRDPQTLEILDITPCSFGGVSVITPGTNTSNQVAVLYQDVNCTEVPVAIHADQLTPTWRVYSTGSNVFQTRAGCLIGAEHVNNSYECDIPIGAGICASYQTQTNSPRRARSVASQSIIAYTMSLGAENSVAYSNNSIAICTNFTISVTTEILPVSMTKTSVDCTMYICGDSTECSNLLLQYGSFCTQLNRALTGIAVEQDKNTQEVFAQVKQIYKTPPIKDFGGFNFSQILPDPSKPSKRSFIEDLLFNKVTLADAGFIKQYGDCLGDISARDLICAQKFNGLTVLPPLLTDEMIAQYTSALLAGTITSGWTFGAGAALQIPFAMQMAYRFNGIGVTQNVLYENQKLIANQFNSAIGKIQDSLSSTASALGKLQDVVNQNAQALNTLVKQLSSNFGAISSVLNDILSRLDKVEAEVQIDRLITGRLQSLQTYVTQQLIRAAEIRASANLAATKMSECVLGQSKRVDFCGKGYHLMSFPQSAPHGVVFLHVTYVCAQEKNFTTAPAICHDGKAHFPREGVFVSNGTHWFVTQRNFYEPQIITTDNTFVSGNCDVVIGIVNNTVYDPLQPELDSFKEELDKYFKNHTSPDVDLGDISGINASVVNIQKEIDRLNEVAKNLNESLIDLQELGKYEQYIKGGSGYIPEAPRDGQAYVRKDGEWVLLSTFL

SEQ ID NO: 6152 - protein, 1241 aa, Artificial Sequence
  SARS-CoV-2/USA/NY-NYUMC7/2020__EPI_ISL_418192 spike protein (1-1211)(P715C_P1069C) Foldon construct
MFVFLVLLPLVSSQCVNLTTRTQLPPAYTNSFTRGVYYPDKVFRSSVLHSTQDLFLPFFSNVTWFHAIHVSGTNGTKRFDNPVLPFNDGVYFASTEKSNIIRGWIFGTTLDSKTQSLLIVNNATNVVIKVCEFQFCNDPFLGVYHHKNNKSWMESEFRVYSSANNCTFEYVSQPFLMDLEGKQGNFKNLREFVFKNIDGYFKIYSKHTPINLVRDLPQGFSALEPLVDLPIGINITRFQTLLALHRSYLTPGDSSSGWTAGAAAYYVGYLQPRTFLLKYNENGTITDAVDCALDPLSETKCTLKSFTVEKGIYQTSNFRVQPTESIVRFPNITNLCPFGEVFNATRFASVYAWNRKRISNCVADYSVLYNSASFSTFKCYGVSPTKLNDLCFTNVYADSFVIRGDEVRQIAPGQTGKIADYNYKLPDDFTGCVIAWNSNNLDSKVGGNYNYLYRLFRKSNLKPFERDISTEIYQAGSTPCNGVEGFNCYFPLQSYGFQPTNGVGYQPYRVVVLSFELLHAPATVCGPKKSTNLVKNKCVNFNFNGLTGTGVLTESNKKFLPFQQFGRDIADTTDAVRDPQTLEILDITPCSFGGVSVITPGTNTSNQVAVLYQGVNCTEVPVAIHADQLTPTWRVYSTGSNVFQTRAGCLIGAEHVNNSYECDIPIGAGICASYQTQTNSPRRARSVASQSIIAYTMSLGAENSVAYSNNSIAICTNFTISVTTEILPVSMTKTSVDCTMYICGDSTECSNLLLQYGSFCTQLNRALTGIAVEQDKNTQEVFAQVKQIYKTPPIKDFGGFNFSQILPDPSKPSKRSFIEDLLFNKVTLADAGFIKQYGDCLGDIAARDLICAQKFNGLTVLPPLLTDEMIAQYTSALLAGTITSGWTFGAGAALQIPFAMQMAYRFNGIGVTQNVLYENQKLIANQFNSAIGKIQDSLSSTASALGKLQDVVNQNAQALNTLVKQLSSNFGAISSVLNDILSRLDKVEAEVQIDRLITGRLQSLQTYVTQQLIRAAEIRASANLAATKMSECVLGQSKRVDFCGKGYHLMSFPQSAPHGVVFLHVTYVCAQEKNFTTAPAICHDGKAHFPREGVFVSNGTHWFVTQRNFYEPQIITTDNTFVSGNCDVVIGIVNNTVYDPLQPELDSFKEELDKYFKNHTSPDVDLGDISGINASVVNIQKEIDRLNEVAKNLNESLIDLQELGKYEQYIKGGSGYIPEAPRDGQAYVRKDGEWVLLSTFL

SEQ ID NO: 6153 - protein, 1241 aa, Artificial Sequence
  SARS-CoV-2/Iceland/189/2020__EPI_ISL_417709 spike protein (1-1211)(P715C_P1069C) Foldon construct
MFVFLVLLPLVSSQCVNLTTRTQLPPAYTNSFTRGVYYPDKVFRSSVLHSTQDLFLPFFSNVTWFHAIHVSGTNGTKRFDNPVLPFNDGVYFASTEKSNIIRGWIFGTTLDSKTQSLLIVNNATNVVIKVCEFQFCNDPFLGVYYHKNNKSWMESEFRVYSSANNCTFEYVSQPFLMDLEGKQGNFKNLREFVFKNIDGYFKIYSKHTPINLVRDLPQGFSALEPLVDLPIGINITRFQTLLALHRSYLTPGDSSSGWTAGAAAYYVGYLQPRTFLLKYNENGTITDAVDCALDPLSETKCTLKSFTVEKGIYQTSNFRVQPTESIVRFPNITNLCPFGEVFNATRFASVYAWNRKRISNCVADYSVLYNSASFSTFKCYGVSPTKLNDLCFTNVYADSFVIRGDEVRQIAPGQTGKIADYNYKLPDDFTGCVIAWNSNNLDSKVGGNYNYLYRLFRKSNLKPFERDISTEIYQAGSTPCNGVEGFNCYFPLQSYGFQPTNGVGYQPYRVVVLSFELLHAPATVCGPKKSTNLVKNKCVNFNFNGLTGTGVLTESNKKFLPFQQFGRDIADTTDAVRDPQTLEILDITPCSFGGVSVITPGTNTSNQVAVLYQGVNCTEVPVAIHADQLTPTWRVYSTGSNVFQTRAGCLIGAEHVNNSYECDIPIGAGICASYQTQTNSPRRARSVASQSIIAYTMSLGAENSVAYSNNSIAICTNFTISVTTEILPVSMTKTSVDCTMYICGDSTECSNLLLQYGSFCTQLNRALTGIAVEQDKNTQEVFAQVKQIYKTPPIKDFGGFNFSQILPDPSKPSKRSFIEDLLFNKVTLADAGFTKQYGDCLGDIAARDLICAQKFNGLTVLPPLLTDEMIAQYTSALLAGTITSGWTFGAGAALQIPFAMQMAYRFNGIGVTQNVLYENQKLIANQFNSAIGKIQDSLSSTASALGKLQDVVNQNAQALNTLVKQLSSNFGAISSVLNDILSRLDKVEAEVQIDRLITGRLQSLQTYVTQQLIRAAEIRASANLAATKMSECVLGQSKRVDFCGKGYHLMSFPQSAPHGVVFLHVTYVCAQEKNFTTAPAICHDGKAHFPREGVFVSNGTHWFVTQRNFYEPQIITTDNTFVSGNCDVVIGIVNNTVYDPLQPELDSFKEELDKYFKNHTSPDVDLGDISGINASVVNIQKEIDRLNEVAKNLNESLIDLQELGKYEQYIKGGSGYIPEAPRDGQAYVRKDGEWVLLSTFL

SEQ ID NO: 6154 - protein, 1241 aa, Artificial Sequence
  SARS-CoV-2/Australia/NSW56/2020__EPI_ISL_417408 spike protein (1-1211)(P715C_P1069C) Foldon construct
MFVFLVLLPLVSSQCVNLTTRTQLPPAYTNSFTRGVYYPDKVFRSSVLHSTQDLFLPFFSNVTWFHAIHVSGTNGTKRFDNPVLPFNDGVYFASTEKSNIIRGWIFGTTLDSKTQSLLIVNNATNVVIKVCEFQFCNDPFLGVYYHKNNKSWMESEFRVYSSANNCTFEYVSQPFLMDLEGKQGNFKNLREFVFKNIDGYFKIYSKHTPINLVRDLPQGFSALEPLVDLPIGINITRFQTLLALHRSYLTPGDSSSGWTAGAAAYYVGYLQPRTFLLKYNENGTITDAVDCALDPLSETKCTLKSFTVEKGIYQTSNFRVQPTESIVRFPNITNLCPFGEVFNATRFASVYAWNRKRISNCVADYSVLYNSASFSTFKCYGVSPTKLNDLCFTNVYADSFVIRGDEVRQIAPGQTGKIADYNYKLPDDFTGCVIAWNSNNLDSKVGGNYNYLYRLFRKSNLKPFERDISTEIYQAGSTPCNGVEGFNCYFPLQSYGFQPTNGVGYQPYRVVVLSFELLHAPATVCGPKKSTNLVKNKCVNFNFNGLTGTGVLTESNKKFLPFQQFGRDIADTTDAVRDPQTLEILDITPCSFGGVSVITPGTNTSNQVAVLYQDVNCTEVPVAIHADQLTPTWRVYSTGSNVFQTRAGCLIGAEHVNNSYECDIPIGAGICASYQTQTNSPRRARSVASQSIIAYTMSLGAENSVAYSNNSIAICTNFTISVTTEILPVSMTKTSVDCTMYICGDSTECSNLLLQYGSFCTQLNRALTGIAVEQDKNTQEVFAQVKQIYKTPPIKDFGGFNFSQILPDSSKPSKRSFIEDLLFNKVTLADAGFIKQYGDCLGDIAARDLICAQKFNGLTVLPPLLTDEMIAQYTSALLAGTITSGWTFGAGAALQIPFAMQMAYRFNGIGVTQNVLYENQKLIANQFNSAIGKIQDSLSSTASALGKLQDVVNQNAQALNTLVKQLSSNFGAISSVLNDILSRLDKVEAEVQIDRLITGRLQSLQTYVTQQLIRAAEIRASANLAATKMSECVLGQSKRVDFCGKGYHLMSFPQSAPHGVVFLHVTYVCAQEKNFTTAPAICHDGKAHFPREGVFVSNGTHWFVTQRNFYEPQIITTDNTFVSGNCDVVIGIVNNTVYDPLQPELDSFKEELDKYFKNHTSPDVDLGDISGINASVVNIQKEIDRLNEVAKNLNESLIDLQELGKYEQYIKGGSGYIPEAPRDGQAYVRKDGEWVLLSTFL

SEQ ID NO: 6155 - protein, 1241 aa, Artificial Sequence
  SARS-CoV-2/Iceland/280/2020__EPI_ISL_417608 spike protein (1-1211)(P715C_P1069C) Foldon construct
MFVFLVLLPLVSSQCVNLTTRTQLPPAYTNSFTRGVYYPDKVFRSSVLHSTQDLFLPFFSNVTWFHAIHVSGTNGTKRFDNPVLPFNDGVYFASTEKSNIIRGWIFGTTLDSKTQSLLIVNNATNVVIKVCEFQFCNDPFLGVYYHKNNKSWMESEFRVYSSANNCTFEYVSQPFLMDLEGKQGNFKNLREFVFKNIDGYFKIYSKHTPINLVRDLPQGFSALEPLVDLPIGINITRFQTLLALHRSYLTPGDSSSGWTAGAAAYYVGYLQPRTFLLKYNENGTITDAVDCALDPLSETKCTLKSFTVEKGIYQTSNFRVQPTESIVRFPNITNLCPFGEVFNATRFASVYAWNRKRISNCVADYSVLYNSASFSTFKCYGVSPTKLNDLCFTNVYADSFVIRGDEVRQIAPGQTGKIADYNYKLPDDFTGCVIAWNSNNLDSKVGGNYNYLYRLFRKSNLKPFERDISTEIYQAGSTPCNGVEGFNCYFPLQSYGFQPTNGVGYQPYRVVVLSFELLHAPATVCGPKKSTNLVKNKCVNFNFNGLTGTGVLTESNKKFLPFQQFGRDIADTTDAVRDPQTLEILDITPCSFGGVSVITPGTNTSNQVAVLYQGVNCTEVPVAIHADQLTPTWRVYSTGSNVFQTRAGCLIGAEHVNNSYECDIPIGAGICASYHTQTNSPRRARSVASQSIIAYTMSLGAENSVAYSNNSIAICTNFTISVTTEILPVSMTKTSVDCTMYICGDSTECSNLLLQYGSFCTQLNRALTGIAVEQDKNTQEVFAQVKQIYKTPPIKDFGGFNFSQILPDPSKPSKRSFIEDLLFNKVTLADAGFIKQYGDCLGDIAARDLICAQKFNGLTVLPPLLTDEMIAQYTSALLAGTITSGWTFGAGAALQIPFAMQMAYRFNGIGVTQNVLYENQKLIANQFNSAIGKIQDSLSSTASALGKLQDVVNQNAQALNTLVKQLSSNFGAISSVLNDILSRLDKVEAEVQIDRLITGRLQSLQTYVTQQLIRAAEIRASANLAATKMSECVLGQSKRVDFCGKGYHLMSFPQSAPHGVVFLHVTYVCAQEKNFTTAPAICHDGKAHFPREGVFVSNGTHWFVTQRNFYEPQIITTDNTFVSGNCDVVIGIVNNTVYDPLQPELDSFKEELDKYFKNHTSPDVDLGDISGINASVVNIQKEIDRLNEVAKNLNESLIDLQELGKYEQYIKGGSGYIPEAPRDGQAYVRKDGEWVLLSTFL

SEQ ID NO: 6156 - protein, 1241 aa, Artificial Sequence; identical to SEQ ID NO: 6111
  SARS-CoV-2/Iceland/247/2020__EPI_ISL_417575 spike protein (1-1211)(P715C_P1069C) Foldon construct

SEQ ID NO: 6157 - protein, 1241 aa, Artificial Sequence
  SARS-CoV-2/Iceland/238/2020__EPI_ISL_417566 spike protein (1-1211)(P715C_P1069C) Foldon construct
MFVFLVLLPLVSSQCVNLTTRTQLPPAYTNSFTRGVYYPDKVFRSSVLHSTQDLFLPFFSNVTWFHAIHVSGTNGTKRFDNPVLPFNDGVYFASTEKSNIIRGWIFGTTLDSKTQSLLIVNNATNVVIKVCEFQFCNDPFLGVYYHKNNKSWMESEFRVYSSANNCTFEYVSQPFLMDLEGKQGNFKNLREFVFKNIDGYFKIYSKHTPINLVRDLPQGFSALEPLVDLPIGINITRFQTLLALHRSYLTPGDSSSGWTAGAAAYYVGYLQPRTFLLKYNENGTITDAVDCALDPLSETKCTLKSFTVEKGIYQTSNFRVQPTESIVRFPNITNLCPFGEVFNATRFASVYAWNRKRISNCVADYSVLYNSASFSTFKCYGVSPTKLNDLCFTNVYADSFVIRGDEVRQIAPGQTGKIADYNYKLPDDFTGCVIAWNSNNLDSKVGGNYNYLYRLFRKSNLKPFERDISTEIYQAGSTPCNGVEGFNCYFPLQSYGFQPTNGVGYQPYRVVVLSFELLHAPATVCGPKKSTNLVKNKCVNFNFNGLTGTGVLTESNKKFLPFQQFGRDIADTTDAVRDPQTLEILDITPCSFGGVSVITPGTNTSNQVAVLYQGVNCTEVPVAIHADQLTPTWRVYSTGSNVFQTRAGCLIGAEHVNNSYECDIPIGAGICASYQTQTNSPRRARSVASQSIIAYTMSLGAENSVAYSNNSIAICTNFTISVTTEILPVSMTKTSVDCTMYICGDSTECSNLLLQYGSFCTQLNRALTGIAVEQDKNTQEVFAQVKQIYKTPPIKDFGGFNFSQILPDPSKPSKRSFIEDLLFNKVTLADVGFIKQYGDCLGDIAARDLICAQKFNGLTVLPPLLTDEMIAQYTSALLAGTITSGWTFGAGAALQIPFAMQMAYRFNGIGVTQNVLYENQKLIANQFNSAIGKIQDSLSSTASALGKLQDVVNQNAQALNTLVKQLSSNFGAISSVLNDILSRLDKVEAEVQIDRLITGRLQSLQTYVTQQLIRAAEIRASANLAATKMSECVLGQSKRVDFCGKGYHLMSFPQSAPHGVVFLHVTYVCAQEKNFTTAPAICHDGKAHFPREGVFVSNGTHWFVTQRNFYEPQIITTDNTFVSGNCDVVIGIVNNTVYDPLQPELDSFKEELDKYFKNHTSPDVDLGDISGINASVVNIQKEIDRLNEVAKNLNESLIDLQELGKYEQYIKGGSGYIPEAPRDGQAYVRKDGEWVLLSTFL

SEQ ID NO: 6158 - protein, 1241 aa, Artificial Sequence
  SARS-CoV-2/Greece/16/2020__EPI_ISL_418265 spike protein (1-1211)(P715C_P1069C) Foldon construct
MFVFLVLLPLVSSQCVNLTTRTQLPPAYTNSFTRGVYYPDKVFRSSVLHSTQDLFLPFFSNVTWFHAIHVSGTNGTKRFDNPVLPFNDGVYFASTEKSNIIRGWIFGTTLDSKTQSLLIVNNATNVVIKVCEFQFCNDPFLGVYYHKNNKSWMESEFRVYSSANNCTFEYVSQPFLMDLEGKQGNFKNLREFVFKNVDGYFKIYSKHTPINLVRDLPQGFSALEPLVDLPIGINITRFQTLLALHRSYLTPGDSSSGWTAGAAAYYVGYLQPRTFLLKYNENGTITDAVDCALDPLSETKCTLKSFTVEKGIYQTSNFRVQPTESIVRFPNITNLCPFGEVFNATRFASVYAWNRKRISNCVADYSVLYNSASFSTFKCYGVSPTKLNDLCFTNVYADSFVIRGDEVRQIAPGQTGKIADYNYKLPDDFTGCVIAWNSNNLDSKVGGNYNYLYRLFRKSNLKPFERDISTEIYQAGSTPCNGVEGFNCYFPLQSYGFQPTNGVGYQPYRVVVLSFELLHAPATVCGPKKSTNLVKNKCVNFNFNGLTGTGVLTESNKKFLPFQQFGRDIADTTDAVRDPQTLEILDITPCSFGGVSVITPGTNTSNQVAVLYQDVNCTEVPVAIHADQLTPTWRVYSTGSNVFQTRAGCLIGAEHVNNSYECDIPIGAGICASYQTQTNSPRRARSVASQSIIAYTMSLGAENSVAYSNNSIAICTNFTISVTTEILPVSMTKTSVDCTMYICGDSTECSNLLLQYGSFCTQLNRALTGIAVEQDKNTQEVFAQVKQIYKTPPIKDFGGFNFSQILPDPSKPSKRSFIEDLLFNKVTLADAGFIKQYGDCLGDIAARDLICAQKFNGLTVLPPLLTDEMIAQYTSALLAGTITSGWTFGAGAALQIPFAMQMAYRFNGIGVTQNVLYENQKLIANQFNSAIGKIQDSLSSTASALGKLQDVVNQNAQALNTLVKQLSSNFGAISSVLNDILSRLDKVEAEVQIDRLITGRLQSLQTYVTQQLIRAAEIRASANLAATKMSECVLGQSKRVDFCGKGYHLMSFPQSAPHGVVFLHVTYVCAQEKNFTTAPAICHDGKAHFPREGVFVSNGTHWFVTQRNFYEPQIITTDNTFVSGNCDVVIGIVNNTVYDPLQPELDSFKEELDKYFKNHTSPDVDLGDISGINASVVNIQKEIDRLNEVAKNLNESLIDLQELGKYEQYIKGGSGYIPEAPRDGQAYVRKDGEWVLLSTFL

SEQ ID NO: 6159 - protein, 1241 aa, Artificial Sequence
  SARS-CoV-2/Iceland/319/2020__EPI_ISL_417648 spike protein (1-1211)(P715C_P1069C) Foldon construct
MFVFLVLLPLVSSQCVNLTTRTQLPPAYTNSFTRGVYYPDKVFRSSVLHSTQDLFLPFFSNVTWFHAIHVSGTNGTKRFDNPVLPFNDGVYFASTEKSNIIRGWIFGTTLDSKTQSLLIVNNATNVVIKVCEFQFCNDPFLGVYYHKNNKSWMESEFRVYSSANNCTFEYVSQPFLIDLEGKQGNFKNLREFVFKNIDGYFKIYSKHTPINLVRDLPQGFSALEPLVDLPIGINITRFQTLLALHRSYLTPGDSSSGWTAGAAAYYVGYLQPRTFLLKYNENGTITDAVDCALDPLSETKCTLKSFTVEKGIYQTSNFRVQPTESIVRFPNITNLCPFGEVFNATRFASVYAWNRKRISNCVADYSVLYNSASFSTFKCYGVSPTKLNDLCFTNVYADSFVIRGDEVRQIAPGQTGKIADYNYKLPDDFTGCVIAWNSNNLDSKVGGNYNYLYRLFRKSNLKPFERDISTEIYQAGSTPCNGVEGFNCYFPLQSYGFQPTNGVGYQPYRVVVLSFELLHAPATVCGPKKSTNLVKNKCVNFNFNGLTGTGVLTESNKKFLPFQQFGRDIADTTDAVRDPQTLEILDITPCSFGGVSVITPGTNTSNQVAVLYQGVNCTEVPVAIHADQLTPTWRVYSTGSNVFQTRAGCLIGAEHVNNSYECDIPIGAGICASYQTQTNSPRRARSVASQSIIAYTMSLGAENSVAYSNNSIAICTNFTISVTTEILPVSMTKTSVDCTMYICGDSTECSNLLLQYGSFCTQLNRALTGIAVEQDKNTQEVFAQVKQIYKTPPIKDFGGFNFSQILPDPSKPSKRSFIEDLLFNKVTLADAGFIKQYGDCLGDIAARDLICAQKFNGLTVLPPLLTDEMIAQYTSALLAGTITSGWTFGAGAALQIPFAMQMAYRFNGIGVTQNVLYENQKLIANQFNSAIGKIQDSLSSTASALGKLQDVVNQNAQALNTLVKQLSSNFGAISSVLNDILSRLDKVEAEVQIDRLITGRLQSLQTYVTQQLIRAAEIRASANLAATKMSECVLGQSKRVDFCGKGYHLMSFPQSAPHGVVFLHVTYVCAQEKNFTTAPAICHDGKAHFPREGVFVSNGTHWFVTQRNFYEPQIITTDNTFVSGNCDVVIGIVNNTVYDPLQPELDSFKEELDKYFKNHTSPDVDLGDISGINASVVNIQKEIDRLNEVAKNLNESLIDLQELGKYEQYIKGGSGYIPEAPRDGQAYVRKDGEWVLLSTFL

SEQ ID NO: 6160 - protein, 1241 aa, Artificial Sequence
  SARS-CoV-2/Congo/94/2020__EPI_ISL_417947 spike protein (1-1211)(P715C_P1069C) Foldon construct
MFVFLVLLPLVSSQCVNLTTRTQLPPAYTNSFTRGVYYPDKVFRSSVLHSTQDLFLPFFSNVTWFHAIHVSGTNGTKRFDNPVLPFNDGVYFASTEKSNIIRGWIFGTTLDSKTQSLLIVNNATNVVIKVCEFQFCNDPFLGVYYHKNNKSWMESEFRVYSSANNCTFEYVSQPFLMDLEGKQGNFKNLREFVFKNIDGYFKIYSKHTPINLVRDLPQGFSALEPLVDLPIGINITRFQTLLALHRSYLTPGDSSSGWTAGAAAYYVGYLQPRTFLLKYNENGTITDAVDCALDPLSETKCTLKSFTVEKGIYQTSNFRVQPTESIVRFPNITNLCPFGEVFNATRFASVYAWNRKRISNCVADYSVLYNSASFSTFKCYGVSPTKLNDLCFTNVYADSFVIRGDEVRQIAPGQTGKIADYNYKLPDDFTGCVIAWNSNNLDSKVGGNYNYLYRLFRKSNLKPFERDISTEIYQAGSTPCNGVEGFNCYFPLQSYGFQPTNGVGYQPYRVVVLSFELLHAPATVCGPKKSTNLVKNKCVNFNFNGLTGTGVLTESNKKFLPFQQFGRDIADTTDAVRDPQTLEILDITPCSFGGVSVITPGTNTSNQVAVLYQGVNCTEVPVAIHADQLTPTWRVYSTGSNVFQTRAGCLIGAEHVNNSYECDIPIGAGICASYQTQTNSPRRARSVASQSIIAYTMSLGAENSVAYSNNSIAICTNFTISVTTEILPVSMTKTSVDCTMYICGDSTECSNLLLQYGSFCTQLNRALTGIAVEQDKNTQEVFAQVKQIYKTPPIKDFGGFNFSQILPDPSKPSKRSFIEDILFNKVTLADAGFIKQYGDCLGDIAARDLICAQKFNGLTVLPPLLTDEMIAQYTSALLAGTITSGWTFGAGAALQIPFAMQMAYRFNGIGVTQNVLYENQKLIANQFNSAIGKIQDSLSSTASALGKLQDVVNQNAQALNTLVKQLSSNFGAISSVLNDILSRLDKVEAEVQIDRLITGRLQSLQTYVTQQLIRAAEIRASANLAATKMSECVLGQSKRVDFCGKGYHLMSFPQSAPHGVVFLHVTYVCAQEKNFTTAPAICHDGKAHFPREGVFVSNGTHWFVTQRNFYEPQIITTDNTFVSGNCDVVIGIVNNTVYDPLQPELDSFKEELDKYFKNHTSPDVDLGDISGINASVVNIQKEIDRLNEVAKNLNESLIDLQELGKYEQYIKGGSGYIPEAPRDGQAYVRKDGEWVLLSTFL

SEQ ID NO: 6161 - protein, 1241 aa, Artificial Sequence
  SARS-CoV-2/Congo/158/2020__EPI_ISL_417950 spike protein (1-1211)(P715C_P1069C) Foldon construct
MFVFLVLLPLVSSQCVNLTTRTQLPPAYTNSFTRGVYYPDKVFRSSVLHSTQDLFLPFFSNVTWFHAIHVSGTNGTKRFDNPVLPFNDGVYFASTEKSNIIRGWIFGTTLDSKTQSLLIVNNATNVVIKVCEFQFCNDPFLGVYYHKNNKSWMESEFRVYSSANNCTFEYVSQPFLMDLEGKQGNFKNLREFVFKNIDGYFKIYSKHTPINLVRDLPQGFSALEPLVDLPIGINITRFQTLLALHRSYLTPGDSSSGWTAGAAAYYVGYLQPRTFLLKYNENGTITDAVDCALDPLSETKCTLKSFTVEKGIYQTSNFRVQPTESIVRFPNITNLCPFGEVFNATRFASVYAWNRKRISNCVADYSVLYNSASFSTFKCYGVSPTKLNDLCFTNVYADSFVIRGDEVRQIAPGQTGKIADYNYKLPDDFTGCVIAWNSNNLDSKVGGNYNYLYRLFRKSNLKPFERDISTEIYQAGSTPCNGVEGFNCYFPLQSYGFQPTNGVGYQPYRVVVLSFELLHAPATVCGPKKSTNLVKNKCVNFNFNGLTGTGVLTESNKKFLPFQQFGRDIADTTDAVRDPQTLEILDITPCSFGGVSVITPGTNTSNQVAVLYQDVNCTEVPVAIHADQLTPTWRVYSTGSNVFQTRAGCLIGAEHVNNSYECDIPIGAGICASYQTQTNSPRRARSVASQSIIAYTMSLGAENSVAYSNNSIAICTNFTISVTTEILPVSMTKTSVDCTMYICGDSTECSNLLLQYGSFCTQLNRALTGIAVEQDKNTQEVFAQVKQIYKTPPIKDFGGFNFSQILPDPSKPSKRSFIEDLLFNKVTLADAGFIKQYGDCLGDIAARDLICAQKFNGLTVLPPLLTDEMIAQYTSALLAGTITSGWTFGAGAALQIPFAMQMAYRFNGIGVTQNVLYENQKLIANQFNSAIGKIQDSLSSTASALGKLQDVVNQNAQALNTLVKQLSSNFGAISSVLNDILSRLDKVEAEVQIDRLITGRLQSLQTYVTQQLIRAAEIRASANLAATKMSECVLGQSKRVDFCGKGYHLMSFPQSAPHGVVFLHVTYVCAQEKNFTTAPAICHDGKAHFPREGVFVSNGTHWFVTQRNFYEPQIITTDNTFLSGNCDVVIGIVNNTVYDPLQPELDSFKEELDKYFKNHTSPDVDLGDISGINASVVNIQKEIDRLNEVAKNLNESLIDLQELGKYEQYIKGGSGYIPEAPRDGQAYVRKDGEWVLLSTFL

SEQ ID NO: 6162 - protein, 1241 aa, Artificial Sequence
  SARS-CoV-2/USA/UT-00034/2020__EPI_ISL_417977 spike protein (1-1211)(P715C_P1069C) Foldon construct
MFVFLVLLPLVSSQCVNLTTRTQLPPAYTNSFTRGVYYPDKVFRSSVLHSTQDLFLPFFSNVTWFHAIHVSGTNGTKRFDNPVLPFNDGVYFASTEKSNIIRGWIFGTTLDSKTQSLLIVNNATNVVIKVCEFQFCNDPFLGVYYYKNNKSWMESEFRVYSSANNCTFEYVSQPFLMDLEGKQGNFKNLREFVFKNIDGYFKIYSKHTPINLVRDLPQGFSALEPLVDLPIGINITRFQTLLALHRSYLTPGDSSSGWTAGAAAYYVGYLQPRTFLLKYNENGTITDAVDCALDPLSETKCTLKSFTVEKGIYQTSNFRVQPTESIVRFPNITNLCPFGEVFNATRFASVYAWNRKRISNCVADYSVLYNSASFSTFKCYGVSPTKLNDLCFTNVYADSFVIRGDEVRQIAPGQTGKIADYNYKLPDDFTGCVIAWNSNNLDSKVGGNYNYLYRLFRKSNLKPFERDISTEIYQAGSTPCNGVEGFNCYFPLQSYGFQPTNGVGYQPYRVVVLSFELLHAPATVCGPKKSTNLVKNKCVNFNFNGLTGTGVLTESNKKFLPFQQFGRDIADTTDAVRDPQTLEILDITPCSFGGVSVITPGTNTSNQVAVLYQGVNCTEVPVAIHADQLTPTWRVYSTGSNVFQTRAGCLIGAEHVNNSYECDIPIGAGICASYQTQTNSPRRARSVASQSIIAYTMSLGAENSVAYSNNSIAICTNFTISVTTEILPVSMTKTSVDCTMYICGDSTECSNLLLQYGSFCTQLNRALTGIAVEQDKNTQEVFAQVKQIYKTPPIKDFGGFNFSQILPDPSKPSKRSFIEDLLFNKVTLADAGFIKQYGDCLGDIAARDLICAQKFNGLTVLPPLLTDEMIAQYTSALLAGTITSGWTFGAGAALQIPFAMQMAYRFNGIGVTQNVLYENQKLIANQFNSAIGKIQDSLSSTASALGKLQDVVNQNAQALNTLVKQLSSNFGAISSVLNDILSRLDKVEAEVQIDRLITGRLQSLQTYVTQQLIRAAEIRASANLAATKMSECVLGQSKRVDFCGKGYHLMSFPQSAPHGVVFLHVTYVCAQEKNFTTAPAICHDGKAHFPREGVFVSNGTHWFVTQRNFYEPQIITTDNTFVSGNCDVVIGIVNNTVYDPLQPELDSFKEELDKYFKNHTSPDVDLGDISGINASVVNIQKEIDRLNEVAKNLNESLIDLQELGKYEQYIKGGSGYIPEAPRDGQAYVRKDGEWVLLSTFL

SEQ ID NO: 6163 - protein, 1241 aa, Artificial Sequence
  SARS-CoV-2/USA/UT-00033/2020__EPI_ISL_417976 spike protein (1-1211)(P715C_P1069C) Foldon construct
MFVFLVLLPLVSSQCVNLTTRTQLPPAYTNSFTRGVYYPDKVFRSSVLHSTQDLFLPFFSNVTWFHAIHVSGTNGTKRFDNPVLPFNDGVYFASTEKSNIIRGWIFGTTLDSKTQSLLIVNNATNVVIKVCEFQFCNDPFLGVYYHKNNKSWMESEFRVYSSANNCTFEYVSQPFLMDLEGKQGNFKNLREFVFKNIDGYFKIYSKHTPINLVRDLPQGFSALEPLVDLPIGINITRFQTLLALHRSYLTPGDSSSGLTAGAAAYYVGYLQPRTFLLKYNENGTITDAVDCALDPLSETKCTLKSFTVEKGIYQTSNFRVQPTESIVRFPNITNLCPFGEVFNATRFASVYAWNRKRISNCVADYSVLYNSASFSTFKCYGVSPTKLNDLCFTNVYADSFVIRGDEVRQIAPGQTGKIADYNYKLPDDFTGCVIAWNSNNLDSKVGGNYNYLYRLFRKSNLKPFERDISTEIYQAGSTPCNGVEGFNCYFPLQSYGFQPTNGVGYQPYRVVVLSFELLHAPATVCGPKKSTNLVKNKCVNFNFNGLTGTGVLTESNKKFLPFQQFGRDIADTTDAVRDPQTLEILDITPCSFGGVSVITPGTNTSNQVAVLYQGVNCTEVPVAIHADQLTPTWRVYSTGSNVFQTRAGCLIGAEHVNNSYECDIPIGAGICASYQTQTNSPRRARSVASQSIIAYTMSLGAENSVAYSNNSIAICTNFTISVTTEILPVSMTKTSVDCTMYICGDSTECSNLLLQYGSFCTQLNRALTGIAVEQDKNTQEVFAQVKQIYKTPPIKDFGGFNFSQILPDPSKPSKRSFIEDLLFNKVTLADAGFIKQYGDCLGDIAARDLICAQKFNGLTVLPPLLTDEMIAQYTSALLAGTITSGWTFGAGAALQIPFAMQMAYRFNGIGVTQNVLYENQKLIANQFNSAIGKIQDSLSSTASALGKLQDVVNQNAQALNTLVKQLSSNFGAISSVLNDILSRLDKVEAEVQIDRLITGRLQSLQTYVTQQLIRAAEIRASANLAATKMSECVLGQSKRVDFCGKGYHLMSFPQSAPHGVVFLHVTYVCAQEKNFTTAPAICHDGKAHFPREGVFVSNGTHWFVTQRNFYEPQIITTDNTFVSGNCDVVIGIVNNTVYDPLQPELDSFKEELDKYFKNHTSPDVDLGDISGINASVVNIQKEIDRLNEVAKNLNESLIDLQELGKYEQYIKGGSGYIPEAPRDGQAYVRKDGEWVLLSTFL

SEQ ID NO: 6164 - protein, 1241 aa, Artificial Sequence
  SARS-CoV-2/USA/WI-13/2020__EPI_ISL_417516 spike protein (1-1211)(P715C_P1069C) Foldon construct
MFVFLVLLPLVSSQCVNLTTRTQLPPAYTNSFTRGVYYPDKVFRSSVLHSTQDLFLPFFSNVTWFHAIHVSGTNGTKRFDNPVLPFNDGVYFASTEKSNIIRGWIFGTTLDSKTQSLLIVNNATNVVIKVCEFQFCNDPFLGVYYHKNNKSWMESEFRVYSSANNCTFEYVSQPFLMDLEGKQGNFKNLREFVFKNIDGYFKIYSKHTPINLVRDLPQGFSALEPLVDLPIGINITRFQTLLALHRSYLTPGDSSSGWTAGAAAYYVGYLQPRTFLLKYNENGTITDAVDCALDPLSETKCTLKSFTVEKGIYQTSNFRVLPTESIVRFPNITNLCPFGEVFNATRFASVYAWNRKRISNCVADYSVLYNSASFSTFKCYGVSPTKLNDLCFTNVYADSFVIRGDEVRQIAPGQTGKIADYNYKLPDDFTGCVIAWNSNNLDSKVGGNYNYLYRLFRKSNLKPFERDISTEIYQAGSTPCNGVEGFNCYFPLQSYGFQPTNGVGYQPYRVVVLSFELLHAPATVCGPKKSTNLVKNKCVNFNFNGLTGTGVLTESNKKFLPFQQFGRDIADTTDAVRDPQTLEILDITPCSFGGVSVITPGTNTSNQVAVLYQGVNCTEVPVAIHADQLTPTWRVYSTGSNVFQTRAGCLIGAEHVNNSYECDIPIGAGICASYQTQTNSPRRARSVASQSIIAYTMSLGAENSVAYSNNSIAICTNFTISVTTEILPVSMTKTSVDCTMYICGDSTECSNLLLQYGSFCTQLNRALTGIAVEQDKNTQEVFAQVKQIYKTPPIKDFGGFNFSQILPDPSKPSKRSFIEDLLFNKVTLADAGFIKQYGDCLGDIAARDLICAQKFNGLTVLPPLLTDEMIAQYTSALLAGTITSGWTFGAGAALQIPFAMQMAYRFNGIGVTQNVLYENQKLIANQFNSAIGKIQDSLSSTASALGKLQDVVNQNAQALNTLVKQLSSNFGAISSVLNDILSRLDKVEAEVQIDRLITGRLQSLQTYVTQQLIRAAEIRASANLAATKMSECVLGQSKRVDFCGKGYHLMSFPQSAPHGVVFLHVTYVCAQEKNFTTAPAICHDGKAHFPREGVFVSNGTHWFVTQRNFYEPQIITTDNTFVSGNCDVVIGIVNNTVYDPLQPELDSFKEELDKYFKNHTSPDVDLGDISGINASVVNIQKEIDRLNEVAKNLNESLIDLQELGKYEQYIKGGSGYIPEAPRDGQAYVRKDGEWVLLSTFL

SEQ ID NO: 6165 - protein, 1240 aa, Artificial Sequence
  SARS-CoV-2/India/1-27/2020__EPI_ISL_413522 spike protein (1-1210)(P714C_P1068C) Foldon construct
MFVFLVLLPLVSSQCVNLTTRTQLPPAYTNSFTRGVYYPDKVFRSSVLHSTQDLFLPFFSNVTWFHAIHVSGTNGTKRFDNPVLPFNDGVYFASTEKSNIIRGWIFGTTLDSKTQSLLIVNNATNVVIKVCEFQFCNDPFLGVYHKNNKSWMESEFRVYSSANNCTFEYVSQPFLMDLEGKQGNFKNLREFVFKNIDGYFKIYSKHTPINLVRDLPQGFSALEPLVDLPIGINITRFQTLLALHRSYLTPGDSSSGWTAGAAAYYVGYLQPRTFLLKYNENGTITDAVDCALDPLSETKCTLKSFTVEKGIYQTSNFRVQPTESIVRFPNITNLCPFGEVFNATRFASVYAWNRKRISNCVADYSVLYNSASFSTFKCYGVSPTKLNDLCFTNVYADSFVIRGDEVIQIAPGQTGKIADYNYKLPDDFTGCVIAWNSNNLDSKVGGNYNYLYRLFRKSNLKPFERDISTEIYQAGSTPCNGVEGFNCYFPLQSYGFQPTNGVGYQPYRVVVLSFELLHAPATVCGPKKSTNLVKNKCVNFNFNGLTGTGVLTESNKKFLPFQQFGRDIADTTDAVRDPQTLEILDITPCSFGGVSVITPGTNTSNQVAVLYQDVNCTEVPVAIHADQLTPTWRVYSTGSNVFQTRAGCLIGAEHVNNSYECDIPIGAGICASYQTQTNSPRRARSVASQSIIAYTMSLGAENSVAYSNNSIAICTNFTISVTTEILPVSMTKTSVDCTMYICGDSTECSNLLLQYGSFCTQLNRALTGIAVEQDKNTQEVFAQVKQIYKTPPIKDFGGFNFSQILPDPSKPSKRSFIEDLLFNKVTLADAGFIKQYGDCLGDIAARDLICAQKFNGLTVLPPLLTDEMIAQYTSALLAGTITSGWTFGAGAALQIPFAMQMAYRFNGIGVTQNVLYENQKLIANQFNSAIGKIQDSLSSTASALGKLQDVVNQNAQALNTLVKQLSSNFGAISSVLNDILSRLDKVEAEVQIDRLITGRLQSLQTYVTQQLIRAAEIRASANLAATKMSECVLGQSKRVDFCGKGYHLMSFPQSAPHGVVFLHVTYVCAQEKNFTTAPAICHDGKAHFPREGVFVSNGTHWFVTQRNFYEPQIITTDNTFVSGNCDVVIGIVNNTVYDPLQPELDSFKEELDKYFKNHTSPDVDLGDISGINASVVNIQKEIDRLNEVAKNLNESLIDLQELGKYEQYIKGGSGYIPEAPRDGQAYVRKDGEWVLLSTFL

SEQ ID NO: 6166 - protein, 1235 aa, Artificial Sequence
  SARS-CoV-2/pangolin/Guangxi/P4L/2017__EPI_ISL_410538 spike protein (1-1205)(P709C_P1063C) Foldon construct
MFVFLFVLPLVSSQCVNLTTRTGIPPGYTNSSTRGVYYPDKVFRSSILHLTQDLFLPFFSNVTWFNTINYQGGFKKFDNPVLPFNDGVYFASTEKSNIIRGWIFGTTLDARTQSLLIVNNATNVVIKVCEFQFCTDPFLGVYYHNNNKTWVENEFRVYSSANNCTFEYISQPFLMDLEGKQGNFKNLREFVFKNVDGYFKIYSKHTPIDLVRDLPRGFAALEPLVDLPIGINITRFQTLLALHRSYLTPGNLESGWTTGAAAYYVGYLQQRTFLLSYNQNGTITDAVDCSLDPLSETKCTLKSLTVEKGIYQTSNFRVQPTISIVRFPNITNLCPFGEVFNASKFASVYAWNRKRISNCVADYSVLYNSTSFSTFKCYGVSPTKLNDLCFTNVYADSFVVKGDEVRQIAPGQTGVIADYNYKLPDDFTGCVIAWNSVKQDALTGGNYGYLYRLFRKSKLKPFERDISTEIYQAGSTPCNGQVGLNCYYPLERYGFHPTTGVNYQPFRVVVLSFELLNGPATVCGPKLSTTLVKDKCVNFNFNGLTGTGVLTTSKKQFLPFQQFGRDISDTTDAVRDPQTLEILDITPCSFGGVSVITPGTNTSNQVAVLYQDVNCTEVPMAIHAEQLTPAWRVYSAGANVFQTRAGCLVGAEHVNNSYECDIPVGAGICASYHSMSSLRSVNQRSIIAYTMSLGAENSVAYSNNSIAICTNFTISVTTEILPVSMTKTSVDCTMYICGDSIECSNLLLQYGSFCTQLNRALTGIAVEQDKNTQEVFAQVKQIYKTPPIKDFGGFNFSQILPDPSKPSKRSFIEDLLFNKVTLADAGFIKQYGDCLGDIAARDLICAQKFNGLTVLPPLLTDEMIAQYTSALLAGTITSGWTFGAGAALQIPFAMQMAYRFNGIGVTQNVLYENQKLIANQFNSAIGKIQDSLSSTASALGKLQDVVNQNAQALNTLVKQLSSNFGAISSVLNDILSRLDKVEAEVQIDRLITGRLQSLQTYVTQQLIRAAEIRASANLAATKMSECVLGQSKRVDFCGKGYHLMSFPQSAPHGVVFLHVTYVCAQEKNFTTAPAICHEGKAHFPREGVFVSNGTHWFITQRNFYEPQIITTDNTFVSGSCDVVIGIVNNTVYDPLQPELDSFKEELDKYFKNHTSPDVDLGDISGINASVVNIQKEIDRLNEVAKNLNESPIDLQELGKYEQYIKGGSGYIPEAPRDGQAYVRKDGEWVLLSTFL

SEQ ID NO: 6167 - protein, 1235 aa, Artificial Sequence
  SARS-CoV-2/pangolin/Guangxi/P5L/2017__EPI_ISL_410540 spike protein (1-1205)(P709C_P1063C) Foldon construct
MFVFLFVLPLVSSQCVNLTTRTGIPPGYTNSSTRGVYYPDKVFRSSILHLTQDLFLPFFSNVTWFNTINYQGGFKKFDNPVLPFNDGVYFASTEKSNIIRGWIFGTTLDARTQSLLIVNNATNVVIKVCEFQFCTDPFLGVYYHNNNKTWVENEFRVYSSANNCTFEYISQPFLMDLEGKQGNFKNLREFVFKNVDGYFKIYSKHTPIDLVRDLPRGFAALEPLVDLPIGINITRFQTLLALHRSYLTPGKLESGWTTGAAAYYVGYLQQRTFLLSYNQNGTITDAVDCSLDPLSETKCTLKSLTVEKGIYQTSNFRVQPTISIVRFPNITNLCPFGEVFNASKFASVYAWNRKRISNCVADYSVLYNSTSFSTFKCYGVSPTKLNDLCFTNVYADSFVVKGDEVRQIAPGQTGVIADYNYKLPDDFTGCVIAWNSVKQDALTGGNYGYLYRLFRKSKLKPFERDISTEIYQAGSTPCNGQVGLNCYYPLERYGFHPTTGVNYQPFRVVVLSFELLNGPATVCGPKLSTTLVKDKCVNFNFNGLTGTGVLTTSKKQFLPFQQFGRDISDTTDAVRDPQTLEILDITPCSFGGVSVITPGTNTSNQVAVLYQDVNCTEVPMAIHAEQLTPAWRVYSAGANVFQTRAGCLVGAEHVNNSYECDIPVGAGICASYHSMSSFRSVNQRSIIAYTMSLGAENSVAYSNNSIAICTNFTISVTTEILPVSMTKTSVDCTMYICGDSIECSNLLLQYGSFCTQLNRALTGIAVEQDKNTQEVFAQVKQIYKTPPIKDFGGFNFSQILPDPSKPSKRSFIEDLLFNKVTLADAGFIKQYGDCLGDIAARDLICAQKFNGLTVLPPLLTDEMIAQYTSALLAGTITSGWTFGAGAALQIPFAMQMAYRFNGIGVTQNVLYENQKLIANQFNSAIGKIQDSLSSTASALGKLQDVVNQNAQALNTLVKQLSSNFGAISSVLNDILSRLDKVEAEVQIDRLITGRLQSLQTYVTQQLIRAAEIRASANLAATKMSECVLGQSKRVDFCGKGYHLMSFPQSAPHGVVFLHVTYVCAQEKNFTTAPAICHEGKAHFPREGVFVSNGTHWFITQRNFYEPQIITTDNTFVSGSCDVVIGIVNNTVYDPLQPELDSFKEELDKYFKNHTSPDVDLGDISGINASVVNIQKEIDRLNEVAKNLNESLIDLQELGKYEQYIKGGSGYIPEAPRDGQAYVRKDGEWVLLSTFL

SEQ ID NO: 6168 - protein, 1235 aa, Artificial Sequence
  SARS-CoV-2/pangolin/Guangxi/P5E/2017__EPI_ISL_410541 spike protein (1-1205)(P709C_P1063C) Foldon construct
MFVFLFVLPLVSSQCVNLTTRTGIPPGYTNSSTRGVYYPDKVFRSSILHLTQDLFLPFFSNVTWFNTITYQGGSKKFDNPVLPFNDGVYFASTEKSNIIRGWIFGTTLDARTQSLLIVNNATNVVIKVCEFQFCTDPFLGVYYHNNNKTWVENEFRVYSSANNCTFEYISQPFLMDLEGKQGNFKNLREFVFKNVDGYFKIYSKHTPIDLVRDLPRGFAALEPLVDLPIGINITRFQTLLALHRSYLTPGKLESGWTTGAAAYYVGYLQQRTFLLSYNQNGTITDAVDCSLDPLSETKCTLKSLTVEKGIYQTSNFRVQPTISIVRFPNITNLCPFGEVFNASKFASVYAWNRKRISNCVADYSVLYNSTSFSTFKCYGVSPTKLNDLCFTNVYADSFVVKGDEVRQIAPGQTGVIADYNYKLPDDFTGCVIAWNSVKQDALTGDNYGYLYRLFRKSKLKPFERDISTEIYQAGSTPCNGQVGLNCYYPLERYGFHPTTGVNYQPFRVVVLSFELLNGPATVCGPKLSTTLVKDKCVNFNFNGLTGTGVLTTSKKQFLPFQQFGRDISDTTDAVRDPQTLEILDITPCSFGGVSVITPGTNTSNQVAVLYQDVNCTEVPMAIHAEQLTPAWRVYSAGANVFQTRAGCLVGAEHVNNSYECDIPVGAGICASYHSMSSFRSVNQRSIIAYTMSLGAENSVAYSNNSIAICTNFTISVTTEILPVSMTKTSVDCTMYICGDSIECSNLLLQYGSFCTQLNRALTGIAVEQDKNTQEVFAQVKQIYKTPPIKDFGGFNFSQILPDPSKPSKRSFIEDLLFNKVTLADAGFIKQYGDCLGDIAARDLICAQKFNGLTVLPPLLTDEMIAQYTSALLAGTITSGWTFGAGAALQIPFAMQMAYRFNGIGVTQNVLYENQKLIANQFNSAIGKIQDSLSSTASALGKLQDVVNQNAQALNTLVKQLSSNFGAISSVLNDILSRLDKVEAEVQIDRLITGRLQSLQTYVTQQLIRAAEIRASANLAATKMSECVLGQSKRVDFCGKGYHLMSFPQSAPHGVVFLHVTYVCAQEKNFTTAPAICHEGKAHFPREGVFVSNGTHWFITQRNFYEPQIITTDNTFVSGSCDVVIGIVNNTVYDPLQPELDSFKEELDKYFKNHTSPDVDLGDISGINASVVNIQKEIDRLNEVAKNLNESLIDLQELGKYEQYIKGGSGYIPEAPRDGQAYVRKDGEWVLLSTFL

SEQ ID NO: 6169 - protein, 1233 aa, Artificial Sequence
  SARS-CoV-2/pangolin/Guangxi/P1E/2017__EPI_ISL_410539 spike protein (1-1203)(P707C_P1061C) Foldon construct
MFVFLFVLPLVSSQCVNLTTRTGIQPGYTNSSTRGVYYPDKVFRSSILHLTQDLFLPFFSNVTWFNTINYQGGFKKFDNPVLPFNDGVYFASTEKSNIIRGWIFGTTLDARTQSLLIVNNATNVVIKVCEFQFCTDPFLGVYYHNNNKTWVENEFRVYSSANNCTFEYISQPFLMDLEGKQGNFKNLREFVFKNVDGYFKIYSKHTPIDLVRDLPRGFAALEPLVDLPIGINITRFQTLLALHRSYLTPGKLESGWTTGAAAYYVGYLQQRTFLLSYNQNGTITDAVDCSLDPLSETKCTLKSLTVEKGIYQTSNFRVQPTISIVRFPNITNLCPFGEVFNASKFASVYAWNRKRISNCVADYSVLYNSTSFSTFKCYGVSPTKLNDLCFTNVYADSFVVKGDEVRQIAPGQTGVIADYNYKLPDDFTGCVIAWNSVKQDALTGGNYLYRLFRKSKLKPFERDISTEIYQAGSTPCNGQVGLNCYYPLERYGFHPTTGVNYQPFRVVVLSFELLNGPATVCGPKLSTTLVKDKCVNFNFNGLTGTGVLTTSKKQFLPFQQFGRDISDTTDAVRDPQTLEILDITPCSFGGVSVITPGTNTSNQVAVLYQDVNCTEVPMAIHAEQLTPAWRVYSAGANVFQTRAGCLVGAEHVNNSYECDIPVGAGICASYHSMSSLRSVNQRSIIAYTMSLGAENSVAYSNNSIAICTNFTISVTTEILPVSMTKTSVDCTMYICGDSIECSNLLLQYGSFCTQLNRALTGIAVEQDKNTQEVFAQVKQIYKTPPIKDFGGFNFSQILPDPSKPSKRSFIEDLLFNKVTLADAGFIKQYGDCLGDIAARDLICAQKFNGLTVLPPLLTDEMIAQYTSALLAGTITSGWTFGAGAALQIPFAMQMAYRFNGIGVTQNVLYENQKLIANQFNSAIGKIQDSLSSTASALGKLQDVVNQNAQALNTLVKQLSSNFGAISSVLNDILSRLDKVEAEVQIDRLITGRLQSLQTYVTQQLIRAAEIRASANLAATKMSECVLGQSKRVDFCGKGYHLMSFPQSAPHGVVFLHVTYVCAQEKNFTTAPAICHEGKAHFPREGVFVSNGTHWFITQRNFYEPQIITTDNTFVSGSCDVVIGIVNNTVYDPLQPELDSFKEELDKYFKNHTSPDVDLGDISGINASVVNIQKEIDRLNEVAKNLNESLIDLQELGKYEQYIKGGSGYIPEAPRDGQAYVRKDGEWVLLSTFL

SEQ ID NO: 6170 - protein, 1241 aa, Artificial Sequence
  SARS-CoV-2/Wuhan/WIV05/2019__EPI_ISL_402128 spike protein (1-1211)(G889C_L1034C) Foldon construct
MFVFLVLLPLVSSQCVNLTTRTQLPPAYTNSFTRGVYYPDKVFRSSVLHSTQDLFLPFFSNVTWFHAIHVSGTNGTKRFDNPVLPFNDGVYFASTEKSNIIRGWIFGTTLDSKTQSLLIVNNATNVVIKVCEFQFCNDPFLGVYYHKNNKSWMESEFRVYSSANNCTFEYVSQPFLMDLEGKQGNFKNLREFVFKNIDGYFKIYSKHTPINLVRDLPQGFSALEPLVDLPIGINITRFQTLLALHRSYLTPGDSSSGWTAGAAAYYVGYLQPRTFLLKYNENGTITDAVDCALDPLSETKCTLKSFTVEKGIYQTSNFRVQPTESIVRFPNITNLCPFGEVFNATRFASVYAWNRKRISNCVADYSVLYNSASFSTFKCYGVSPTKLNDLCFTNVYADSFVIRGDEVRQIAPGQTGKIADYNYKLPDDFTGCVIAWNSNNLDSKVGGNYNYLYRLFRKSNLKPFERDISTEIYQAGSTPCNGVEGFNCYFPLQSYGFQPTNGVGYQPYRVVVLSFELLHAPATVCGPKKSTNLVKNKCVNFNFNGLTGTGVLTESNKKFLPFQQFGRDIADTTDAVRDPQTLEILDITPCSFGGVSVITPGTNTSNQVAVLYQDVNCTEVPVAIHADQLTPTWRVYSTGSNVFQTRAGCLIGAEHVNNSYECDIPIGAGICASYQTQTNSPRRARSVASQSIIAYTMSLGAENSVAYSNNSIAIPTNFTISVTTEILPVSMTKTSVDCTMYICGDSTECSNLLLQYGSFCTQLNRALTGIAVEQDKNTQEVFAQVKQIYKTPPIKDFGGFNFSQILPDPSKPSKRSFIEDLLFNKVTLADAGFIKQYGDCLGDIAARDLICAQKFNGLTVLPPLLTDEMIAQYTSALLAGTITSGWTFCAGAALQIPFAMQMAYRFNGIGVTQNVLYENQKLIANQFNSAIGKIQDSLSSTASALGKLQDVVNQNAQALNTLVKQLSSNFGAISSVLNDILSRLDKVEAEVQIDRLITGRLQSLQTYVTQQLIRAAEIRASANLAATKMSECVCGQSKRVDFCGKGYHLMSFPQSAPHGVVFLHVTYVPAQEKNFTTAPAICHDGKAHFPREGVFVSNGTHWFVTQRNFYEPQIITTDNTFVSGNCDVVIGIVNNTVYDPLQPELDSFKEELDKYFKNHTSPDVDLGDISGINASVVNIQKEIDRLNEVAKNLNESLIDLQELGKYEQYIKGGSGYIPEAPRDGQAYVRKDGEWVLLSTFL

SEQ ID NO: 6171 - protein, 1237 aa, Artificial Sequence
  SARS-CoV-2/bat/Yunnan/RaTG13/2013__EPI_ISL_402131 spike protein (1-1207)(G885C_L1030C) Foldon construct
MFVFLVLLPLVSSQCVNLTTRTQLPPAYTNSSTRGVYYPDKVFRSSVLHLTQDLFLPFFSNVTWFHAIHVSGTNGIKRFDNPVLPFNDGVYFASTEKSNIIRGWIFGTTLDSKTQSLLIVNNATNVVIKVCEFQFCNDPFLGVYYHKNNKSWMESEFRVYSSANNCTFEYVSQPFLMDLEGKQGNFKNLREFVFKNIDGYFKIYSKHTPINLVRDLPPGFSALEPLVDLPIGINITRFQTLLALHRSYLTPGDSSSGWTAGAAAYYVGYLQPRTFLLKYNENGTITDAVDCALDPLSETKCTLKSFTVEKGIYQTSNFRVQPTDSIVRFPNITNLCPFGEVFNATTFASVYAWNRKRISNCVADYSVLYNSTSFSTFKCYGVSPTKLNDLCFTNVYADSFVITGDEVRQIAPGQTGKIADYNYKLPDDFTGCVIAWNSKHIDAKEGGNFNYLYRLFRKANLKPFERDISTEIYQAGSKPCNGQTGLNCYYPLYRYGFYPTDGVGHQPYRVVVLSFELLNAPATVCGPKKSTNLVKNKCVNFNFNGLTGTGVLTESNKKFLPFQQFGRDIADTTDAVRDPQTLEILDITPCSFGGVSVITPGTNASNQVAVLYQDVNCTEVPVAIHADQLTPTWRVYSTGSNVFQTRAGCLIGAEHVNNSYECDIPIGAGICASYQTQTNSRSVASQSIIAYTMSLGAENSVAYSNNSIAIPTNFTISVTTEILPVSMTKTSVDCTMYICGDSTECSNLLLQYGSFCTQLNRALTGIAVEQDKNTQEVFAQVKQIYKTPPIKDFGGFNFSQILPDPSKPSKRSFIEDLLFNKVTLADAGFIKQYGDCLGDIAARDLICAQKFNGLTVLPPLLTDEMIAQYTSALLAGTITSGWTFCAGAALQIPFAMQMAYRFNGIGVTQNVLYENQKLIANQFNSAIGKIQDSLSSTASALGKLQDVVNQNAQALNTLVKQLSSNFGAISSVLNDILSRLDKVEAEVQIDRLITGRLQSLQTYVTQQLIRAAEIRASANLAATKMSECVCGQSKRVDFCGKGYHLMSFPQSAPHGVVFLHVTYVPAQEKNFTTAPAICHDGKAHFPREGVFVSNGTHWFVTQRNFYEPQIITTDNTFVSGSCDVVIGIVNNTVYDPLQPELDSFKEELDKYFKNHTSPDVDLGDISGINASVVNIQKEIDRLNEVAKNLNESLIDLQELGKYEQYIKGGSGYIPEAPRDGQAYVRKDGEWVLLSTFL

SEQ ID NO: 6172 - protein, 1241 aa, Artificial Sequence
  SARS-CoV-2/Wuhan/HBCDC-HB-01/2019__EPI_ISL_402132 spike protein (1-1211)(G889C_L1034C) Foldon construct
MFVFLVLLPLVSSQCVNLTTRTQLPPAYTNSITRGVYYPDKVFRSSVLHSTQDLFLPFFSNVTWFHAIHVSGTNGTKRFDNPVLPFNDGVYFASTEKSNIIRGWIFGTTLDSKTQSLLIVNNATNVVIKVCEFQFCNDPFLGVYYHKNNKSWMESEFRVYSSANNCTFEYVSQPFLMDLEGKQGNFKNLREFVFKNIDGYFKIYSKHTPINLVRDLPQGFSALEPLVDLPIGINITRFQTLLALHRSYLTPGDSSSGWTAGAAAYYVGYLQPRTFLLKYNENGTITDAVDCALDPLSETKCTLKSFTVEKGIYQTSNFRVQPTESIVRFPNITNLCPFGEVFNATRFASVYAWNRKRISNCVADYSVLYNSASFSTFKCYGVSPTKLNDLCFTNVYADSFVIRGDEVRQIAPGQTGKIADYNYKLPDDFTGCVIAWNSNNLDSKVGGNYNYLYRLFRKSNLKPFERDISTEIYQAGSTPCNGVEGFNCYFPLQSYGFQPTNGVGYQPYRVVVLSFELLHAPATVCGPKKSTNLVKNKCVNFNFNGLTGTGVLTESNKKFLPFQQFGRDIADTTDAVRDPQTLEILDITPCSFGGVSVITPGTNTSNQVAVLYQDVNCTEVPVAIHADQLTPTWRVYSTGSNVFQTRAGCLIGAEHVNNSYECDIPIGAGICASYQTQTNSPRRARSVASQSIIAYTMSLGAENSVAYSNNSIAIPTNFTISVTTEILPVSMTKTSVDCTMYICGDSTECSNLLLQYGSFCTQLNRALTGIAVEQDKNTQEVFAQVKQIYKTPPIKDFGGFNFSQILPDPSKPSKRSFIEDLLFNKVTLADAGFIKQYGDCLGDIAARDLICAQKFNGLTVLPPLLTDEMIAQYTSALLAGTITSGWTFCAGAALQIPFAMQMAYRFNGIGVTQNVLYENQKLIANQFNSAIGKIQDSLSSTASALGKLQDVVNQNAQALNTLVKQLSSNFGAISSVLNDILSRLDKVEAEVQIDRLITGRLQSLQTYVTQQLIRAAEIRASANLAATKMSECVCGQSKRVDFCGKGYHLMSFPQSAPHGVVFLHVTYVPAQEKNFTTAPAICHDGKAHFPREGVFVSNGTHWFVTQRNFYEPQIITTDNTFVSGNCDVVIGIVNNTVYDPLQPELDSFKEELDKYFKNHTSPDVDLGDISGINASVVNIQKEIDRLNEVAKNLNESLIDLQELGKYEQYIKGGSGYIPEAPRDGQAYVRKDGEWVLLSTFL

SEQ ID NO: 6173 - protein, 1241 aa, Artificial Sequence
  SARS-CoV-2/Guangdong/20SF028/2020__EPI_ISL_403936 spike protein (1-1211)(G889C_L1034C) Foldon construct
MFVFLVLLPLVSSQCVNLTTRTQLPPAYTNSFTRGVYYPDKVFRSSVLYSTQDLFLPFFSNVTWFHAIHVSGTNGTKRFDNPVLPFNDGVYFASTEKSNIIRGWIFGTTLDSKTQSLLIVNNATNVVIKVCEFQFCNDPFLGVYYHKNNKSWMESEFRVYSSANNCTFEYVSQPFLMDLEGKQGNFKNLREFVFKNIDGYFKIYSKHTPINLVRDLPQGFSALEPLVDLPIGINITRFQTLLALHRSYLTPGDSSSGWTAGAAAYYVGYLQPRTFLLKYNENGTITDAVDCALDPLSETKCTLKSFTVEKGIYQTSNFRVQPTESIVRFPNITNLCPFGEVFNATRFASVYAWNRKRISNCVADYSVLYNSASFSTFKCYGVSPTKLNDLCFTNVYADSFVIRGDEVRQIAPGQTGKIADYNYKLPDDFTGCVIAWNSNNLDSKVGGNYNYLYRLFRKSNLKPFERDISTEIYQAGSTPCNGVEGFNCYFPLQSYGFQPTNGVGYQPYRVVVLSFELLHAPATVCGPKKSTNLVKNKCVNFNFNGLTGTGVLTESNKKFLPFQQFGRDIADTTDAVRDPQTLEILDITPCSFGGVSVITPGTNTSNQVAVLYQDVNCTEVPVAIHADQLTPTWRVYSTGSNVFQTRAGCLIGAEHVNNSYECDIPIGAGICASYQTQTNSPRRARSVASQSIIAYTMSLGAENSVAYSNNSIAIPTNFTISVTTEILPVSMTKTSVDCTMYICGDSTECSNLLLQYGSFCTQLNRALTGIAVEQDKNTQEVFAQVKQIYKTPPIKDFGGFNFSQILPDPSKPSKRSFIEDLLFNKVTLADAGFIKQYGDCLGDIAARDLICAQKFNGLTVLPPLLTDEMIAQYTSALLAGTITSGWTFCAGAALQIPFAMQMAYRFNGIGVTQNVLYENQKLIANQFNSAIGKIQDSLSSTASALGKLQDVVNQNAQALNTLVKQLSSNFGAISSVLNDILSRLDKVEAEVQIDRLITGRLQSLQTYVTQQLIRAAEIRASANLAATKMSECVCGQSKRVDFCGKGYHLMSFPQSAPHGVVFLHVTYVPAQEKNFTTAPAICHDGKAHFPREGVFVSNGTHWFVTQRNFYEPQIITTDNTFVSGNCDVVIGIVNNTVYDPLQPELDSFKEELDKYFKNHTSPDVDLGDISGINASVVNIQKEIDRLNEVAKNLNESLIDLQELGKYEQYIKGGSGYIPEAPRDGQAYVRKDGEWVLLSTFL

SEQ ID NO: 6174 - protein, 1241 aa, Artificial Sequence
  SARS-CoV-2/Shenzhen/SZTH-001/2020__EPI_ISL_406592 spike protein (1-1211)(G889C_L1034C) Foldon construct
MFVFLVLLPLVSSQCVNLTTRTQLPPAYTNSFTRGVYYPDKVFRSSVLHSTQDLFLPFFSNVTWFHAIHVSGTNGTKRFDNPVLPFNDGVYFASTEKSNIIRGWIFGTTLDSKTQSLLIVNNATNVVIKVCEFQFCNDPFLGVYYHKNNKSWMESEFRVYSSANNCTFEYVSQPFLMDLEGKQGNFKNLREFVFKNIDGYFKIYSKHTPINLVRDLPQGFSALEPLVDLPIGINITRFQTLLALHRSYLTPGDSSSGWTAGAAAYYVGYLQPRTFLLKYNENGTITDAVDCALDPLSETKCTLKSFTVEKGIYQTSNFRVQPTESIVRFPNITNLCPFGEVFNATRFASVYAWNRKRISNCVADYSVLYNSASFSTFKCYGVSPTKLNDLCFTNVYADSFVIRGDEVRQIAPGQTGKIADYNYKLPDDFTGCVIAWNSNNLDSKVGGNYNYLYRLFRKSNLKPFERDISTEIYQAGSTPCNGVEGFNCYFPLQSYGFQPTNGVGYQPYRVVVLSFELLHAPATVCGPKKSTNLVKNKCVNFNFNGLTGTGVLTESNKKFLPFQQFGRDIADTTDAVRDPQTLEILDITPCSFGGVSVITPGTNTSNQVAVLYQDVNCTEVPVAIHADQLTPTWRVYSTGSNVFQTRAGCLIGAEHVNNSYECDIPIGAGICASYQTQTNSPRRARSVASQSIIAYTMSLGAENSVAYSNNSIAIPTNFTISVTTEILPVSMTKTSVDCTMYICGDSTECSNLLLQYGSFCTQLNRALTGIAVEQDKNTQEVFAQVKQIYKTPPIKDFGGFNFSQILPDPSKPSKRSFIEDLLFNKVTLADAGFIKQYGDCLGDIAARDLICAQKFNGLTVLPPLLTDEMIAQYTSALLAGTITSGWTFCAGAALQIPFAMQMAYRFNGIGVTQNVLYENQKLIANQFNSAIGKIQDSLSSTASALGKLQDVVNQNAQALNTLVKQLSSNFGAISSVLNDILSRLDKVEAEVQIDRLITGRLQSLQTYVTQQLIRAAEIRASANLAATKMSECVCGQSKRVDFCGKGYHLMSFPQSAPHGVVFLHVTYVPAQEKNFTTAPAICHDGKAHFPREGVFVSNGTHWFVTQRNFYEPQIITTDNTFVSGNCDVLIGIVNNTVYDPLQPELDSFKEELDKYFKNHTSPDVDLGDISGINASVVNIQKEIDRLNEVAKNLNESLIDLQELGKYEQYIKGGSGYIPEAPRDGQAYVRKDGEWVLLSTFL

SEQ ID NO: 6175 - protein, 1241 aa, Artificial Sequence
  SARS-CoV-2/Shenzhen/SZTH-004/2020__EPI_ISL_406595 spike protein (1-1211)(G889C_L1034C) Foldon construct
MFVFLVLLPLVSSQCVNLTTRTQLPPAYTNSFTRGVYYPDKVFRSSVLHSTQDLFLPFFSNVTWFHAIHVSGTNGTKRFDNPVLPFNDGVYFASTEKSNIIRGWIFGTTLDSKTQSLLIVNNATNVVIKVCEFQFCNDPFLGVYYHKNNKSWMESEFRVYSSANNCTFEYVSQPFLMDLEGKQGNFKNLREFVFKNIDGYFKIYSKHTPINLVRDLPQGFSALEPLVDLPIGINITRFQTLLALHRSYLTPGDSSSGWTAGAAAYYVGYLQPRTFLLKYNENGTITDAVDCALDPLSETKCTLKSFTVEKGIYQTSNFRVQPTESIVRFPNITNLCPFGEVFNATRFASVYAWDRKRISNCVAYYSVLYNSASFSTFKCYGVSPTKLNDLCFTNVYADSFVIRGDEVRQIAPGQTGKIADYNYKLPDDFTGCVIAWNSNNLDSKVGGNYNYLYRLFRKSNLKPFERDISTEIYQAGSTPCNGVEGFNCYFPLQSYGFQPTNGVGYQPYRVVVLSFELLHAPATVCGPKKSTNLVKNKCVNFNFNGLTGTGVLTESNKKFLPFQQFGRDIADTTDAVRDPQTLEILDITPCSFGGVSVITPGTNTSNQVAVLYQDVNCTEVPVAIHADQLTPTWRVYSTGSNVFQTRAGCLIGAEHVNNSYECDIPIGAGICASYQTQTNSPRRARSVASQSIIAYTMSLGAENSVAYSNNSIAIPTNFTISVTTEILPVSMTKTSVDCTMYICGDSTECSNLLLQYGSFCTQLNRALTGIAVEQDKNTQEVFAQVKQIYKTPPIKDFGGFNFSQILPDPSKPSKRSFIEDLLFNKVTLADAGFIKQYGDCLGDIAARDLICAQKFNGLTVLPPLLTDEMIAQYTSALLAGTITSGWTFCAGAALQIPFAMQMAYRFNGIGVTQNVLYENQKLIANQFNSAIGKIQDSLSSTASALGKLQDVVNQNAQALNTLVKQLSSNFGAISSVLNDILSRLDKVEAEVQIDRLITGRLQSLQTYVTQQLIRAAEIRASANLAATKMSECVCGQSKRVDFCGKGYHLMSFPQSAPHGVVFLHVTYVPAQEKNFTTAPAICHDGKAHFPREGVFVSNGTHWFVTQRNFYEPQIITTDNTFVSGNCDVVIGIVNNTVYDPLQPELDSFKEELDKYFKNHTSPDVDLGDISGINASVVNIQKEIDRLNEVAKNLNESLIDLQELGKYEQYIKGGSGYIPEAPRDGQAYVRKDGEWVLLSTFL

SEQ ID NO: 6176 - protein, 1241 aa, Artificial Sequence
  SARS-CoV-2/France/IDF0372/2020__EPI_ISL_406596 spike protein (1-1211)(G889C_L1034C) Foldon construct
MFVFLVLLPLVSSQCVNLTTRTQLPPAYTNSFTRGVYYPDKVFRSSVLHSTQDLFLPFFSNVTWFHAIHVSGTNGTKRFDNPVLPFNDGVYFASTEKSNIIRGWIFGTTLDSKTQSLLIVNNATNVVIKVCEFQFCNDPFLGVYYHKNNKSWMESEFRVYSSANNCTFEYVSQPFLMDLEGKQGNFKNLREFVFKNIDGYFKIYSKHTPINLVRDLPQGFSALEPLVDLPIGINITRFQTLLALHRSYLTPGDSSSGWTAGAAAYYVGYLQPRTFLLKYNENGTITDAVDCALDPLSETKCTLKSFTVEKGIYQTSNFRVQPTESIVRFPNITNLCPFGEVFNATRFASVYAWNRKRISNCVADYSFLYNSASFSTFKCYGVSPTKLNDLCFTNVYADSFVIRGDEVRQIAPGQTGKIADYNYKLPDDFTGCVIAWNSNNLDSKVGGNYNYLYRLFRKSNLKPFERDISTEIYQAGSTPCNGVEGFNCYFPLQSYGFQPTNGVGYQPYRVVVLSFELLHAPATVCGPKKSTNLVKNKCVNFNFNGLTGTGVLTESNKKFLPFQQFGRDIADTTDAVRDPQTLEILDITPCSFGGVSVITPGTNTSNQVAVLYQDVNCTEVPVAIHADQLTPTWRVYSTGSNVFQTRAGCLIGAEHVNNSYECDIPIGAGICASYQTQTNSPRRARSVASQSIIAYTMSLGAENSVAYSNNSIAIPTNFTISVTTEILPVSMTKTSVDCTMYICGDSTECSNLLLQYGSFCTQLNRALTGIAVEQDKNTQEVFAQVKQIYKTPPIKDFGGFNFSQILPDPSKPSKRSFIEDLLFNKVTLADAGFIKQYGDCLGDIAARDLICAQKFNGLTVLPPLLTDEMIAQYTSALLAGTITSGWTFCAGAALQIPFAMQMAYRFNGIGVTQNVLYENQKLIANQFNSAIGKIQDSLSSTASALGKLQDVVNQNAQALNTLVKQLSSNFGAISSVLNDILSRLDKVEAEVQIDRLITGRLQSLQTYVTQQLIRAAEIRASANLAATKMSECVCGQSKRVDFCGKGYHLMSFPQSAPHGVVFLHVTYVPAQEKNFTTAPAICHDGKAHFPREGVFVSNGTHWFVTQRNFYEPQIITTDNTFVSGNCDVVIGIVNNTVYDPLQPELDSFKEELDKYFKNHTSPDVDLGDISGINASVVNIQKEIDRLNEVAKNLNESLIDLQELGKYEQYIKGGSGYIPEAPRDGQAYVRKDGEWVLLSTFL

SEQ ID NO: 6177 - protein, 1241 aa, Artificial Sequence
  SARS-CoV-2/Australia/VIC01/2020__EPI_ISL_406844 spike protein (1-1211)(G889C_L1034C) Foldon construct
MFVFLVLLPLVSSQCVNLTTRTQLPPAYTNSFTRGVYYPDKVFRSSVLHSTQDLFLPFFSNVTWFHAIHVSGTNGTKRFDNPVLPFNDGVYFASTEKSNIIRGWIFGTTLDSKTQSLLIVNNATNVVIKVCEFQFCNDPFLGVYYHKNNKSWMESEFRVYSSANNCTFEYVSQPFLMDLEGKQGNFKNLREFVFKNIDGYFKIYSKHTPINLVRDLPQGFSALEPLVDLPIGINITRFQTLLALHRRYLTPGDSSSGWTAGAAAYYVGYLQPRTFLLKYNENGTITDAVDCALDPLSETKCTLKSFTVEKGIYQTSNFRVQPTESIVRFPNITNLCPFGEVFNATRFASVYAWNRKRISNCVADYSVLYNSASFSTFKCYGVSPTKLNDLCFTNVYADSFVIRGDEVRQIAPGQTGKIADYNYKLPDDFTGCVIAWNSNNLDSKVGGNYNYLYRLFRKSNLKPFERDISTEIYQAGSTPCNGVEGFNCYFPLQSYGFQPTNGVGYQPYRVVVLSFELLHAPATVCGPKKSTNLVKNKCVNFNFNGLTGTGVLTESNKKFLPFQQFGRDIADTTDAVRDPQTLEILDITPCSFGGVSVITPGTNTSNQVAVLYQDVNCTEVPVAIHADQLTPTWRVYSTGSNVFQTRAGCLIGAEHVNNSYECDIPIGAGICASYQTQTNSPRRARSVASQSIIAYTMSLGAENSVAYSNNSIAIPTNFTISVTTEILPVSMTKTSVDCTMYICGDSTECSNLLLQYGSFCTQLNRALTGIAVEQDKNTQEVFAQVKQIYKTPPIKDFGGFNFSQILPDPSKPSKRSFIEDLLFNKVTLADAGFIKQYGDCLGDIAARDLICAQKFNGLTVLPPLLTDEMIAQYTSALLAGTITSGWTFCAGAALQIPFAMQMAYRFNGIGVTQNVLYENQKLIANQFNSAIGKIQDSLSSTASALGKLQDVVNQNAQALNTLVKQLSSNFGAISSVLNDILSRLDKVEAEVQIDRLITGRLQSLQTYVTQQLIRAAEIRASANLAATKMSECVCGQSKRVDFCGKGYHLMSFPQSAPHGVVFLHVTYVPAQEKNFTTAPAICHDGKAHFPREGVFVSNGTHWFVTQRNFYEPQIITTDNTFVSGNCDVVIGIVNNTVYDPLQPELDSFKEELDKYFKNHTSPDVDLGDISGINASVVNIQKEIDRLNEVAKNLNESLIDLQELGKYEQYIKGGSGYIPEAPRDGQAYVRKDGEWVLLSTFL

SEQ ID NO: 6178 - protein, 1241 aa, Artificial Sequence
  SARS-CoV-2/Germany/BavPat1/2020__EPI_ISL_406862 spike protein (1-1211)(G889C_L1034C) Foldon construct
MFVFLVLLPLVSSQCVNLTTRTQLPPAYTNSFTRGVYYPDKVFRSSVLHSTQDLFLPFFSNVTWFHAIHVSGTNGTKRFDNPVLPFNDGVYFASTEKSNIIRGWIFGTTLDSKTQSLLIVNNATNVVIKVCEFQFCNDPFLGVYYHKNNKSWMESEFRVYSSANNCTFEYVSQPFLMDLEGKQGNFKNLREFVFKNIDGYFKIYSKHTPINLVRDLPQGFSALEPLVDLPIGINITRFQTLLALHRSYLTPGDSSSGWTAGAAAYYVGYLQPRTFLLKYNENGTITDAVDCALDPLSETKCTLKSFTVEKGIYQTSNFRVQPTESIVRFPNITNLCPFGEVFNATRFASVYAWNRKRISNCVADYSVLYNSASFSTFKCYGVSPTKLNDLCFTNVYADSFVIRGDEVRQIAPGQTGKIADYNYKLPDDFTGCVIAWNSNNLDSKVGGNYNYLYRLFRKSNLKPFERDISTEIYQAGSTPCNGVEGFNCYFPLQSYGFQPTNGVGYQPYRVVVLSFELLHAPATVCGPKKSTNLVKNKCVNFNFNGLTGTGVLTESNKKFLPFQQFGRDIADTTDAVRDPQTLEILDITPCSFGGVSVITPGTNTSNQVAVLYQGVNCTEVPVAIHADQLTPTWRVYSTGSNVFQTRAGCLIGAEHVNNSYECDIPIGAGICASYQTQTNSPRRARSVASQSIIAYTMSLGAENSVAYSNNSIAIPTNFTISVTTEILPVSMTKTSVDCTMYICGDSTECSNLLLQYGSFCTQLNRALTGIAVEQDKNTQEVFAQVKQIYKTPPIKDFGGFNFSQILPDPSKPSKRSFIEDLLFNKVTLADAGFIKQYGDCLGDIAARDLICAQKFNGLTVLPPLLTDEMIAQYTSALLAGTITSGWTFCAGAALQIPFAMQMAYRFNGIGVTQNVLYENQKLIANQFNSAIGKIQDSLSSTASALGKLQDVVNQNAQALNTLVKQLSSNFGAISSVLNDILSRLDKVEAEVQIDRLITGRLQSLQTYVTQQLIRAAEIRASANLAATKMSECVCGQSKRVDFCGKGYHLMSFPQSAPHGVVFLHVTYVPAQEKNFTTAPAICHDGKAHFPREGVFVSNGTHWFVTQRNFYEPQIITTDNTFVSGNCDVVIGIVNNTVYDPLQPELDSFKEELDKYFKNHTSPDVDLGDISGINASVVNIQKEIDRLNEVAKNLNESLIDLQELGKYEQYIKGGSGYIPEAPRDGQAYVRKDGEWVLLSTFL

SEQ ID NO: 6179 - protein, 1241 aa, Artificial Sequence
  SARS-CoV-2/Wuhan/HBCDC-HB-02/2020__EPI_ISL_412978 spike protein (1-1211)(G889C_L1034C) Foldon construct
MFVFLVLLPLVSSQCVNLTTRTQLPPAYTNSFTRGVYYPDKVFRSSVLHSTQDLFLPFFSNVTWFHAIHVSGTNGTKRFDNPVLPFNDGVYFASTEKSNIIRGWIFGTTLDSKTQSLLIVNNATNVVIKVCEFQFCNDPFLGVYYHKNNKSWMESEFRVYSSANNCTFEYVSQPFLMDLEGKQGNFKNLREFVFKNIDGYFKIYSKHTPINLVRDLPQGFSALEPLVDLPIGINITRFQTLLALHRSYLTPGDSSSGWTAGAAAYYVGYLQPRTFLLKYNENGTITDAVDCALDPLSETKCTLKSFTVEKGIYQTSNFRVQPTESIVRFPNITNLCPFGEVFNATRFASVYAWNRKRISNCVADYSVLYNSASFSTFKCYGVSPTKLNDLCFTNVYADSFVIRGDEVRQIAPGQTGKIADYNYKLPDDFTGCVIAWNSNNLDSKVGGNYNYLYRLFRKSNLKPFERDISTEIYQAGSTPCNGVEGFNCYFPLQSYGFQPTNGVGYQPYRVVVLSFELLHAPATVCGPKKSTNLVKNKCVNFNFNGLTGTGVLTESNKKFLPFQQFGRDIADTTDAVRDPQTLEILDITPCSFGGVSVITPGTNTSNQVAVLYQDVNCTEVPVAIHADQLTPTWRVYSTGSNVFQTRAGCLIGAEHVNNSYECDIPIGAGICASYQTQTNSPRRARSVASQSIIAYTMSLGAENSVAYSNNSIAIPTNFTISVTTEILPVSMTKTSVDCTMYICGDSTECSNFLLQYGSFCTQLNRALTGIAVEQDKNTQEVFAQVKQIYKTPPIKDFGGFNFSQILPDPSKPSKRSFIEDLLFNKVTLADAGFIKQYGDCLGDIAARDLICAQKFNGLTVLPPLLTDEMIAQYTSALLAGTITSGWTFCAGAALQIPFAMQMAYRFNGIGVTQNVLYENQKLIANQFNSAIGKIQDSLSSTASALGKLQDVVNQNAQALNTLVKQLSSNFGAISSVLNDILSRLDKVEAEVQIDRLITGRLQSLQTYVTQQLIRAAEIRASANLAATKMSECVCGQSKRVDFCGKGYHLMSFPQSAPHGVVFLHVTYVPAQEKNFTTAPAICHDGKAHFPREGVFVSNGTHWFVTQRNFYEPQIITTDNTFVSGNCDVVIGIVNNTVYDPLQPELDSFKEELDKYFKNHTSPDVDLGDISGINASVVNIQKEIDRLNEVAKNLNESLIDLQELGKYEQYIKGGSGYIPEAPRDGQAYVRKDGEWVLLSTFL

SEQ ID NO: 6180 - protein, 1241 aa, Artificial Sequence
  SARS-CoV-2/Australia/QLD02/2020__EPI_ISL_407896 spike protein (1-1211)(G889C_L1034C) Foldon construct
MFVFLVLLPLVSSQCVNLTTRTQLPPAYTNSFTRGVYYPDKVFRSSVLHSTQDLFLPFFSNVTWFHAIHVSGTNGTKRFDNPVLPFNDGVYFASTEKSNIIRGWIFGTTLDSKTQSLLIVNNATNVVIKVCEFQFCNDPFLGVYYHKNNKSWMESEFRVYSSANNCTFEYVSQPFLMDLEGKQGNFKNLREFVFKNIDGYFKIYSKHTPINLVRDLPQGFSALEPLVDLPIGINITRFQTLLALHRSYLTPGDSSSGWTAGAAAYYVGYLQPRTFLLKYNENGTITDAVDCALDPLSETKCTLKSFTVEKGIYQTSNFRVQPTESIVRFPNITNLCPFGEVFNATRFASVYAWNRKRISNCVADYSVLYNSASFSTFKCYGVSPTKLNDLCFTNVYADSFVIRGDEVRQIAPGQTGKIADYNYKLPDDFTGCVIAWNSNNLDSKVGGNYNYLYRLFRKSNLKPFERDISTEIYQAGSTPCNGVEGFNCYFPLQSYGFQPTNGVGYQPYRVVVLSFELLHAPATVCGPKKSTNLVKNKCVNFNFNGLTGTGVLTESNKKFLPFQQFGRDIADTTDAVRDPQTLEILDITPCSFGGVSVITPGTNTSNQVAVLYQDVNCTEVPVAIHADQLTPTWRVYSTGSNVFQTRAGCLIGAEHVNNSYECDIPIGAGICASYQTQTNSPRRARSVASQSIIAYTMSLGAENSVAYSNNSIAIPTNFTISVTTEILPVSMTKTSVDCTMYICGDSTECSNLLLQYGSFCTQLNRALTGIAVEQDKNTQEVFAQVKQIYKTPPIKDFGGFNFSQILPDPSKPSKRSFIEDLLFNKVTLADAGFIKQYGDCLGDIAARDLICAQKFNGLTVLPPLLTDEMIAQYTSALLAGTITSGWTFCAGAALQIPFAMQMAYRFNGIGVTQNVLYENQKLIANQFNSAIGKIQDSLSSTASALGKLQDVVNQNAQALNTLVKQLSSNFGAISSVLNDILSRLDKVEAEVQIDRLITGRLQSLQTYVTQQLIRAAEIRASANLAATKMSECVCGQSKRVDFCGKGYHLMSFPQSAPHGVVFLHVTYVPAQEKNFTTAPAICHDGKAHFPREGVFVSNGTHWFVTQRNFYEPQIITTDNTFVSGNCDVVIGIVNNTVYDPLQLELDSFKEELDKYFKNHTSPDVDLGDISGINASVVNIQKEIDRLNEVAKNLNESLIDLQELGKYEQYIKGGSGYIPEAPRDGQAYVRKDGEWVLLSTFL

SEQ ID NO: 6181 - protein, 1241 aa, Artificial Sequence
  SARS-CoV-2/India/1-31/2020__EPI_ISL_413523 spike protein (1-1211)(G889C_L1034C) Foldon construct
MFVFLVLLPLVSSQCVNLTTRTQLPPAYTNSFTRGVYYPDKVFRSSVLHSTQDLFLPFFSNVTWFHAIHVSGTNGTKRFDNPVLPFNDGVYFASTEKSNIIRGWIFGTTLDSKTQSLLIVNNATNVVIKVCEFQFCNDPFLGVYYHKNNKSWMESEFRVYSSANNCTFEYVSQPFLMDLEGKQGNFKNLREFVFKNIDGYFKIYSKHTPINLVRDLPQGFSALEPLVDLPIGINITRFQTLLALHRSYLTPGDSSSGWTAGAAAYYVGYLQPRTFLLKYNENGTITDAVDCALDPLSETKCTLKSFTVEKGIYQTSNFRVQPTESIVRFPNITNLCPFGEVFNATRFASVYAWNRKRISNCVADYSVLYNSASFSTFKCYGVSPTKLNDLCFTNVYADSFVIRGDEVRQIAPGQTGKIADYNYKLPDDFTGCVIAWNSNNLDSKVGGNYNYLYRLFRKSNLKPFERDISTEIYQAGSTPCNGVEGFNCYFPLQSYGFQPTNGVGYQPYRVVVLSFELLHAPATVCGPKKSTNLVKNKCVNFNFNGLTGTGVLTESNKKFLPFQQFGRDIADTTDAVRDPQTLEILDITPCSFGGVSVITPGTNTSNQVAVLYQDVNCTEVPVAIHADQLTPTWRVYSTGSNVFQTRAGCLIGAEHVNNSYECDIPIGAGICASYQTQTNSPRRARSVASQSIIAYTMSLGAENSVAYSNNSIAIPTNFTISVTTEILPVSMTKTSVDCTMYICGDSTECSNLLLQYGSFCTQLNRALTGIAVEQDKNTQEVFAQVKQIYKTPPIKDFGGFNFSQILPDPSKPSKRSFIEDLLFNKVTLADAGFIKQYGDCLGDIAARDLICAQKFNGLTVLPPLLTDEMIAQYTSALLAGTITSGWTFCAGAALQIPFAMQMAYRFNGIGVTQNVLYENQKLIANQFNSVIGKIQDSLSSTASALGKLQDVVNQNAQALNTLVKQLSSNFGAISSVLNDILSRLDKVEAEVQIDRLITGRLQSLQTYVTQQLIRAAEIRASANLAATKMSECVCGQSKRVDFCGKGYHLMSFPQSAPHGVVFLHVTYVPAQEKNFTTAPAICHDGKAHFPREGVFVSNGTHWFVTQRNFYEPQIITTDNTFVSGNCDVVIGIVNNTVYDPLQPELDSFKEELDKYFKNHTSPDVDLGDISGINASVVNIQKEIDRLNEVAKNLNESLIDLQELGKYEQYIKGGSGYIPEAPRDGQAYVRKDGEWVLLSTFL

SEQ ID NO: 6182 - protein, 1241 aa, Artificial Sequence
  SARS-CoV-2/Guangdong/GD2020087-P0008/2020__EPI_ISL_413863 spike protein (1-1211)(G889C_L1034C) Foldon construct
MFVFLVLLPLVSSQCVNLTTRTQLPPAYTNSFTRGVYYPDKVFRSSVLHSTQDLFLPFFSNVTWFHAIHVSGTNGTKRFDNPVLPFNDGVYFASTEKSNIIRGWIFGTTLDSKTQSLLIVNNATNVVIKVCEFQFCNDPFLGVYYHKNNKSWMESEFRVYSSANNCTFEYVSQPFLMDLEGKQGNFKNLREFVFKNIDGYFKIYSKHTPINLVRDLPQGFSALEPLVDLPIGINITRFQTLLALHRSYLTPGDSSSGWTAGAAAYYVGYLQPRTFLLKYNENGTITDAVDCALDPLSETKCTLKSFTVEKGIYQTSNFRVQPTESIVRFPNITNLCPFGEVFNATRFASVYAWNRKRISNCVADYSVLYNSASFSTFKCYGVSPTKLNDLCFTNVYADSFVIRGDEVREIAPGQTGKIADYNYKLPDDFTGCVIAWNSNNLDSKVGGNYNYLYRLFRKSNLKPFERDISTEIYQAGSTPCNGVEGFNCYFPLQSYGFQPTNGVGYQPYRVVVLSFELLHAPATVCGPKKSTNLVKNKCVNFNFNGLTGTGVLTESNKKFLPFQQFGRDIADTTDAVRDPQTLEILDITPCSFGGVSVITPGTNTSNQVAVLYQDVNCTEVPVAIHADQLTPTWRVYSTGSNVFQTRAGCLIGAEHVNNSYECDIPIGAGICASYQTQTNSPRRARSVASQSIIAYTMSLGAENSVAYSNNSIAIPTNFTISVTTEILPVSMTKTSVDCTMYICGDSTECSNLLLQYGSFCTQLNRALTGIAVEQDKNTQEVFAQVKQIYKTPPIKDFGGFNFSQILPDPSKPSKRSFIEDLLFNKVTLADAGFIKQYGDCLGDIAARDLICAQKFNGLTVLPPLLTDEMIAQYTSALLAGTITSGWTFCAGAALQIPFAMQMAYRFNGIGVTQNVLYENQKLIANQFNSAIGKIQDSLSSTASALGKLQDVVNQNAQALNTLVKQLSSNFGAISSVLNDILSRLDKVEAEVQIDRLITGRLQSLQTYVTQQLIRAAEIRASANLAATKMSECVCGQSKRVDFCGKGYHLMSFPQSAPHGVVFLHVTYVPAQEKNFTTAPAICHDGKAHFPREGVFVSNGTHWFVTQRNFYEPQIITTDNTFVSGNCDVVIGIVNNTVYDPLQPELDSFKEELDKYFKNHTSPDVDLGDISGINASVVNIQKEIDRLNEVAKNLNESLIDLQELGKYEQYIKGGSGYIPEAPRDGQAYVRKDGEWVLLSTFL

SEQ ID NO: 6183 - protein, 1241 aa, Artificial Sequence
  SARS-CoV-2/Sweden/01/2020__EPI_ISL_411951 spike protein (1-1211)(G889C_L1034C) Foldon construct
MFVFLVLLPLVSSQCVNLTTRTQLPPAYTNSFTRGVYYPDKVFRSSVLHSTQDLFLPFFSNVTWFHAIHVSGTNGTKRFDNPVLPFNDGVYFASTEKSNIIRGWIFGTTLDSKTQSLLIVNNATNVVIKVCEFQFCNDPFLGVYYHKNNKSWMESEFRVYSSANNCTFEYVSQPFLMDLEGKQGNFKNLREFVFKNIDGYFKIYSKHTPINLVRDLPQGFSALEPLVDLPIGINITRFQTLLALHRSYLTPGDSSSGWTAGAAAYYVGYLQPRTFLLKYNENGTITDAVDCALDPLSETKCTLKSFTVEKGIYQTSNFRVQPTESIVRFPNITNLCPFGEVFNATRFASVYAWNRKRISNCVADYSVLYNSASFSTFKCYGVSPTKLNDLCFTNVYADSFVIRGDEVRQIAPGQTGKIADYNYKLPDDFTGCVIAWNSNNLDSKVGGNYNYLYRLFRKSNLKPFERDISTEIYQAGSTPCNGVEGFNCYFPLQSYGFQPTNGVGYQPYRVVVLSFELLHAPATVCGPKKSTNLVKNKCVNFNFNGLTGTGVLTESNKKFLPFQQFGRDIADTTDAVRDPQTLEILDITPCSFGGVSVITPGTNTSNQVAVLYQDVNCTEVPVAIHADQLTPTWRVYSTGSNVFQTRAGCLIGAEHVNNSYECDIPIGAGICASYQTQTNSPRRARSVASQSIIAYTMSLGAENSVAYSNNSIAIPTNFTISVTTEILPVSMTKTSVDCTMYICGDSTECSNLLLQYGSFCTQLNRALTGIAVEQDKNTQEVFAQVKQIYKTPPIKDCGGFNFSQILPDPSKPSKRSFIEDLLFNKVTLADAGFIKQYGDCLGDIAARDLICAQKFNGLTVLPPLLTDEMIAQYTSALLAGTITSGWTFCAGAALQIPFAMQMAYRFNGIGVTQNVLYENQKLIANQFNSAIGKIQDSLSSTASALGKLQDVVNQNAQALNTLVKQLSSNFGAISSVLNDILSRLDKVEAEVQIDRLITGRLQSLQTYVTQQLIRAAEIRASANLAATKMSECVCGQSKRVDFCGKGYHLMSFPQSAPHGVVFLHVTYVPAQEKNFTTAPAICHDGKAHFPREGVFVSNGTHWFVTQRNFYEPQIITTDNTFVSGNCDVVIGIVNNTVYDPLQPELDSFKEELDKYFKNHTSPDVDLGDISGINASVVNIQKEIDRLNEVAKNLNESLIDLQELGKYEQYIKGGSGYIPEAPRDGQAYVRKDGEWVLLSTFL

SEQ ID NO: 6184 - protein, 1241 aa, Artificial Sequence
  SARS-CoV-2/Tianmen/HBCDC-HB-07/2020__EPI_ISL_412983 spike protein (1-1211)(G889C_L1034C) Foldon construct
MFVFLVLLPLVSSQCVNLTTRTQLPPAYTNSFTRGVYYPDKVFRSSVLHSTQDLFLPFFSNVTWFHAIHVSGTNGTKRFDNPVLPFNDGVYFASTEKSNIIRGWIFGTTLDSKTQSLLIVNNATNVVIKVCEFQFCNDPFLGVYYHKNNKSWMESEFRVYSSANNCTFEYVSQPFLMDLEGKQGNFKNLREFVFKNIDGYFKIYSKHTPINLVRDLPQGFSALEPLVDLPIGINITRFQTLLALHRSYLTPGDSSSGWTAGAAAYYVGYLQPRTFLLKYNENGTITDAVDCALDPLSETKCTLKSFTVEKGIYQTSNFRVQPTESIVRFPNITNLCPFGEVFNATRFASVYAWNRKRISNCVADYSVLYNSASFSTFKCYGVSPTKLNDLCFTNVYADSFVIRGDEVRQIAPGQTGKIADYNYKLPDDFTGCVIAWNSNNLDSKVGGNYNYLYRLFRKSNLKPFERDISTEIYQAGSTPCNGVEGFNCYFPLQSYGFQPTNGVGYQPYRVVVLSFELLHAPATVCGPKKSTNLVKNKCVNFNFNGLTGTGVLTESNKKFLPFQQFGRDIADTTDAVRDPQTLEILDITPCSFGGVSVITPGTNTSNQVAVLYQDLNCTEVPVAIHADQLTPTWRVYSTGSNVFQTRAGCLIGAEHVNNSYECDIPIGAGICASYQTQTNSPRRARSVASQSIIAYTMSLGAENSVAYSNNSIAIPTNFTISVTTEILPVSMTKTSVDCTMYICGDSTECSNLLLQYGSFCTQLNRALTGIAVEQDKNTQEVFAQVKQIYKTPPIKDFGGFNFSQILPDPSKPSKRSFIEDLLFNKVTLADAGFIKQYGDCLGDIAARDLICAQKFNGLTVLPPLLTDEMIAQYTSALLAGTITSGWTFCAGAALQIPFAMQMAYRFNGIGVTQNVLYENQKLIANQFNSAIGKIQDSLSSTASALGKLQDVVNQNAQALNTLVKQLSSNFGAISSVLNDILSRLDKVEAEVQIDRLITGRLQSLQTYVTQQLIRAAEIRASANLAATKMSECVCGQSKRVDFCGKGYHLMSFPQSAPHGVVFLHVTYVPAQEKNFTTAPAICHDGKAHFPREGVFVSNGTHWFVTQRNFYEPQIITTDNTFVSGNCDVVIGIVNNTVYDPLQPELDSFKEELDKYFKNHTSPDVDLGDISGINASVVNIQKEIDRLNEVAKNLNESLIDLQELGKYEQYIKGGSGYIPEAPRDGQAYVRKDGEWVLLSTFL

SEQ ID NO: 6185 - protein, 1241 aa, Artificial Sequence
  SARS-CoV-2/Hong Kong/case42_VM20002493/2020__EPI_ISL_414527 spike protein (1-1211)(G889C_L1034C) Foldon construct
MFVFLVLLPLVSSQCVNLTTRTQLPPAYTNSFTRGVYYPDKVFRSSVLHSTQDLFLPFFSNVTWFHAIHVSGTNGTKRFDNPVLPFNDGVYFASTEKSNIIRGWIFGTTLDSKTQSLLIVNNATNVVIKVCEFQFCNDPFLGVYYHKNNKSWMESEFRVYSSANNCTFEYVSQPFLMDLEGKQGNFKNLREFVFKNIDGYFKIYSKHTPINLVRDLPQGFSALEPLVDLPIGINITRFQTLLALHRSYLTPGDSSSGWTAGAAAYYVGYLQPRTFLLKYNENGTITDAVDCALDPLSETKCTLKSFTVEKGIYQTSNFRVQPTESIVRFPNITNLCPFGEVFNATRFASVYAWNRKRISNCVADYSVLYNSASFSTFKCYGVSPTKLNDLCFTNVYADSFVIRGDEVRQIAPGQTGKIADYNYKLPDDFTGCVIAWNSNNLDSKVGGNYNYLYRLFRKSNLKPFERDISTEIYQAGSTPCNGVEGFNCYFPLQSYGFQPTNGVGYQPYRVVVLSFELLHAPATVCGPKKSTNLVKNKCVNFNFNGLTGTGVLTESNKKFLPFQQFGRDIADTTDAVRDPQTLEILDITPCSFGGVSVITPGTNTSNQVAVLYQDVNCTEVPVAIHADQLTPTWRVYSTGSNVFQTRAGCLIGAEHVNNSYECDIPIGAGICASYQTQTNSPRRARSVASQSIIAYTMSLGAENSVAYSNNSIAIPTNFAISVTTEILPVSMTKTSVDCTMYICGDSTECSNLLLQYGSFCTQLNRALTGIAVEQDKNTQEVFAQVKQIYKTPPIKDFGGFNFSQILPDPSKPSKRSFIEDLLFNKVTLADAGFIKQYGDCLGDIAARDLICAQKFNGLTVLPPLLTDEMIAQYTSALLAGTITSGWTFCAGAALQIPFAMQMAYRFNGIGVTQNVLYENQKLIANQFNSAIGKIQDSLSSTASALGKLQDVVNQNAQALNTLVKQLSSNFGAISSVLNDILSRLDKVEAEVQIDRLITGRLQSLQTYVTQQLIRAAEIRASANLAATKMSECVCGQSKRVDFCGKGYHLMSFPQSAPHGVVFLHVTYVPAQEKNFTTAPAICHDGKAHFPREGVFVSNGTHWFVTQRNFYEPQIITTDNTFVSGNCDVVIGIVNNTVYDPLQPELDSFKEELDKYFKNHTSPDVDLGDISGINASVVNIQKEIDRLNEVAKNLNESLIDLQELGKYEQYIKGGSGYIPEAPRDGQAYVRKDGEWVLLSTFL

SEQ ID NO: 6186 - protein, 1241 aa, Artificial Sequence
  SARS-CoV-2/USA/CruiseA-23/2020__EPI_ISL_414482 spike protein (1-1211)(G889C_L1034C) Foldon construct
MFVFLVLLPLVSSQCVNLTTRTQLPPAYTNSFTRGVYYPDKVFRSSVLHSTQDLFLPFFSNVTWFHAIHVSGTNGTKRFDNPVLPFNDGVYFASTEKSNIIRGWIFGTTLDSKTQSLLIVNNATNVVIKVCEFQFCNDPFLGVYYHKNNKSWMESEFRVYSSANNCTFEYVSQPFLMDLEVKQGNFKNLREFVFKNIDGYFKIYSKHTPINLVRDLPQGFSALEPLVDLPIGINITRFQTLLALHRSYLTPGDSSSGWTAGAAAYYVGYLQPRTFLLKYNENGTITDAVDCALDPLSETKCTLKSFTVEKGIYQTSNFRVQPTESIVRFPNITNLCPFGEVFNATRFASVYAWNRKRISNCVADYSVLYNSASFSTFKCYGVSPTKLNDLCFTNVYADSFVIRGDEVRQIAPGQTGKIADYNYKLPDDFTGCVIAWNSNNLDSKVGGNYNYLYRLFRKSNLKPFERDISTEIYQAGSTPCNGVEGFNCYFPLQSYGFQPTNGVGYQPYRVVVLSFELLHAPATVCGPKKSTNLVKNKCVNFNFNGLTGTGVLTESNKKFLPFQQFGRDIADTTDAVRDPQTLEILDITPCSFGGVSVITPGTNTSNQVAVLYQDVNCTEVPVAIHADQLTPTWRVYSTGSNVFQTRAGCLIGAEHVNNSYECDIPIGAGICASYQTQTNSPRRARSVASQSIIAYTMSLGAENSVAYSNNSIAIPTNFTISVTTEILPVSMTKTSVDCTMYICGDSTECSNLLLQYGSFCTQLNRALTGIAVEQDKNTQEVFAQVKQIYKTPPIKDFGGFNFSQILPDPSKPSKRSFIEDLLFNKVTLADAGFIKQYGDCLGDIAARDLICAQKFNGLTVLPPLLTDEMIAQYTSALLAGTITSGWTFCAGAALQIPFAMQMAYRFNGIGVTQNVLYENQKLIANQFNSAIGKIQDSLSSTASALGKLQDVVNQNAQALNTLVKQLSSNFGAISSVLNDILSRLDKVEAEVQIDRLITGRLQSLQTYVTQQLIRAAEIRASANLAATKMSECVCGQSKRVDFCGKGYHLMSFPQSAPHGVVFLHVTYVPAQEKNFTTAPAICHDGKAHFPREGVFVSNGTHWFVTQRNFYEPQIITTDNTFVSGNCDVVIGIVNNTVYDPLQPELDSFKEELDKYFKNHTSPDVDLGDISGINASVVNIQKEIDRLNEVAKNLNESLIDLQELGKYEQYIKGGSGYIPEAPRDGQAYVRKDGEWVLLSTFL

SEQ ID NO: 6187 - protein, 1241 aa, Artificial Sequence
  SARS-CoV-2/Hong Kong/case85_VM20002868/2020__EPI_ISL_414519 spike protein (1-1211)(G889C_L1034C) Foldon construct
MFVFLVLVPLVSSQCVNLTTRTQLPPAYTNSFTRGVYYPDKVFRSSVLHSTQDLFLPFFSNVTWFHAIHVSGTNGTKRFDNPVLPFNDGVYFASTEKSNIIRGWIFGTTLDSKTQSLLIVNNATNVVIKVCEFQFCNDPFLGVYYHKNNKSWMESEFRVYSSANNCTFEYVSQPFLMDLEGKQGNFKNLREFVFKNIDGYFKIYSKHTPINLVRDLPQGFSALEPLVDLPIGINITRFQTLLALHRSYLTPGDSSSGWTAGAAAYYVGYLQPRTFLLKYNENGTITDAVDCALDPLSETKCTLKSFTVEKGIYQTSNFRVQPTESIVRFPNITNLCPFGEVFNATRFASVYAWNRKRISNCVADYSVLYNSASFSTFKCYGVSPTKLNDLCFTNVYADSFVIRGDEVRQIAPGQTGKIADYNYKLPDDFTGCVIAWNSNNLDSKVGGNYNYLYRLFRKSNLKPFERDISTEIYQAGSTPCNGVEGFNCYFPLQSYGFQPTNGVGYQPYRVVVLSFELLHAPATVCGPKKSTNLVKNKCVNFNFNGLTGTGVLTESNKKFLPFQQFGRDIADTTDAVRDPQTLEILDITPCSFGGVSVITPGTNTSNQVAVLYQDVNCTEVPVAIHADQLTPTWRVYSTGSNVFQTRAGCLIGAEHVNNSYECDIPIGAGICASYQTQTNSPRRARSVASQSIIAYTMSLGAENSVAYSNNSIAIPTNFTISVTTEILPVSMTKTSVDCTMYICGDSTECSNLLLQYGSFCTQLNRALTGIAVEQDKNTQEVFAQVKQIYKTPPIKDFGGFNFSQILPDPSKPSKRSFIEDLLFNKVTLADAGFIKQYGDCLGDIAARDLICAQKFNGLTVLPPLLTDEMIAQYTSALLAGTITSGWTFCAGAALQIPFAMQMAYRFNGIGVTQNVLYENQKLIANQFNSAIGKIQDSLSSTASALGKLQDVVNQNAQALNTLVKQLSSNFGAISSVLNDILSRLDKVEAEVQIDRLITGRLQSLQTYVTQQLIRAAEIRASANLAATKMSECVCGQSKRVDFCGKGYHLMSFPQSAPHGVVFLHVTYVPAQEKNFTTAPAICHDGKAHFPREGVFVSNGTHWFVTQRNFYEPQIITTDNTFVSGNCDVVIGIVNNTVYDPLQPELDSFKEELDKYFKNHTSPDVDLGDISGINASVVNIQKEIDRLNEVAKNLNESLIDLQELGKYEQYIKGGSGYIPEAPRDGQAYVRKDGEWVLLSTFL

SEQ ID NO: 6188 - protein, 1241 aa, Artificial Sequence; identical to SEQ ID NO: 6178
  SARS-CoV-2/England/200990660/2020__EPI_ISL_414523 spike protein (1-1211)(G889C_L1034C) Foldon construct

SEQ ID NO: 6189 - protein, 1241 aa, Artificial Sequence
  SARS-CoV-2/Australia/NSW09/2020__EPI_ISL_413595 spike protein (1-1211)(G889C_L1034C) Foldon construct
MFVFLVLLPLVSSQCVNLTTRTQLPPAYTNSFTRGVYYPDKVFRSSVLHSTQDLFLPFFSNVTWFHAIHVSGTNGTKRFDNPVLPFNDGVYFASTEKSNIIRGWIFGTTLDSKTQSLLIVNNATNVVIKVCEFQFCNDPFLGVYYHKNNKSWMESEFRVYSSANNCTFEYVSQPFLMDLEGKQGNFKNLREFVFKNIDGYFKIYSKHTPINLVRDLPQGFSALEPLVDLPIGINITRFQTLLALHRSYLTPGDSSSGWTAGAAAYYVGYLQPRTFLLKYNENGTITDAVDCALDPLSETKCTLKSFTVEKGIYQTSNFRVQPTESIVRFPNITNLCPFGEVFNATRFASVYAWNRKRISNCVADYSVLYNSASFSTFKCYGVSPTKLNDLCFTNVYADSFVIRGDEVRQIAPGQTGKIADYNYKLPDDFTGCVIAWNSNNLDSKVGGNYNYLYRLFRKSNLKPFERDISTEIYQAGSTPCNGVEGFNCYFPLQSYGFQPTNGVGYQPYRVVVLSFELLHAPATVCGPKKSTNLVKNKCVNFNFNGLTGTGVLTESNKKFLPFQQFGRDIADTTDAVRDPQTLEILDITPCSFGGVSVITPGTNTSNQVAVLYQDVNCTEVPVAIHADQLTPTWRVYSTGSNVFQTRAGCLIGAEHVNNSYECDIPIGAGICASYQTQTNSPRRARSVASQSIIAYTMSLGAENSVAYSNNSIAIPTNFTISVTTEILPVSMTKTSVDCTMYICGDSTECSNLLLQYGSFCTQLNRALTGIAVEQDKNTQEVFAQVKQIYKTPPIKDFGGFNFSQILPDPSKPSKRSFIEDLLFNKVTLADAGFIKQYGDCLGDIAARDLICAQKFNGLTVLPPLLTDEMIAQYTSALLAGTITSGWTFCAGAALQIPFAMQMAYRFNGIGVTQNVLYENQKLIANQFNSAIGKIQDSLSFTASALGKLQDVVNQNAQALNTLVKQLSSNFGAISSVLNDILSRLDKVEAEVQIDRLITGRLQSLQTYVTQQLIRAAEIRASANLAATKMSECVCGQSKRVDFCGKGYHLMSFPQSAPHGVVFLHVTYVPAQEKNFTTAPAICHDGKAHFPREGVFVSNGTHWFVTQRNFYEPQIITTDNTFVSGNCDVVIGIVNNTVYDPLQPELDSFKEELDKYFKNHTSPDVDLGDISGINASVVNIQKEIDRLNEVAKNLNESLIDLQELGKYEQYIKGGSGYIPEAPRDGQAYVRKDGEWVLLSTFL

SEQ ID NO: 6190 - protein, 1241 aa, Artificial Sequence; identical to SEQ ID NO: 6170
  SARS-CoV-2/Australia/NSW10/2020__EPI_ISL_413596 spike protein (1-1211)(G889C_L1034C) Foldon construct

SEQ ID NO: 6191 - protein, 1241 aa, Artificial Sequence
  SARS-CoV-2/Switzerland/1000477797/2020__EPI_ISL_413023 spike protein (1-1211)(G889C_L1034C) Foldon construct
MFVFLVLLPLVSSQCVNLTTRTQLPPAYTNSFTRGVYYPDKVFRSSVLHSTQDLFLPFFSNVTWFHAIHVSGTNGTKRFDNPVLPFNDGVYFASTEKSNIIRGWIFGTTLDSKTQSLLIVNNATNVVIKVCEFQFCNDPFLGVYYHKNNKSWMESEFRVYSSANNCTFEYVSQPFLMDLEGKQGNFKNLREFVFKNIDGYFNIYSKHTPINLVRDLPQGFSALEPLVDLPIGINITRFQTLLALHRSYLTPGDSSSGWTAGAAAYYVGYLQPRTFLLKYNENGTITDAVDCALDPLSETKCTLKSFTVEKGIYQTSNFRVQPTESIVRFPNITNLCPFGEVFNATRFASVYAWNRKRISNCVADYSVLYNSASFSTFKCYGVSPTKLNDLCFTNVYADSFVIRGDEVRQIAPGQTGKIADYNYKLPDDFTGCVIAWNSNNLDSKVGGNYNYLYRLFRKSNLKPFERDISTEIYQAGSTPCNGVEGFNCYFPLQSYGFQPTNGVGYQPYRVVVLSFELLHAPATVCGPKKSTNLVKNKCVNFNFNGLTGTGVLTESNKKFLPFQQFGRDIADTTDAVRDPQTLEILDITPCSFGGVSVITPGTNTSNQVAVLYQGVNCTEVPVAIHADQLTPTWRVYSTGSNVFQTRAGCLIGAEHVNNSYECDIPIGAGICASYQTQTNSPRRARSVASQSIIAYTMSLGAENSVAYSNNSIAIPTNFTISVTTEILPVSMTKTSVDCTMYICGDSTECSNLLLQYGSFCTQLNRALTGIAVEQDKNTQEVFAQVKQIYKTPPIKDFGGFNFSQILPDPSKPSKRSFIEDLLFNKVTLADAGFIKQYGDCLGDIAARDLICAQKFNGLTVLPPLLTDEMIAQYTSALLAGTITSGWTFCAGAALQIPFAMQMAYRFNGIGVTQNVLYENQKLIANQFNSAIGKIQDSLSSTASALGKLQDVVNQNAQALNTLVKQLSSNFGAISSVLNDILSRLDKVEAEVQIDRLITGRLQSLQTYVTQQLIRAAEIRASANLAATKMSECVCGQSKRVDFCGKGYHLMSFPQSAPHGVVFLHVTYVPAQEKNFTTAPAICHDGKAHFPREGVFVSNGTHWFVTQRNFYEPQIITTDNTFVSGNCDVVIGIVNNTVYDPLQPELDSFKEELDKYFKNHTSPDVDLGDISGINASVVNIQKEIDRLNEVAKNLNESLIDLQELGKYEQYIKGGSGYIPEAPRDGQAYVRKDGEWVLLSTFL

SEQ ID NO: 6192 - protein, 1241 aa, Artificial Sequence
  SARS-CoV-2/Belgium/BA-02291/2020__EPI_ISL_415159 spike protein (1-1211)(G889C_L1034C) Foldon construct
MFVFLVLLPLVSSQCVNLTTRTQLPPAYTNSFTRGVYYPDKVFRSSVLHSTQDLFLPFFSNVTWFHAIHVSGTNGTKRFDNPVLPFNDGVYFASTEKSNIIRGWIFGTTLDSKTQSLLIVNNATNVVIKVCEFQFCNDPFLGVYYHKNNKSWMESEFRVYSSANNCTFEYVSQPFLMDLEGKQGNFKNLREFVFKNIDGYFKIYSKHTPINLVRDLPQGFSALEPLVDLPIGINITRFQTLLALHRSYLTPGDSSSGWTAGAAAYYVGYLQPRTFLLKYNENGTITDAVDCALDPLSETKCTLKSFTVEKGIYQTSNFRVQPTESIVRFPNITNLCPFGEVFNATRFASVYAWNRKRISNCVADYSVLYNSASFSTFKCYGVSPTKLNDLCFTNVYADSFVIRGDEVRQIAPGQTGKIADYNYKLPDDFTGCVIAWNSNNLDSKVGGNYNYLYRLFRRSNLKPFERDISTEIYQAGSTPCNGVEGFNCYFPLQSYGFQPTNGVGYQPYRVVVLSFELLPAPATVCGPKKSTNLVKNKCVNFNFNGLTGTGVLTESNKKFLPFQQFGRDIADTTDAVRDPQTLEILDITPCSFGGVSVITPGTNTSNQVAVLYQGVNCTEVPVAIHADQLTPTWRVYSTGSNVFQTRAGCLIGAEHVNNSYECDIPIGAGICASYQTQTNSPRRARSVASQSIIAYTMSLGAENSVAYSNNSIAIPTNFTISVTTEILPVSMTKTSVDCTMYICGDSTECSNLLLQYGSFCTQLNRALTGIAVEQDKNTQEVFAQVKQIYKTPPIKDFGGFNFSQILPDPSKPSKRSFIEDLLFNKVTLADAGFIKQYGDCLGDIAARDLICAQKFNGLTVLPPLLTDEMIAQYTSALLAGTITSGWTFCAGAALQIPFAMQMAYRFNGIGVTQNVLYENQKLIANQFNSAIGKIQDSLSSAAPALGKLQDVVNQNAQALNTLVKQLSSNFGAISSVLNDILSRLDKVEAEVQIDRLITGRLQSLQTYVTQQLIRAAEIRASANLAATKMSECVCGQSKRVDFCGKGYHLMSFPQSAPHGVVFLHVTYVPAQEKNFTTAPAICHDGKAHFPREGVFVSNGTHWFVTQRNFYEPQIITTDNTFVSGNCDVVIGIVNNTVYDPLQPELDSFKEELDKYFKNHTSPDVDLGDISGINASVVNIQKEIDRLNEVAKNLNESLIDLQELGKYEQYIKGGSGYIPEAPRDGQAYVRKDGEWVLLSTFL

SEQ ID NO: 6193 - protein, 1241 aa, Artificial Sequence
  SARS-CoV-2/USA/WA8-UW5/2020__EPI_ISL_413486 spike protein (1-1211)(G889C_L1034C) Foldon construct
MFVFLVLLPLVSSQCVNLTTRTQLPPAYTNSFTRGVYYPDKVFRSSVLHSTQDLFLPFFSNVTWFHAIHVSGTNGTKRFDNPVLPFNDGVYFASTEKSNIIRGWIFGTTLDSKTQSLLIVNNATNVVIKVCEFQFCNDPFLGVYYHKNNKSWMESEFRVYSSANNCTFEYVSQPFLMDLEGKQGNFKNLREFVFKNIDGYFKIYSKHTPINLVRDLPQGFSALEPLVDLPIGINITRFQTLLALHRSYLTPGDSSSGWTAGAAAYYVGYLQPRTFLLKYNENGTITDAVDCALDPLSETKCTLKSFTVEKGIYQTSNFRVQPTESIVRFPNITNLCPFGEVFNATRFASVYAWNRKRISNCVADYSVLYNSASFSTFKCYGVSPTKLNDLCFTNVYADSFVIRGDEVRQIAPGQTGKIADYNYKLPDDFTGCVIAWNSNNLDSKVGGNYNYLYRLFRKSNLKPFERDISTEIYQAGSTPCNGVEGFNCYFPLQSYGFQPTNGVGYQPYRVVVLSFELLHAPATVCGPKKSTNLVKNKCVNFNFNGLTGTGVLTESNKKFLPFQQFGRDIADTTDAVRDPQTLEILDITPCSFGGVSVITPGTNTSNQVAVLYQDVNCTEVPVAIHADQLTPTWRVYSTGSNVFQTRAGCLIGAEYVNNSYECDIPIGAGICASYQTQTNSPRRARSVASQSIIAYTMSLGAENSVAYSNNSIAIPTNFTISVTTEILPVSMTKTSVDCTMYICGDSTECSNLLLQYGSFCTQLNRALTGIAVEQDKNTQEVFAQVKQIYKTPPIKDFGGFNFSQILPDPSKPSKRSFIEDLLFNKVTLADAGFIKQYGDCLGDIAARDLICAQKFNGLTVLPPLLTDEMIAQYTSALLAGTITSGWTFCAGAALQIPFAMQMAYRFNGIGVTQNVLYENQKLIANQFNSAIGKIQDSLSSTASALGKLQDVVNQNAQALNTLVKQLSSNFGAISSVLNDILSRLDKVEAEVQIDRLITGRLQSLQTYVTQQLIRAAEIRASANLAATKMSECVCGQSKRVDFCGKGYHLMSFPQSAPHGVVFLHVTYVPAQEKNFTTAPAICHDGKAHFPREGVFVSNGTHWFVTQRNFYEPQIITTDNTFVSGNCDVVIGIVNNTVYDPLQPELDSFKEELDKYFKNHTSPDVDLGDISGINASVVNIQKEIDRLNEVAKNLNESLIDLQELGKYEQYIKGGSGYIPEAPRDGQAYVRKDGEWVLLSTFL

SEQ ID NO: 6194 - protein, 1241 aa, Artificial Sequence
  SARS-CoV-2/England/20102000506/2020__EPI_ISL_415147 spike protein (1-1211)(G889C_L1034C) Foldon construct
MFVFLVLLPLVSSQCVNLTTRTQLPPAYTNSFTRGVYYPDKVFRSSVLHSTQDLFLPFFSNVTWFHAIHVSGTNGTKRFDNPVLPFNDGVYFASTEKSNIIRGWIFGTTLDSKTQSLLIVNNATNVVIKVCEFQFCNDPFLGVYYHKNNKSWMESEFRVYSSANNCTFEYVSQPFLMDLEGKQGNFKNLREFVFKNIDGYFKIYSKHTPINLVRDLPQGFSALEPLVDLPIGINITRFQTLLALHRSYLTPGDSSSGWTAGAAAYYVGYLQPRTFLLKYNENGTITDAVDCALDPLSETKCTLKSFTVEKGIYQTSNFRVQPTESIVRFPNITNLCPFGEVFNATRFASVYAWNRKRISNCVADYSVLYNSASFSTFKCYGVSPTKLNDLCFTNVYADSFVIRGDEVRQIAPGQTGKIADYNYKLPDDFTGCVIAWNSNNLDSKVGGNYNYLYRLFRKSNLKPFERDISTEIYQAGSTPCNGVEGFNCYFPLQSYGFQPTNGVGYQPYRVVVLSFELLHAPATVCGPKKSTNLVKNKCVNFNFNGLTGTGVLTESNKKFLPFQQFGRDIADTTDAVRDPQTLEILDITPCSFGGVSVITPGTNTSNQVAVLYQGVNCTEVPVAIHADQLTPTWRVYSTGSNVFQTRAGCLIGAEHVNNSYECDIPIGAGICASYQTQTNSPRRARSVASQSIIAYTMSLGAENSVAYSNNSIAIPTNFTISVTTEILPVSMTKTSVDCTMYICGDSTECSNLLLQYGSFCTQLNRALTGIAVEQDKNTQEVFAQVKQIYKTPPIKDFGGFNFSQILPDPSKPSKRSFIEDLLFNKVTLADAGFIKQYGYCLGDIAARDLICAQKFNGLTVLPPLLTDEMIAQYTSALLAGTITSGWTFCAGAALQIPFAMQMAYRFNGIGVTQNVLYENQKLIANQFNSAIGKIQDSLSSTASALGKLQDVVNQNAQALNTLVKQLSSNFGAISSVLNDILSRLDKVEAEVQIDRLITGRLQSLQTYVTQQLIRAAEIRASANLAATKMSECVCGQSKRVDFCGKGYHLMSFPQSAPHGVVFLHVTYVPAQEKNFTTAPAICHDGKAHFPREGVFVSNGTHWFVTQRNFYEPQIITTDNTFVSGNCDVVIGIVNNTVYDPLQPELDSFKEELDKYFKNHTSPDVDLGDISGINASVVNIQKEIDRLNEVAKNLNESLIDLQELGKYEQYIKGGSGYIPEAPRDGQAYVRKDGEWVLLSTFL

SEQ ID NO: 6195 - protein, 1241 aa, Artificial Sequence
  SARS-CoV-2/Belgium/VAG-03013/2020__EPI_ISL_415155 spike protein (1-1211)(G889C_L1034C) Foldon construct
MFVFLVLLPLVSSQCVNLTTRTQLPPAYTNSFTRGVYYPDKVFRSSVLHSTQDLFLPFFSNVTWFHAIHVSGTNGTKRFDNPVLPFNDGVYFASTEKSNIIRGWIFGTTLDSKTQSLLIVNNATNVVIKVCEFQFCNDPFLGVYYHKNNKSWMESEFRVYSSANNCTFEYVSQPFLMDLEGKQGNFKNLREFVFKNIDGYFKIYSKHTPINLVRDLPQGFSALEPLVDLPIGINITRFQTLLALHRSYLTPGDSSSGWTAGAAAYYVGYLQPRTFLLKYNENGTITDAVDCALDPLSETKCTLKSFTVEKGIYQTSNFRVQPTESIVRFPNITNLCPFGEVFNATRFASVYAWNRKRISNCVADYSVLYNSASFSTFKCYGVSPTKLNDLCFTNVYADSFVIRGDEVRQIAPGQTGKIADYNYKLPDDFTGCVIAWNSNNLDSKVGGNYNYLYRLFRKSNLKPFERDISTEIYQAGSTPCNGVEGFNCYFPLQSYGFQPTNGVGYQPYRVVVLSFELLHAPATVCGPKKSTNLVKNKCVNFNFNGLTGTGVLTESNKKFLPFQQFGRDIADTTDAVRDPQTLEILDITPCSFGGVSVITPGTNTSNQVAVLYQGVNCTEVPVAIHADQLTPTWRVYSTGSNVFQTRAGCLIGAEHVNNSYECDIPIGAGICASYQTQTNSPRRARSVASQSIIAYTMSLGAENSVAYSNNSIAIPTNFTISVTTEILPVSMTKTSVDCTMYICGDSTECSNLLLQYGSFCTQLNRALTGIAVEQDKNTQEVFAQVKQIYKTPPIKDFGGFNFSQILPDPSKPSKRSFIEDLLFNKVTLADAGFIKQYGDCLGDIAARDLICAQKFNGLTVLPPLLTDEMIAQYTSALLAGTITSGWTFCAGAALQIPFAMQMAYRFNGIGVTQNVLYENQKLIANQFNSAIGKIQDSLSSTATALGKLQDVVNQNAQALNTLVKQLSSNFGAISSVLNDILSRLDKVEAEVQIDRLITGRLQSLQTYVTQQLIRAAEIRASANLAATKMSECVCGQSKRVDFCGKGYHLMSFPQSAPHGVVFLHVTYVPAQEKNFTTAPAICHDGKAHFPREGVFVSNGTHWFVTQRNFYEPQIITTDNTFVSGNCDVVIGIVNNTVYDPLQPELDSFKEELDKYFKNHTSPDVDLGDISGINASVVNIQKEIDRLNEVAKNLNESLIDLQELGKYEQYIKGGSGYIPEAPRDGQAYVRKDGEWVLLSTFL

SEQ ID NO: 6196 - protein, 1241 aa, Artificial Sequence
  SARS-CoV-2/Belgium/BC-03016/2020__EPI_ISL_415157 spike protein (1-1211)(G889C_L1034C) Foldon construct
MFVFLVLLPLVSSQCVNLTTRTQLPPAYTNSFTRGVYYPDKVFRSSVLHSTQDLFLPFFSNVTWFHAIHVSGTNGTKRFDNPVLPFNDGVYFASTEKSNIIRGWIFGTTLDSKTQSLLIVNNATNVVIKVCEFQFCNDPFLGVYYHKNNKSWMESEFRVYSSANNCTFEYVSQPFLMDLEGKQGNFKNLREFVFKNIDGYFKIYSKHTPINLVRDLPQGFSALEPLVDLPIGINITRFQTLLALHRSYLTPGDSSSGWTAGAAAYYVGYLQPRTFLLKYNENGTITDAVDCALDPLSETKCTLKSFTVEKGIYQTSNFRVQPTESIVRFPNITNLCPFGEVFNATRFASVYAWNRKRISNCVADYSVLYNSASFSTFKCYGVSPTKLNDLCFTNVYADSFVIRGDEVRQIAPGQTGKIADYNYKLPDDFTGCVIAWNSNNLDSKVGGNYNYLYRLFRKSNLKPFERDISTEIYQAGSTPCNGVEGFNCYFPLQSYGFQPTNGVGYQPYRVVVLSFELLHAPATVCGPKKSTNLVKNKCVNFNFNGLTGTGVLTESNKKFLPFQQFGRDIADTTDAVRDPQTLEILDITPCSFGGVSVITPGTNTSNQVAVLYQGVNCTEVPVAIHADQLTPTWRVYSTGSNVFQTRAGCLIGAEHVNNSYECDIPIGAGICASYQTQTNSPRRARSVASQSIIAYTMSLGAENSVAYSNNSIAIPTNFTISVTTEILPVSMTKTSVDCTMYICGDSTECSNLLLQYGSFCTQLNRALTGIAVEQDKNTQEVFAQVKQIYKTPPIKDFGGFNFSQILPDPSKPSKRSFIEDLLFNKVTLADAGFIKQYGDCLGDIAARDLICAQKFNGLTVLPPLLTDEMIAQYTSALLAGTITSGWTFCAGAALQIPFAMQMAYRFNGIGVTQNVLYENQKLIANQFNSAIGKIQDSLSSTAPALGKLQDVVNQNAQALNTLVKQLSSNFGAISSVLNDILSRLDKVEAEVQIDRLITGRLQSLQTYVTQQLIRAAEIRASANLAATKMSECVCGQSKRVDFCGKGYHLMSFPQSAPHGVVFLHVTYVPAQEKNFTTAPAICHDGKAHFPREGVFVSNGTHWFVTQRNFYEPQIITTDNTFVSGNCDVVIGIVNNTVYDPLQPELDSFKEELDKYFKNHTSPDVDLGDISGINASVVNIQKEIDRLNEVAKNLNESLIDLQELGKYEQYIKGGSGYIPEAPRDGQAYVRKDGEWVLLSTFL

SEQ ID NO: 6197 - protein, 1241 aa, Artificial Sequence
  SARS-CoV-2/Germany/BavPat3/2020__EPI_ISL_414521 spike protein (1-1211)(G889C_L1034C) Foldon construct
MFVFLVLLPLVSSQCVNLTTRTQLPPAYTNSFTRGVYYPDKVFRSSVLHSTQDLFLPFFSNVTWFHAIHVSGTNGTKRFDNPVLPFNDGVYFASTEKSNIIRGWIFGTTLDSKTQSLLIVNNATNVVIKVCEFQFCNDPFLGVYYHKNNKSWMESEFRVYSSANNCTFEYVSQPFLMDLEGKQGNFKNLREFVFKNIDGYFKIYSKHTPINLVRDLPQGFSALEPLVDLPIGINITRFQTLLALHRSYLTPGDSSSGWTAGAAAYYVGYLQPRTFLLKYNENGTITDAVDCALDPLSETKCTLKSFTVEKGIYQTSNFRVQPTESIVRFPNITNLCPFGEVFNATRFASVYAWNRKRISNCVADYSVLYNSASFSTFKCYGVSPTKLNDLCFTNVYADSFVIRGDEVRQIAPGQTGKIADYNYKLPDDFTGCVIAWNSNNLDSKVGGNYNYLYRLFRKSNLKPFERDISTEIYQAGSTPCNGVEGFNCYFPLQSYGFQPTNGVGYQPYRVVVLSFELLHAPATVCGPKKSTNLVKNKCVNFNFNGLTGTGVLTESNKKFLPFQQFGRDIADTTDAVRDPQTLEILDITPCSFGGVSVITPGTNTSNQVAVLYQDVNCTEVPVAIHADQLTPTWRVYSTGSNVFQTRAGCLIGAEHVNNSYECDIPIGAGICASYQTQTNSPRRARSVASQSIIAYTMSLGAENSVAYSNNSIAIPTNFTISVTTEILPVSMTKTSVDCTMYICGDSTECSNLLLQYGSFCTQLNRALTGIAVEQDKNTQQVFAQVKQIYKTPPIKDFGGFNFSQILPDPSKPSKRSFIEDLLFNKVTLADAGFIKQYGDCLGDIAARDLICAQKFNGLTVLPPLLTDEMIAQYTSALLAGTITSGWTFCAGAALQIPFAMQMAYRFNGIGVTQNVLYENQKLIANQFNSAIGKIQDSLSSTASALGKLQDVVNQNAQALNTLVKQLSSNFGAISSVLNDILSRLDKVEAEVQIDRLITGRLQSLQTYVTQQLIRAAEIRASANLAATKMSECVCGQSKRVDFCGKGYHLMSFPQSAPHGVVFLHVTYVPAQEKNFTTAPAICHDGKAHFPREGVFVSNGTHWFVTQRNFYEPQIITTDNTFVSGNCDVVIGIVNNTVYDPLQPELDSFKEELDKYFKNHTSPDVDLGDISGINASVVNIQKEIDRLNEVAKNLNESLIDLQELGKYEQYIKGGSGYIPEAPRDGQAYVRKDGEWVLLSTFL

SEQ ID NO: 6198 - protein, 1241 aa, Artificial Sequence
  SARS-CoV-2/France/HF1805/2020__EPI_ISL_414628 spike protein (1-1211)(G889C_L1034C) Foldon construct
MFVFLVLLPLVSSQCVNLTTRTQLPPAYTNSFTRGVYYPDKVFRSSVLHSTQDLFLPFFSNVTWFHAIHVSGTNGTKRFDNPVLPFNDGVYFASTEKSNIIRGWIFGTTLDSKTQSLLIVNNATNVVIKVCEFQFCNDPFLGVYYHKNNKSWMESEFRVYSSANNCTFEYVSQPFLMDLEGKQGNFKNLREFVFKNIDGYFKIYSKHTPINLVRDLPQGFSALEPLVDLPIGINITRFQTLLALHRSYLTPGDSSSGWTAGAAAYYVGYLQPRTFLLKYNENGTITDAVDCALDPLSETKCTLKSFTVEKGIYQTSNFRVQPTESIVRFPNITNLCPFGEVFNATRFASVYAWNRKRISNCVADYSVLYNSASFSTFKCYGVSPTKLNDLCFTNVYADSFVIRGDEVRQIAPGQTGKIADYNYKLPDDFTGCVIAWNSNNLDSKVGGNYNYLYRLFRKSNLKPFERDISTEIYQAGSTPCNGVEGFNCYFPLQSYGFQPTNGVGYQPYRVVVLSFELLHAPATVCGPKKSTNLVKNKCVNFNFNGLTGTGVLTESNKKFLPFQQFGRDIADTTDAVRDPQTLEILDITPCSFGGVSVITPGTNTSNQVAVLYQGVNCTEVPVAIHADQLTPTWRVYSTGSNVFQTRAGCLIGAEHVNNSYECDIPIGAGICASYQTQTNSPRRARSVASQSIIAYTMSLGAENSVAYSNNSIAIPTNFTISVTTEILPVSMTKTSVDCTMYICGDSTECSNLLLQYGSFCTQLNRALTGIAVEQDKNTQEVFAQVKQIYKTPPIKDFGGFNFSQILPDPSKPSKRSFIEDLLFNKVTLADAGFIKQYGDCLGDIAARDLICAQKFNGLTVLPPLLTDEMIAQYTSALLAGTITSGWTFCAGAALQIPFAMQMAYRFNGIGVTQNVLYENQKLIANQFNSAIGKIQDSLSSTASALGKLQDVVNQNAQALNTLVKQLSSNFGAISSVLNDILSRLDKVEAEVQIDRLITGRLQSLQTYVTQQLIRAAEIRASANLAATKMSECVCGQSKRVDFCGKGYHLMSFPQSAPHGVVFLHVTYVPAQEKNFTTAPAICHDGKAHFPREGVFVSNGTHWFVTQRNFYEPQIITTDNTFVSGNCDVVIGVVNNTVYDPLQPELDSFKEELDKYFKNHTSPDVDLGDISGINASVVNIQKEIDRLNEVAKNLNESLIDLQELGKYEQYIKGGSGYIPEAPRDGQAYVRKDGEWVLLSTFL

SEQ ID NO: 6199 - protein, 1241 aa, Artificial Sequence
  SARS-CoV-2/Netherlands/ZuidHolland_9/2020__EPI_ISL_414445 spike protein (1-1211)(G889C_L1034C) Foldon construct
MFVFLVLLPLVSSQCVNLTTRTQLPPAYTNSFTRGVYYPDKVFRSSVLHSTQDLFLPFFSNVTWFHAIHVSGTNGTKRFDNPVLPFNDGVYFASTEKSNIIRGWIFGTTLDSKTQSLLIVNNATNVVIKVCEFQFCNDPFLGVYYHKNNKSWMESEFRVYSSANNCTFEYVSQPFLMDLEGKQGNFKNLREFVFKNIDGYFKIYSKHTPINLVRDLPQGFSALEPLVDLPIGINITRFQTLLALHRSYLTPGDSSSGWTAGAAAYYVGYLQPRTFLLKYNENGTITDAVDCALDPLSETKCTLKSFTVEKGIYQTSNFRVQPTESIVRFPNITNLCPFGEVFNATRFASVYAWNRKRISNCVADYSVLYNSASFSTFKCYGVSPTKLNDLCFTNVYADSFVIRGDEVRQIAPGQTGKIADYNYKLPDDFTGCVIAWNSNNLDSKVGGNYNYLYRLFRKSNLKPFERDISTEIYQAGSTPCNGVEGFNCYFPLQSYGFQPTNGVGYQPYRVVVLSFELLHAPATVCGPKKSTNLVKNKCVNFNFNGLTGTGVLTESNKKFLPFQQFGRDIADTTDAVRDPQTLEILDITPCSFGGVSVITPGTNTSNQVAVLYQGVNCTEVPVAIHADQLTPTWRVYSTGSNVFQTRAGCLIGAEHVNNSYECDIPIGAGICASYQTQTNSPRRARSVASQSIIAYTMSLGAENSVAYSNNSIAIPTNFTISVTTEILPVSMTKTSVDCTMYICGDSTECSNLLLQYGSFCTQLNRALTGIAVEQDKNTQEVFAQVKQIYKTPPIKDFGGFNFSQILPDPSKPSKRSFIEDLLFNKVTLADAGFIKQYGDCLGDIAARDLICVQKFNGLTVLPPLLTDEMIAQYTSALLAGTITSGWTFCAGAALQIPFAMQMAYRFNGIGVTQNVLYENQKLIANQFNSAIGKIQDSLSSTASALGKLQDVVNQNAQALNTLVKQLSSNFGAISSVLNDILSRLDKVEAEVQIDRLITGRLQSLQTYVTQQLIRAAEIRASANLAATKMSECVCGQSKRVDFCGKGYHLMSFPQSAPHGVVFLHVTYVPAQEKNFTTAPAICHDGKAHFPREGVFVSNGTHWFVTQRNFYEPQIITTDNTFVSGNCDVVIGIVNNTVYDPLQPELDSFKEELDKYFKNHTSPDVDLGDISGINASVVNIQKEIDRLNEVAKNLNESLIDLQELGKYEQYIKGGSGYIPEAPRDGQAYVRKDGEWVLLSTFL

SEQ ID NO: 6200 - protein, 1241 aa, Artificial Sequence
  SARS-CoV-2/Finland/FIN03032020A/2020__EPI_ISL_413602 spike protein (1-1211)(G889C_L1034C) Foldon construct
MFVFLVLLPLVSSQCVNLTTRTQLPPAYTNSFTRGVYYPDKVFRSSVLHSTQDLFLPFFSNVTWFHAIHVSGTNGTKRFDNPVLPFNDGVYFASTEKSNIIRGWIFGTTLDSKTQSLLIVNNATNVVIKVCEFQFCNDPFLGVYYHKNNKSWMESEFRVYSSANNCTFEYVSQPFLMDLEGKQGNFKNLREFVFKNIDGYFKIYSKHTPINLVRDLPQGFSALEPLVDLPIGINITRFQTLLALHRSYLTPGDSSSGWTAGAAAYYVGYLQPRTFLLKYNENGTITDAVDCALDPLSETKCTLKSFTVEKGIYQTSNFRVQPTESIVRFPNITNLCPFGEVFNATRFASVYAWNRKRISNCVADYSVLYNSASFSTFKCYGVSPTKLNDLCFTNVYADSFVIRGDEVRQIAPGQTGKIADYNYKLPDDFTGCVISWNSNNLDSKVGGNYNYLYRLFRKSNLKPFERDISTEIYQAGSTPCNGVEGFNCYFPLQSYGFQPTNGVGYQPYRVVVLSFELLHAPATVCGPKKSTNLVKNKCVNFNFNGLTGTGVLTESNKKFLPFQQFGRDIADTTDAVRDPQTLEILDITPCSFGGVSVITPGTNTSNQVAVLYQGVNCTEVPVAIHADQLTPTWRVYSTGSNVFQTRAGCLIGAEHVNNSYECDIPIGAGICASYQTQTNSPRRARSVASQSIIAYTMSLGAENSVAYSNNSIAIPTNFTISVTTEILPVSMTKTSVDCTMYICGDSTECSNLLLQYGSFCTQLNRALTGIAVEQDKNTQEVFAQVKQIYKTPPIKDFGGFNFSQILPDPSKPSKRSFIEDLLFNKVTLADAGFIKQYGDCLGDIAARDLICAQKFNGLTVLPPLLTDEMIAQYTSALLAGTITSGWTFCAGAALQIPFAMQMAYRFNGIGVTQNVLYENQKLIANQFNSAIGKIQDSLSSTASALGKLQDVVNQNAQALNTLVKQLSSNFGAISSVLNDILSRLDKVEAEVQIDRLITGRLQSLQTYVTQQLIRAAEIRASANLAATKMSECVCGQSKRVDFCGKGYHLMSFPQSAPHGVVFLHVTYVPAQEKNFTTAPAICHDGKAHFPREGVFVSNGTHWFVTQRNFYEPQIITTDNTFVSGNCDVVIGIVNNTVYDPLQPELDSFKEELDKYFKNHTSPDVDLGDISGINASVVNIQKEIDRLNEVAKNLNESLIDLQELGKYEQYIKGGSGYIPEAPRDGQAYVRKDGEWVLLSTFL

SEQ ID NO: 6201 - protein, 1241 aa, Artificial Sequence
  SARS-CoV-2/France/GE1977/2020__EPI_ISL_414632 spike protein (1-1211)(G889C_L1034C) Foldon construct
MFVFLVLLPLVSSQCVNLTTRTQLPPAYTNSFTRGVYYPDKVFRSSVLHSTQDLFLPFFSNVTWFHAIHVSGTNGTKRFDNPVLPFNDGVYFASTEKSNIIRGWIFGTTLDSKTQSLLIVNNATNVVIKVCEFQFCNDPFLGVYYHKNNKSWMESEFRVYSSANNCTFEYVSQPFLMDLEGKQGNFKNLREFVFKNIDGYFKIYSKHTPINLVRDLPQGFSALEPLVDLPIGINITRFQTLLALHRSYLTPGDSSSGWTAGAAAYYVGYLQPRTFLLKYNENGTITDAVDCALDPLSETKCTLKSFTVEKGIYQTSNFRVQPTESIVRFPNITNLCPFGEVFNATRFASVYAWNRKRISNCVADYSVLYNSASFSTFKCYGVSPTKLNDLCFTNVYADSFVIRGDEVRQIAPGQTGKIADYNYKLPDDFTGCVIAWNSNNLDSKVGGNYNYLYRLFRKSNLKPFERDISTEIYQAGSTPCNGVEGFNCYFPLQSYGFQPTNGVGYQPYRVVVLSFELLHAPATVCGPKKSTNLVKNKCVNFNFNGLTGTGVLTESNKKFLPFQQFGRDIADTTDAVRDPQTLEILDITPCSFGGVSVITPGTNTSNQVAVLYQGVNCTEVPVAIHADQLTPTWRVYSTGSNVFQTRAGCLIGAEHVNNSYECDIPIGAGICASYQTQTNSPRRARSVASQSIIAYTMSLGAENSVAYSNNSIAIPTNFTISVTTEILPVSMTKTSVDCTMYICGDSTECSNLLLQYGSFCTQLNRALTGIAVEQDKNTQEVFAQVKQIYKTPPIKDFGGFNFSQILPDPSKPSKRSFIEDLLFNKVTLADAGFIKQYGDCLGDIAARDLICAQKFNGLTVLPPLLTDEMIAQYTSALLAGTITSGWTFCAGAALQIPFAMQMAYRFNGIGVTQNVLYENQKLIANQFNSAIGKIQDSLFSTASALGKLQDVVNQNAQALNTLVKQLSSNFGAISSVLNDILSRLDKVEAEVQIDRLITGRLQSLQTYVTQQLIRAAEIRASANLAATKMSECVCGQSKRVDFCGKGYHLMSFPQSAPHGVVFLHVTYVPAQEKNFTTAPAICHDGKAHFPREGVFVSNGTHWFVTQRNFYEPQIITTDNTFVSGNCDVVIGIVNNTVYDPLQPELDSFKEELDKYFKNHTSPDVDLGDISGINASVVNIQKEIDRLNEVAKNLNESLIDLQELGKYEQYIKGGSGYIPEAPRDGQAYVRKDGEWVLLSTFL

SEQ ID NO: 6202 - protein, 1241 aa, Artificial Sequence
  SARS-CoV-2/Finland/FIN-313/2020__EPI_ISL_414641 spike protein (1-1211)(G889C_L1034C) Foldon construct
MFVFLVLLPLVSSQCVNLTTRTQLPPAYTNSFTRGVYYPDKVFRSSVLHSTQDLFLPFFSNVTWFHAIHVSGTNGTKRFDNPVLPFNDGVYFASTEKSNIIRGWIFGTTLDSKTQSLLIVNNATNVVIKVCEFQFCNDPFLGVYYHKNNKSWMESEFRVYSSANNCTFEYVSQPFLMDLEGKQGNFKNLREFVFKNIDGYFKIYSKHTPINLVRDLPQGFSALEPLVDLPIGINITRFKTLLALHRSYLTPGDSSSGWTAGAAAYYVGYLQPRTFLLKYNENGTITDAVDCALDPLSETKCTLKSFTVEKGIYQTSNFRVQPTESIVRFPNITNLCPFGEVFNATRFASVYAWNRKRISNCVADYSVLYNSASFSTFKCYGVSPTKLNDLCFTNVYADSFVIRGDEVRQIAPGQTGKIADYNYKLPDDFTGCVIAWNSNNLDSKVGGNYNYLYRLFRKSNLKPFERDISTEIYQAGSTPCNGVEGFNCYFPLQSYGFQPTNGVGYQPYRVVVLSFELLHAPATVCGPKKSTNLVKNKCVNFNFNGLTGTGVLTESNKKFLPFQQFGRDIADTTDAVRDPQTLEILDITPCSFGGVSVITPGTNTSNQVAVLYQGVNCTEVPVAIHADQLTPTWRVYSTGSNVFQTRAGCLIGAEHVNNSYECDIPIGAGICASYQTQTNSPRRARSVASQSIIAYTMSLGAENSVAYSNNSIAIPTNFTISVTTEILPVSMTKTSVDCTMYICGDSTECSNLLLQYGSFCTQLNRALTGIAVEQDKNTQEVFAQVKQIYKTPPIKDFGGFNFSQILPDPSKPSKRSFIEDLLFNKVTLADAGFIKQYGDCLGDIAARDLICAQKFNGLTVLPPLLTDEMIAQYTSALLAGTITSGWTFCAGAALQIPFAMQMAYRFNGIGVTQNVLYENQKLIANQFNSAIGKIQDSLSSTASALGKLQDVVNQNAQALNTLVKQLSSNFGAISSVLNDILSRLDKVEAEVQIDRLITGRLQSLQTYVTQQLIRAAEIRASANLAATKMSECVCGQSKRVDFCGKGYHLMSFPQSAPHGVVFLHVTYVPAQEKNFTTAPAICHDGKAHFPREGVFVSNGTHWFVTQRNFYEPQIITTDNTFVSGNCDVVIGIVNNTVYDPLQPELDSFKEELDKYFKNHTSPDVDLGDISGINASVVNIQKEIDRLNEVAKNLNESLIDLQELGKYEQYIKGGSGYIPEAPRDGQAYVRKDGEWVLLSTFL

SEQ ID NO: 6203 - protein, 1241 aa, Artificial Sequence
  SARS-CoV-2/Netherlands/ZuidHolland_2/2020__EPI_ISL_414556 spike protein (1-1211)(G889C_L1034C) Foldon construct
MFVFLVLLPLVSSQCVNLTTRTQLPPAYTNSFTRGVYYPDKVFRSSVLHSTQDLFLPFFSNVTWFHAIHVSGTNGTKRFDNPVLPFNDGVYFASTEKSNIIRGWIFGTTLDSKTQSLLIVNNATNVVIKVCEFQFCNDPFLGVYYHKNNKSWMESEFRVYSSANNCTFEYVSQPFLMDLEGKQGNFKNLREFVFKNIDGYFKIYSKHTPINLVRDLPQGFSALEPLVDLPIGINITRFQTLLALHRSYLTPGDSSSGWTAGAAAYYVGYLQPRTFLLKYNENGTITDAVDCALDPLSETKCTLKSFTVEKGIYQTSNFRVQPTESIVRFPNITNLCPFGEVFNATRFASVYAWNRKRISNCVADYSVLYNSASFSTFKCYGVSPTKLNDLCFTNVYADSFVIRGDEVRQIAPGQTGKIADYNYKLPDDFTGCVIAWNSNNLDSKVGGNYNYLYRLFRKSNLKPFERDISTEIYQAGSTPCNGVEGFNCYFPLQSYGFQPTNGVGYQPYRVVVLSFELLHAPATVCGPKKSTNLVKNKCVNFNFNGLTGTGVLTESNKKFLPFQQFGRDIADTTDAVRDPQTLEILDITPCSFGGVSVITPGTNTSNQVAVLYQGVNCTEVPVAIHADQLTPTWRVYSTGSNVFQTRAGCLIGAEHVNNSYECDIPIGAGICASYQTQTNSPRRARSVASQSIIAYTMSLGAENSVAYSNNSIAIPTNFTISVTTEILPVSMTKTSVDCTMYICGDSTECSNLLLQYGSFCTQLNRALTGIALEQDKNTQEVFAQVKQIYKTPPIKDFGGFNFSQILPDPSKPSKRSFIEDLLFNKVTLADAGFIKQYGDCLGDIAARDLICAQKFNGLTVLPPLLTDEMIAQYTSALLAGTITSGWTFCAGAALQIPFAMQMAYRFNGIGVTQNVLYENQKLIANQFNSAIGKIQDSLSSTASALGKLQDVVNQNAQALNTLVKQLSSNFGAISSVLNDILSRLDKVEAEVQIDRLITGRLQSLQTYVTQQLIRAAEIRASANLAATKMSECVCGQSKRVDFCGKGYHLMSFPQSAPHGVVFLHVTYVPAQEKNFTTAPAICHDGKAHFPREGVFVSNGTHWFVTQRNFYEPQIITTDNTFVSGNCDVVIGIVNNTVYDPLQPELDSFKEELDKYFKNHTSPDVDLGDISGINASVVNIQKEIDRLNEVAKNLNESLIDLQELGKYEQYIKGGSGYIPEAPRDGQAYVRKDGEWVLLSTFL

SEQ ID NO: 6204 - protein, 1241 aa, Artificial Sequence
  SARS-CoV-2/USA/WA-UW31/2020__EPI_ISL_414618 spike protein (1-1211)(G889C_L1034C) Foldon construct
MFVFLVLLPLVSSQCVNLTTRTQLPPAYTNSFTRGVYYPDKVFRSSVLHSTQDLFLPFFSNVTWFHAIHVSGTNGTKRFDNPVLPFNDGVYFASTEKSNIIRGWIFGTTLDSKTQSLLIVNNATNVVIKVCEFQFCNDPFLGVYYHKNNKSWMESEFRVYSSANNCTFEYVSQPFLMDLEGKQGNFKNLREFVFKNIDGYFKIYSKHTPINLVRDLPQGFSALEPLVDLPIGINITRFQTLLALHRSYLTPGDSSSGWTAGAAAYYVGYLQPRTFLLKYNENGTITDAVDCALDPLSETKCTLKSFTVEKGIYQTSNFRVQPTESIVRFPNITNLCPFGEVFNATRFASVYAWNRKRISNCVADYSVLYNSASFSTFKCYGVSPTKLNDLCFTNVYADSFVIRGDEVRQIAPGQTGKIADYNYKLPDDFTGCVIAWNSNNLDSKVGGNYNYLYRLFRKSNLKPFERDISTEIYQAGSTPCNGAEGFNCYFPLQSYGFQPTNGVGYQPYRVVVLSFELLHAPATVCGPKKSTNLVKNKCVNFNFNGLTGTGVLTESNKKFLPFQQFGRDIADTTDAVRDPQTLEILDITPCSFGGVSVITPGTNTSNQVAVLYQDVNCTEVPVAIHADQLTPTWRVYSTGSNVFQTRAGCLIGAEHVNNSYECDIPIGAGICASYQTQTNSPRRARSVASQSIIAYTMSLGAENSVAYSNNSIAIPTNFTISVTTEILPVSMTKTSVDCTMYICGDSTECSNLLLQYGSFCTQLNRALTGIAVEQDKNTQEVFAQVKQIYKTPPIKDFGGFNFSQILPDPSKPSKRSFIEDLLFNKVTLADAGFIKQYGDCLGDIAARDLICAQKFNGLTVLPPLLTDEMIAQYTSALLAGTITSGWTFCAGAALQIPFAMQMAYRFNGIGVTQNVLYENQKLIANQFNSAIGKIQDSLSSTASALGKLQDVVNQNAQALNTLVKQLSSNFGAISSVLNDILSRLDKVEAEVQIDRLITGRLQSLQTYVTQQLIRAAEIRASANLAATKMSECVCGQSKRVDFCGKGYHLMSFPQSAPHGVVFLHVTYVPAQEKNFTTAPAICHDGKAHFPREGVFVSNGTHWFVTQRNFYEPQIITTDNTFVSGNCDVVIGIVNNTVYDPLQPELDSFKEELDKYFKNHTSPDVDLGDISGINASVVNIQKEIDRLNEVAKNLNESLIDLQELGKYEQYIKGGSGYIPEAPRDGQAYVRKDGEWVLLSTFL

SEQ ID NO: 6205 - protein, 1241 aa, Artificial Sequence
  SARS-CoV-2/South Korea/SNU01/2020__EPI_ISL_411929 spike protein (1-1211)(G889C_L1034C) Foldon construct
MFVFLVLLPLVSSQCVNLTTRTQLPPAYTNSFTRGVYYPDKVFRSSVLHSTQDLFLPFFSNVTWFHAIHVSGTNGTKRFDNPVLPFNDGVYFASTEKSNIIRGWIFGTTLDSKTQSLLIVNNATNVVIKVCEFQFCNDPFLGVYYHKNNKSWMESEFRVYSSANNCTFEYVSQPFLMDLEGKQGNFKNLREFVFKNIDGYFKIYSKHTPINLVRDLPQGFWALEPLVDLPIGINITRFQTLLALHRSYLTPGDSSSGWTAGAAAYYVGYLQPRTFLLKYNENGTITDAVDCALDPLSETKCTLKSFTVEKGIYQTSNFRVQPTESIVRFPNITNLCPFGEVFNATRFASVYAWNRKRISNCVADYSVLYNSASFSTFKCYGVSPTKLNDLCFTNVYADSFVIRGDEVRQIAPGQTGKIADYNYKLPDDFTGCVIAWNSNNLDSKVGGNYNYLYRLFRKSNLKPFERDISTEIYQAGSTPCNGVEGFNCYFPLQSYGFQPTNGVGYQPYRVVVLSFELLHAPATVCGPKKSTNLVKNKCVNFNFNGLTGTGVLTESNKKFLPFQQFGRDIADTTDAVRDPQTLEILDITPCSFGGVSVITPGTNTSNQVAVLYQDVNCTEVPVAIHADQLTPTWRVYSTGSNVFQTRAGCLIGAEHVNNSYECDIPIGAGICASYQTQTNSPRRARSVASQSIIAYTMSLGAENSVAYSNNSIAIPTNFTISVTTEILPVSMTKTSVDCTMYICGDSTECSNLLLQYGSFCTQLNRALTGIAVEQDKNTQEVFAQVKQIYKTPPIKDFGGFNFSQILPDPSKPSKRSFIEDLLFNKVTLADAGFIKQYGDCLGDIAARDLICAQKFNGLTVLPPLLTDEMIAQYTSALLAGTITSGWTFCAGAALQIPFAMQMAYRFNGIGVTQNVLYENQKLIANQFNSAIGKIQDSLSSTASALGKLQDVVNQNAQALNTLVKQLSSNFGAISSVLNDILSRLDKVEAEVQIDRLITGRLQSLQTYVTQQLIRAAEIRASANLAATKMSECVCGQSKRVDFCGKGYHLMSFPQSAPHGVVFLHVTYVPAQEKNFTTAPAICHDGKAHFPREGVFVSNGTHWFVTQRNFYEPQIITTDNTFVSGNCDVVIGIVNNTVYDPLQPELDSFKEELDKYFKNHTSPDVDLGDISGINASVVNIQKEIDRLNEVAKNLNESLIDLQELGKYEQYIKGGSGYIPEAPRDGQAYVRKDGEWVLLSTFL

SEQ ID NO: 6206 - protein, 1241 aa, Artificial Sequence
  SARS-CoV-2/China/WF0004/2020__EPI_ISL_413694 spike protein (1-1211)(G889C_L1034C) Foldon construct
MFVFLVLLPLVSSQCVNLTTRTQLPPAYTNSFTRGVYYPDKVFRSSVLHSTQDLFLPFFSNVTWFHAIHVSGTNGTKRFDNPVLPFNDGVYFASTEKSNIIRGWIFGTTLDSKTQSLLIVNNATNVVIKVCEFQFCNDPFLGVYYHKNNKSWTESEFRVYSSANNCTFEYVSQPFLMDLEGKQGNFKNLREFVFKNIDGYFKIYSKHTPINLVRDLPQGFSALEPLVDLPIGINITRFQTLLALHRSYLTPGDSSSGWTAGAAAYYVGYLQPRTFLLKYNENGTITDAVDCALDPLSETKCTLKSFTVEKGIYQTSNFRVQPTESIVRFPNITNLCPFGEVFNATRFASVYAWNRKRISNCVADYSVLYNSASFSTFKCYGVSPTKLNDLCFTNVYADSFVIRGDEVRQIAPGQTGKIADYNYKLPDDFTGCVIAWNSNNLDSKVGGNYNYLYRLFRKSNLKPFERDISTEIYQAGSTPCNGVEGFNCYFPLQSYGFQPTNGVGYQPYRVVVLSFELLHAPATVCGPKKSTNLVKNKCVNFNFNGLTGTGVLTESNKKFLPFQQFGRDIADTTDAVRDPQTLEILDITPCSFGGVSVITPGTNTSNQVAVLYQDVNCTEVPVAIHADQLTPTWRVYSTGSNVFQTRAGCLIGAEHVNNSYECDIPIGAGICASYQTQTNSPRRARSVASQSIIAYTMSLGAENSVAYSNNSIAIPTNFTISVTTEILPVSMTKTSVDCTMYICGDSTECSNLLLQYGSFCTQLNRALTGIAVEQDKNTQEVFAQVKQIYKTPPIKDFGGFNFSQILPDPSKPSKRSFIEDLLFNKVTLADAGFIKQYGDCLGDIAARDLICAQKFNGLTVLPPLLTDEMIAQYTSALLAGTITSGWTFCAGAALQIPFAMQMAYRFNGIGVTQNVLYENQKLIANQFNSAIGKIQDSLSSTASALGKLQDVVNQNAQALNTLVKQLSSNFGAISSVLNDILSRLDKVEAEVQIDRLITGRLQSLQTYVTQQLIRAAEIRASANLAATKMSECVCGQSKRFDFCGKGYHLMSFPQSAPHGVVFLHVTYVPAQEKNFTTAPAICHDGKAHFPREGVFVSNGTHWFVTQRNFYEPQIITTDNTFVSGNCDVVIGIVNNTVYDPLQPELDSFKEELDKYFKNHTSPDVDLGDISGINASVVNIQKEIDRLNEVAKNLNESLIDLQELGKYEQYIKGGSGYIPEAPRDGQAYVRKDGEWVLLSTFL

SEQ ID NO: 6207 - protein, 1241 aa, Artificial Sequence
  SARS-CoV-2/China/WF0028/2020__EPI_ISL_413791 spike protein (1-1211)(G889C_L1034C) Foldon construct
MFVFLVLLPLVSSQCVNLTTRTQLPPAYTNSFTRGVYYPDKVFRSSVLHSTQDLFLPFFSNVTWFHAIHVSGTNGTKRFDNPVLPFNDGVYFASTEKSNIIRGWIFGTTLDSKTQSLLIVNNATNVVIKVCEFQFCNDPFLGVYYHKNNKSWMESEFRVYSSANNCTFEYVSQPFLMDLEGKQGNFKNLREFVFKNIDGYFKIYSKHTPINLVRDLPQGFSALEPLVDLPIGINITRFQTLLALHRSYLTPGDSSSGWTAGAAAYYVGYLQPRTFLLKYNENGTITDAVDCALDPLSETKCTLKSFTVEKGIYQTSNFRVQPTESIVRFPNITNLCPFGEVFNATRFASVYAWNRKRISNCVADYSVLYNSASFSTFKCYGVSPTKLNDLCFTNVYADSFVIRGDEVRQIAPGQTGKIADYNYKLPDDFTGCVIAWNSNNLDSKVGGNYNYLYRLFRKSNLKPFERDISTEIYQAGSTPCNGVEGFNCYFPLQSYGFQPTNGVGYQPYRVVVLSFELLHAPATVCGPKKSTNLVKNKCVNFNFNGLTGTGVLTESNKKFLPFQQFGRDIADTTDAVRDPQTLEILDITPCSFGGVSVITPGTNTSNQVAVLYQDVNCTEVPVAIHADQLTPTWRVYSTGSNVFQTRAGCLIGAEHVNNSYECDIPIGAGICASYQTQTNSPRRARSVASQSIIAYTMSLGAENSVAYSNNSIAIPTNFTISVTTEILPVSMTKTSVDCTMYICGDSTECSNLLLQYGSFCTQLNRALTGIAVEQDKNTQEVFAQVKQIYKTPPIKDFGGFNFSQILPDPSKPSKRSFIEDLLFNKVTLADAGFIKQYGDCLGDIAARDLICAQKFNGLTVLPPLLTDEMIAQYTSALLAGTITSGWTFCAGAALQIPFAMQMAYRFNGIGVTQNVLYENQKLIANQFNSAIGKIQDSLSSTASALGKLQDVVNQNAQALNTLVKQLSSNFGAISSVLNDILSRLDKVEAEVQIDRLITGRLQSLQTYVTQQLIRAAEIRASANLAATKMSECVCGQSKRVDFCGKGYHLMSFPQSAPHGVVFLHVTYVPAQEKNFTTAPAICHDGKAHFPREGVFVSNGTHWFVTQRNFYEPQIITTDNTFVSGNCDVVIGIVNNTVYDPLQPELESFKEELDKYFKNHTSPDVDLGDISGINASVVNIQKEIDRLNEVAKNLNESLIDLQELGKYEQYIKGGSGYIPEAPRDGQAYVRKDGEWVLLSTFL

SEQ ID NO: 6208 - protein, 1241 aa, Artificial Sequence
  SARS-CoV-2/2019-nCoV/USA-CruiseA-18/2020__MT159716.1 spike protein (1-1211)(G889C_L1034C) Foldon construct
MFVFLVLLPLVSSQCVNLTTRTQLPPAYTNSFTRGVYYPDKVFRSSVLHSTQDLFLPFFSNVTWFHAIHVSGTNGTKRFDNPVLPFNDGVYFASTEKSNIIRGWIFGTTLDSKTQSLLIVNNATNVVIKVCEFQFCNDPFLGVYYHKNNKSWMESELRVYSSANNCTFEYVSQPFLMDLEGKQGNFKNLREFVFKNIDGYFKIYSKHTPINLVRDLPQGFSALEPLVDLPIGINITRFQTLLALHRSYLTPGDSSSGWTAGAAAYYVGYLQPRTFLLKYNENGTITDAVDCALDPLSETKCTLKSFTVEKGIYQTSNFRVQPTESIVRFPNITNLCPFGEVFNATRFASVYAWNRKRISNCVADYSVLYNSASFSTFKCYGVSPTKLNDLCFTNVYADSFVIRGDEVRQIAPGQTGKIADYNYKLPDDFTGCVIAWNSNNLDSKVGGNYNYLYRLFRKSNLKPFERDISTEIYQAGSTPCNGVEGFNCYFPLQSYGFQPTNGVGYQPYRVVVLSFELLHAPATVCGPKKSTNLVKNKCVNFNFNGLTGTGVLTESNKKFLPFQQFGRDIADTTDAVRDPQTLEILDITPCSFGGVSVITPGTNTSNQVAVLYQDVNCTEVPVAIHADQLTPTWRVYSTGSNVFQTRAGCLIGAEHVNNSYECDIPIGAGICASYQTQTNSPRRARSVASQSIIAYTMSLGAENSVAYSNNSIAIPTNFTISVTTEILPVSMTKTSVDCTMYICGDSTECSNLLLQYGSFCTQLNRALTGIAVEQDKNTQEVFAQVKQIYKTPPIKDFGGFNFSQILPDPSKPSKRSFIEDLLFNKVTLADAGFIKQYGDCLGDIAARDLICAQKFNGLTVLPPLLTDEMIAQYTSALLAGTITSGWTFCAGAALQIPFAMQMAYRFNGIGVTQNVLYENQKLIANQFNSAIGKIQDSLSSTASALGKLQDVVNQNAQALNTLVKQLSSNFGAISSVLNDILSRLDKVEAEVQIDRLITGRLQSLQTYVTQQLIRAAEIRASANLAATKMSECVCGQSKRVDFCGKGYHLMSFPQSAPHGVVFLHVTYVPAQEKNFTTAPAICHDGKAHFPREGVFVSNGTHWFVTQRNFYEPQIITTDNTFVSGNCDVVIGIVNNTVYDPLQPELDSFKEELDKYFKNHTSPDVDLGDISGINASVVNIQKEIDRLNEVAKNLNESLIDLQELGKYEQYIKGGSGYIPEAPRDGQAYVRKDGEWVLLSTFL

SEQ ID NO: 6209 - protein, 1241 aa, Artificial Sequence
  SARS-CoV-2/SARS-CoV-2/Yunnan-01/human/2020/CHN__MT049951.1 spike protein (1-1211)(G889C_L1034C) Foldon construct
MFVFLVLLPLVSSQCVNLTTRTQLPPANTNSFTRGVYYPDKVFRSSVLHSTQDLFLPFFSNVTWFHAIHVSGTNGTKRFDNPVLPFNDGVYFASTEKSNIIRGWIFGTTLDSKTQSLLIVNNATNVVIKVCEFQFCNDPFLGVYYHKNNKSWMESEFRVYSSANNCTFEYVSQPFLMDLEGKQGNFKNLREFVFKNIDGYFKIYSKHTPINLVRDLPQGFSALEPLVDLPIGINITRFQTLLALHRSYLTPGDSSSGWTAGAAAYYVGYLQPRTFLLKYNENGTITDAVDCALDPLSETKCTLKSFTVEKGIYQTSNFRVQPTESIVRFPNITNLCPFGEVFNATRFASVYAWNRKRISNCVADYSVLYNSASFSTFKCYGVSPTKLNDLCFTNVYADSFVIRGDEVRQIAPGQTGKIADYNYKLPDDFTGCVIAWNSNNLDSKVGGNYNYLYRLFRKSNLKPFERDISTEIYQAGSTPCNGVEGFNCYFPLQSYGFQPTNGVGYQPYRVVVLSFELLHAPATVCGPKKSTNLVKNKCVNFNFNGLTGTGVLTESNKKFLPFQQFGRDIADTTDAVRDPQTLEILDITPCSFGGVSVITPGTNTSNQVAVLYQDVNCTEVPVAIHADQLTPTWRVYSTGSNVFQTRAGCLIGAEHVNNSYECDIPIGAGICASYQTQTNSPRRARSVASQSIIAYTMSLGAENSVAYSNNSIAIPTNFTISVTTEILPVSMTKTSVDCTMYICGDSTECSNLLLQYGSFCTQLNRALTGIAVEQDKNTQEVFAQVKQIYKTPPIKDFGGFNFSQILPDPSKPSKRSFIEDLLFNKVTLADAGFIKQYGDCLGDIAARDLICAQKFNGLTVLPPLLTDEMIAQYTSALLAGTITSGWTFCAGAALQIPFAMQMAYRFNGIGVTQNVLYENQKLIANQFNSAIGKIQDSLSSTASALGKLQDVVNQNAQALNTLVKQLSSNFGAISSVLNDILSRLDKVEAEVQIDRLITGRLQSLQTYVTQQLIRAAEIRASANLAATKMSECVCGQSKRVDFCGKGYHLMSFPQSAPHGVVFLHVTYVPAQEKNFTTAPAICHDGKAHFPREGVFVSNGTHWFVTQRNFYEPQIITTDNTFVSGNCDVVIGIVNNTVYDPLQPELDSFKEELDKYFKNHTSPDVDLGDISGINASVVNIQKEIDRLNEVAKNLNESLIDLQELGKYEQYIKGGSGYIPEAPRDGQAYVRKDGEWVLLSTFL

SEQ ID NO: 6210 - protein, 1241 aa, Artificial Sequence
  SARS-CoV-2/USA/WA-UW292/2020__EPI_ISL_418077 spike protein (1-1211)(G889C_L1034C) Foldon construct
MFVFLVLLPLVSSQCVNLTTRTQLPPAYTNSFTRGVYYPDKVFRSSVLHSTQDLFLPFFSNVTWFHAIHVSGTNGTKRFDNPVLPFNDGVYFASTEKSNIIRGWIFGTTLDSKTQSLLIVNNATNVVIKVCEFQFCNDPFLGVYYHKNNKSWMESEFRVYSSANNCTFEYVSQPFLMDLEGKQGNFKNLREFVFKNIDGYFKIYSKHTPINLVRDLPQGFSALEPLVDLPIGINITRFQTLLALHRSYLTPGDSSSGWTAGAAAYYVGYLQPRTFLLKYNENGTITDAVDCALDPLSETKCTLKSFTVEKGIYQTSNFRVQPTESIVRFPNITNLCPFGEVFNATRFASVYAWNRKRISNCVADYSVLYNSASFSTFKCYGVSPTKLNDLCFTNVYADSFVIRGDEVRQIAPGQTGKIADYNYKLPDDFTGCVIAWNSNNLDSKVGGNYNYLYRLFRKSNLKPFERDISTEIYQASSTPCNGVEGFNCYFPLQSYGFQPTNGVGYQPYRVVVLSFELLHAPATVCGPKKSTNLVKNKCVNFNFNGLTGTGVLTESNKKFLPFQQFGRDIADTTDAVRDPQTLEILDITPCSFGGVSVITPGTNTSNQVAVLYQDVNCTEVPVAIHADQLTPTWRVYSTGSNVFQTRAGCLIGAEHVNNSYECDIPIGAGICASYQTQTNSPRRARSVASQSIIAYTMSLGAENSVAYSNNSIAIPTNFTISVTTEILPVSMTKTSVDCTMYICGDSTECSNLLLQYGSFCTQLNRALTGIAVEQDKNTQEVFAQVKQIYKTPPIKDFGGFNFSQILPDPSKPSKRSFIEDLLFNKVTLADAGFIKQYGDCLGDIAARDLICAQKFNGLTVLPPLLTDEMIAQYTSALLAGTITSGWTFCAGAALQIPFAMQMAYRFNGIGVTQNVLYENQKLIANQFNSAIGKIQDSLSSTASALGKLQDVVNQNAQALNTLVKQLSSNFGAISSVLNDILSRLDKVEAEVQIDRLITGRLQSLQTYVTQQLIRAAEIRASANLAATKMSECVCGQSKRVDFCGKGYHLMSFPQSAPHGVVFLHVTYVPAQEKNFTTAPAICHDGKAHFPREGVFVSNGTHWFVTQRNFYEPQIITTDNTFVSGNCDVVIGIVNNTVYDPLQPELDSFKEELDKYFKNHTSPDVDLGDISGINASVVNIQKEIDRLNEVAKNLNESLIDLQELGKYEQYIKGGSGYIPEAPRDGQAYVRKDGEWVLLSTFL

SEQ ID NO: 6211 - protein, 1241 aa, Artificial Sequence
  SARS-CoV-2/Iceland/192/2020__EPI_ISL_417819 spike protein (1-1211)(G889C_L1034C) Foldon construct
MFVFFVLLPLVSSQCVNLTTRTQLPPAYTNSFTRGVYYPDKVFRSSVLHSTQDLFLPFFSNVTWFHAIHVSGTNGTKRFDNPVLPFNDGVYFASTEKSNIIRGWIFGTTLDSKTQSLLIVNNATNVVIKVCEFQFCNDPFLGVYYHKNNKSWMESEFRVYSSANNCTFEYVSQPFLMDLEGKQGNFKNLREFVFKNIDGYFKIYSKHTPINLVRDLPQGFSALEPLVDLPIGINITRFQTLLALHRSYLTPGDSSSGWTAGAAAYYVGYLQPRTFLLKYNENGTITDAVDCALDPLSETKCTLKSFTVEKGIYQTSNFRVQPTESIVRFPNITNLCPFGEVFNATRFASVYAWNRKRISNCVADYSVLYNSASFSTFKCYGVSPTKLNDLCFTNVYADSFVIRGDEVRQIAPGQTGKIADYNYKLPDDFTGCVIAWNSNNLDSKVGGNYNYLYRLFRKSNLKPFERDISTEIYQAGSTPCNGVEGFNCYFPLQSYGFQPTNGVGYQPYRVVVLSFELLHAPATVCGPKKSTNLVKNKCVNFNFNGLTGTGVLTESNKKFLPFQQFGRDIADTTDAVRDPQTLEILDITPCSFGGVSVITPGTNTSNQVAVLYQGVNCTEVPVAIHADQLTPTWRVYSTGSNVFQTRAGCLIGAEHVNNSYECDIPIGAGICASYQTQTNSPRRARSVASQSIIAYTMSLGAENSVAYSNNSIAIPTNFTISVTTEILPVSMTKTSVDCTMYICGDSTECSNLLLQYGSFCTQLNRALTGIAVEQDKNTQEVFAQVKQIYKTPPIKDFGGFNFSQILPDPSKPSKRSFIEDLLFNKVTLADAGFIKQYGDCLGDIAARDLICAQKFNGLTVLPPLLTDEMIAQYTSALLAGTITSGWTFCAGAALQIPFAMQMAYRFNGIGVTQNVLYENQKLIANQFNSAIGKIQDSLSSTASALGKLQDVVNQNAQALNTLVKQLSSNFGAISSVLNDILSRLDKVEAEVQIDRLITGRLQSLQTYVTQQLIRAAEIRASANLAATKMSECVCGQSKRVDFCGKGYHLMSFPQSAPHGVVFLHVTYVPAQEKNFTTAPAICHDGKAHFPREGVFVSNGTHWFVTQRNFYEPQIITTDNTFVSGNCDVVIGIVNNTVYDPLQPELDSFKEELDKYFKNHTSPDVDLGDISGINASVVNIQKEIDRLNEVAKNLNESLIDLQELGKYEQYIKGGSGYIPEAPRDGQAYVRKDGEWVLLSTFL

SEQ ID NO: 6212 - protein, 1241 aa, Artificial Sequence
  SARS-CoV-2/Belgium/ULG-6939/2020__EPI_ISL_417020 spike protein (1-1211)(G889C_L1034C) Foldon construct
MFVFLVLLPLVSSQCVNLTTRTQLPPAYTNSFTRGVYYPDKVFRSSVLHSTQDLFLPFFSNVTWFHAIHVSGTNGTKRFDNPVLPFNDGVYFASTEKSNIIRGWIFGTTLDSKTQSLLIVNNATNVVIKVCEFQFCNDPFLGVYYHKNNKSWMESEFRVYSSANNCTFEYVSQPFLMDLEGKQGNFKNLREFVFKNIDGYFKIYSKHTPINLVRDLPQGFSALEPLVDLPIGINITRFQTLLALHRSYLTPGDSSSGWTAGAAAYYVGYLQPRTFLLKYNENGTITDAVDCALDPLSETKCTLKSFTVEKGIYQTSNFRVQPTESIVRFPNITNLCPFGEVFNATRFASVYAWNRKRISNCVADYSVLYNSASFSTFKCYGVSPTKLNDLCFTNVYADSFVIRGDEVRQIAPGQTGKIADYNYKLPDDFTGCVIAWNSNNLDSKVGGNYNYLYRLFRKSNLKPFERDISTEIYQAGSTPCNGVEGFNCYFPLQSYGFQPTNGVGYQPYRVVVLSFELLHAPATVCGPKKSTNLVKNKCVNFNFNGLTGTGVLTESNKKFLPFQQFGRDIADTTDAVRDPQTLEILDITPCSFGGVSVITPGTNTSNQVAVLYQGVNCTEVPVAIHADQLTPTWRVYSTGSNVFQTRAGCLIGAEHVNNSYECDIPIGAGICASYQTQTNSPRRARSVASQSIIAYTMSLGAENSVVYSNNSIAIPTNFTISVTTEILPVSMTKTSVDCTMYICGDSTECSNLLLQYGSFCTQLNRALTGIAVEQDKNTQEVFAQVKQIYKTPPIKDFGGFNFSQILPDPSKPSKRSFIEDLLFNKVTLADAGFIKQYGDCLGDIAARDLICAQKFNGLTVLPPLLTDEMIAQYTSALLAGTITSGWTFCAGAALQIPFAMQMAYRFNGIGVTQNVLYENQKLIANQFNSAIGKIQDSLSSTASALGKLQDVVNQNAQALNTLVKQLSSNFGAISSVLNDILSRLDKVEAEVQIDRLITGRLQSLQTYVTQQLIRAAEIRASANLAATKMSECVCGQSKRVDFCGKGYHLMSFPQSAPHGVVFLHVTYVPAQEKNFTTAPAICHDGKAHFPREGVFVSNGTHWFVTQRNFYEPQIITTDNTFVSGNCDVVIGIVNNTVYDPLQPELDSFKEELDKYFKNHTSPDVDLGDISGINASVVNIQKEIDRLNEVAKNLNESLIDLQELGKYEQYIKGGSGYIPEAPRDGQAYVRKDGEWVLLSTFL

SEQ ID NO: 6213 - protein, 1241 aa, Artificial Sequence
  SARS-CoV-2/France/HF2496/2020__EPI_ISL_418231 spike protein (1-1211)(G889C_L1034C) Foldon construct
MFVFLVLLPLVSSQCVNLTTRTQLPPAYTNSFTRGVYYPDKVFRSSVLHSTQDLFLPFFSNVTWFHAIHVSGTNGTKRFDNPVLPFNDGVYFASTEKSNIIRGWIFGTTLDSKTQSLLIVNNATNVVIKVCEFQFCNDPFLGVYYHKNNKSWMESEFRVYSSANNCTFEYVSQPFLMDLEGKQGNFKNLREFVFKNIDGYFKIYSKHTPINLVRDLPQGFSALEPLVDLPIGINITRFQTLLALHRSYLTPGDSSSGWTAGAAAYYVGYLQPRTFLLKYNENGTITDAVDCALDPLSETKCTLKSFTVEKGIYQTSNFRVQPTESIVRFPNITNLCPFGEVFNATRFASVYAWNRKRISNCVADYSVLYNSASFSTFKCYGVSPTKLNDLCFTNVYADSFVIRGDEVRQIAPGQTGKIADYNYKLPDDFTGCVIAWNSNNLDSKVGGNYNYLYRLFRKSNLKPFERDISTEIYQAGSTPCNGVEGFNCYFPLQSYGFQPTNGVGYQPYRVVVLSFELLHAPATVCGPKKSTNLVKNKCVNFNFNGLTGTGVLTESNKKFLPFQQFGRDIADTTDAVRDPQTLEILDITPCSFGGVSVITPGTNTSNQVAVLYQGVNCTEVPVAIHADQLTPTWRVYSTGSNVFQTRAGCLIGAEHVNNSYECDIPIGAGICASYQTQTNSPRRARSVASQSIIAYTMSLGAENSVAYSNNSIAIPTNFTISVTTEILPVSMTKTSVDCTMYICGDSTECSNLLLQYGSFCTQLNRALTGIAVEQDKNTQEVFAQVKQIYKTPPIKDFGGFNFSQILPDPSKPSKRSFIEDLLFNKVTLADAGFIKQYGDCLGDIVARDLICAQKFNGLTVLPPLLTDEMIAQYTSALLAGTITSGWTFCAGAALQIPFAMQMAYRFNGIGVTQNVLYENQKLIANQFNSAIGKIQDSLSSTASALGKLQDVVNQNAQALNTLVKQLSSNFGAISSVLNDILSRLDKVEAEVQIDRLITGRLQSLQTYVTQQLIRAAEIRASANLAATKMSECVCGQSKRVDFCGKGYHLMSFPQSAPHGVVFLHVTYVPAQEKNFTTAPAICHDGKAHFPREGVFVSNGTHWFVTQRNFYEPQIITTDNTFVSGNCDVVIGIVNNTVYDPLQPELDSFKEELDKYFKNHTSPDVDLGDISGINASVVNIQKEIDRLNEVAKNLNESLIDLQELGKYEQYIKGGSGYIPEAPRDGQAYVRKDGEWVLLSTFL

SEQ ID NO: 6214 - protein, 1241 aa, Artificial Sequence
  SARS-CoV-2/USA/WA-UW291/2020__EPI_ISL_418076 spike protein (1-1211)(G889C_L1034C) Foldon construct
MFVFLVLLPLVSSQCVNLTTRTQLPPAYTNSFTRGVYYPDKVFRSSVLHSTQDLFLPFFSNVTWFHAIHVSGTNGTKRFDNPVLPFNDGVYFASTEKSNIIRGWIFGTTLDSKTQSLLIVNNATNVVIKVCEFQFCNDPFLGVYYHKNNKSWMESEFRVYSSANNCTFEYVSQPFLMDLEGKQGNFKNLREFVFKNIDGYFKIYSKHTPINLVRDLPQGFSALEPLVDLPIGINITRFQTLLALHRSYLTPGDSSSGWTAGAAAYYVGYLQPRTFLLKYNENGTITDAVDCALDPLSETKCTLKSFTVEKGIYQTSNFRVQPTESIVRFPNITNLCPFGEVFNATRFASVYAWNRKRISNCVADYSVLYNSASFSTFKCYGVSPTKLNDLCFTNVYADSFVIRGDEVRQIAPGQTGKIADYNYKLPDDFTGCVIAWNSNNLDSKVGGNYNYLYRLFRKSNLKPFERDISTEIYQAGSTPCNGVEGFNCYFPLQSYGFQPTNGVGYQPYRVVVLSFELLHAPATVCGPKKSTNLVKNKCVNFNFNGLTGTGVLTESNKKFLPFQQFGRDIADTTDAVRDPQTLEILDITPCSFGGVSVITPGTNTSNQVAVLYQGVNCTEVPVAIHADQLTPTWRVYSTGSNVFQTRAGCLIGAEHVNNSYECDIPIGAGICASYQTQTNSPRRARSVASQSIIAYTMSLGAENSVAYSNNSIAIPTNFTISVTTEILPVSMTKTSVDCTMYICGDSTECSNLLLQYGSFCTQLNRALTGIAVEQDKNTQEVFAQVKQIYKTPPIKDFGGFNFSQILPDPSKPSKRSFIEDLLFNKVTLADAGFIKQYGDCLGDIAARDLICAQKFNGLTVLPPLLTDEMIAQYTSALLAGTITSGWTFCAGAALQIPFAMQMAYRFNGIGVTQNVLYENQKLIANQFNSAIGKIQYSLSSTASALGKLQDVVNQNAQALNTLVKQLSSNFGAISSVLNDILSRLDKVEAEVQIDRLITGRLQSLQTYVTQQLIRAAEIRASANLAATKMSECVCGQSKRVDFCGKGYHLMSFPQSAPHGVVFLHVTYVPAQEKNFTTAPAICHDGKAHFPREGVFVSNGTHWFVTQRNFYEPQIITTDNTFVSGNCDVVIGIVNNTVYDPLQPELDSFKEELDKYFKNHTSPDVDLGDISGINASVVNIQKEIDRLNEVAKNLNESLIDLQELGKYEQYIKGGSGYIPEAPRDGQAYVRKDGEWVLLSTFL

SEQ ID NO: 6215 - protein, 1241 aa, Artificial Sequence; identical to SEQ ID NO: 6178
  SARS-CoV-2/Portugal/PT0034/2020__EPI_ISL_418019 spike protein (1-1211)(G889C_L1034C) Foldon construct

SEQ ID NO: 6216 - protein, 1241 aa, Artificial Sequence
  SARS-CoV-2/Iceland/202/2020__EPI_ISL_417750 spike protein (1-1211)(G889C_L1034C) Foldon construct
MFVFLVLLPLVSSQCVNLTTRTQLPPAYTNSFTRGVYYPDKVFRSSVLHSTQDLFLPFFSNVTWFHAIHVSGTNGTKRFDNPVLPFNDGVYFASTEKSNIIRGWIFGTTLDSKTQSLLIVNNATNVVIKVCEFQFCNDPFLGVYYHKNNKSWMESEFRVYSSANNCTFEYVSQPFLMDLEGKQGNFKNLREFVFKNIDGYFKIYSKHTPINLVRDLPQGFSALEPLVDLPIGINITRFQTLLALHRSYLTPGDSSSGWTAGAAAYYVGYLQPRTFLLKYNENGTITDAVDCALDPLSETKCTLKSFTVEKGIYQTSNFRVQPTESIVRFPNITNLCPFGEVFNATRFASVYAWNRKRISNCVADYSVLYNSASFSTFKCYGVSPTKLNDLCFTNVYADSFVIRGDEVRQIAPGQTGKIADYNYKLPDDFTGCVIAWNSNNLDSKVGGNYNYLYRLFRKSNLKPFERDISTEIYQAGSTPCNGVEGFNCYFPLQSYGFQPTNGVGYQPYRVVVLSFELLHAPATVCGPKKSTNLVKNKCVNFNFNGLTGTGVLTESNKKFLPFQQFGRDIADTTDAVRDPQTLEILDITPCSFGGVSVITPGTNTSNQVAVLYQDVNCTEVPVAIHADQLTPTWRVYSTGSNVFQTRAGCLIGAEHVNNSYECDIPIGAGICASYQTQTNSPRRARSVASQSIIAYTMSLGAENSVAYSNNSIAIPTNFTISVTTEILPVSMTKTSVDCTMYICGDSTECSNLLLQYGSFCTQLNRALTGIAVEQDKNTQEVFAQVKQIYKTPPIKDFGGFNFSQILPDPSKPSKRSFIEDLLFNKVTLADAGFIKQYGDCLGDIAARDLICAQKFNGLTVLPPLLTDEMIAQYTSALLAGTITSGWTFCAGAALQIPFAMQMAYRFNGIGVTQNVLYENQKLIANQFNSAIGKIQDSLSSTASALGKLQDVVNQNAQALNTLVKQLSSNFGAISSVLNDILSRLDKVEAEVQIDRLITGRLQSLQTYVTQQLIRAAEIRASANLAATKMSECVCGQSKRVDFCGKGYHLMSFPQSAPHGVVFLHVTYVPAQEKNFTTAPAICHDGKAHFPREGVFVSNGTHWFVTQRNFYEPQIITTDNTFVSGNCDVVIGIVNNTVYDPLQPELDSFKEELDKYFKNHTSPDVDLGDIPGINASVVNIQKEIDRLNEVAKNLNESLIDLQELGKYEQYIKGGSGYIPEAPRDGQAYVRKDGEWVLLSTFL

SEQ ID NO: 6217 - protein, 1241 aa, Artificial Sequence
  SARS-CoV-2/USA/WA-UW261/2020__EPI_ISL_418046 spike protein (1-1211)(G889C_L1034C) Foldon construct
MFVFLVLLPLVSSQCVNLTTRTQLPPAYTNSFTRGVYYPDKVFRSSVLHSTQDLFLPFFSNVTWFHAIHVSGTNGTKRFDNPVLPFNDGVYFASTEKSNIIRGWIFGTTLDSKTQSLLIVNNATNVVIKVCEFQFCNDPFLGVYYHKNNKSWMESEFRVYSSANNCTFEYVSQPFLMDLEGKQGNFKNLREFVFKNIDGYFKIYSKHTPINLVRDLPQGFSALEPLVDLPIGINITRFQTLLALHRSYLTPGDSSSGWTAGAAAYYVGYLQPRTFLLKYNENGTITDAVDCALDPLSETKCTLKSFTVEKGIYQTSNFRVQPTESIVRFPNITNLCPFGEVFNATRFTSVYAWNRKRISNCVADYSVLYNSASFSTFKCYGVSPTKLNDLCFTNVYADSFVIRGDEVRQIAPGQTGKIADYNYKLPDDFTGCVIAWNSNNLDSKVGGNYNYLYRLFRKSNLKPFERDISTEIYQAGSTPCNGVEGFNCYFPLQSYGFQPTNGVGYQPYRVVVLSFELLHAPATVCGPKKSTNLVKNKCVNFNFNGLTGTGVLTESNKKFLPFQQFGRDIADTTDAVRDPQTLEILDITPCSFGGVSVITPGTNTSNQVAVLYQDVNCTEVPVAIHADQLTPTWRVYSTGSNVFQTRAGCLIGAEHVNNSYECDIPIGAGICASYQTQTNSPRRARSVASQSIIAYTMSLGAENSVAYSNNSIAIPTNFTISVTTEILPVSMTKTSVDCTMYICGDSTECSNLLLQYGSFCTQLNRALTGIAVEQDKNTQEVFAQVKQIYKTPPIKDFGGFNFSQILPDPSKPSKRSFIEDLLFNKVTLADAGFIKQYGDCLGDIAARDLICAQKFNGLTVLPPLLTDEMIAQYTSALLAGTITSGWTFCAGAALQIPFAMQMAYRFNGIGVTQNVLYENQKLIANQFNSAIGKIQDSLSSTASALGKLQDVVNQNAQALNTLVKQLSSNFGAISSVLNDILSRLDKVEAEVQIDRLITGRLQSLQTYVTQQLIRAAEIRASANLAATKMSECVCGQSKRVDFCGKGYHLMSFPQSAPHGVVFLHVTYVPAQEKNFTTAPAICHDGKAHFPREGVFVSNGTHWFVTQRNFYEPQIITTDNTFVSGNCDVVIGIVNNTVYDPLQPELDSFKEELDKYFKNHTSPDVDLGDISGINASVVNIQKEIDRLNEVAKNLNESLIDLQELGKYEQYIKGGSGYIPEAPRDGQAYVRKDGEWVLLSTFL

SEQ ID NO: 6218 - protein, 1241 aa, Artificial Sequence
  SARS-CoV-2/Portugal/PT0035/2020__EPI_ISL_418020 spike protein (1-1211)(G889C_L1034C) Foldon construct
MFVFLVLLPLVSSQCVNLTTRTQLPPAYTNSFTRGVYYPDKVFRSSVLHSTQDLFLPFFSNVTWFHAIHVSGTNGTKRFDNPVLPFNDGVYFASTEKSNIIRGWIFGTTLDSKTQSLLIVNNATNVVIKVCEFQFCNDPFLGVYYHKNNKSWMESEFRVYSSANNCTFEYVSQPFLMDLEGKQGNFKNLREFVFKNIDGYFKIYSKHTPINLVRDLPQGFSALEPLVDLPIGINITRFQTLLALHRSYLTPGDSSSGWTAGAAAYYVGYLQPRTFLLKYNENGTITDAVDCALDPLSETKCTLKSFTVEKGIYQTSNFRVQPTESIVRFPNITNLCPFGEVFNATRFASVYAWNRKRISNCVADYSVLYNSASFSTFKCYGVSPTKLNDLCFTNVYADSFVIRGDEVRQIAPGQTGKIADYNYKLPDDFTGCVIAWNSNNLDSKVGGNYNYLYRLFRKSNLKPFERDISTEIYQAGSTPCNGVEGFNCYFPLQSYGFQPTNGVGYQPYRVVVLSFELLHAPATVCGPKKSTNLVKNKCVNFNFNGLTGTGVLTESNKKFLPFQQFGRDIADTTDAVRDPQTLEILDITPCSFGGVSVITPGTNTSNQVAVLYQDVNCTEVPVAIHADQLTPTWRVYSTGSNVFQTRAGCLIGAEHVNNSYECDIPIGAGICASYQTQTNSPRRARSVASQSIIAYTMSLGAENSVAYSNNSIAIPTNFTISVTTEILPVSMTKTSVDCTMYICGDSTECSNLLLQYGSFCTQLNRALTGIAVEQDKNTQEVFAQVKQIYKTPPIKDFGGFNFSQILPDPSKPSKRSFIEDLLFNKVTLADAGFIKQYGDCLGDISARDLICAQKFNGLTVLPPLLTDEMIAQYTSALLAGTITSGWTFCAGAALQIPFAMQMAYRFNGIGVTQNVLYENQKLIANQFNSAIGKIQDSLSSTASALGKLQDVVNQNAQALNTLVKQLSSNFGAISSVLNDILSRLDKVEAEVQIDRLITGRLQSLQTYVTQQLIRAAEIRASANLAATKMSECVCGQSKRVDFCGKGYHLMSFPQSAPHGVVFLHVTYVPAQEKNFTTAPAICHDGKAHFPREGVFVSNGTHWFVTQRNFYEPQIITTDNTFVSGNCDVVIGIVNNTVYDPLQPELDSFKEELDKYFKNHTSPDVDLGDISGINASVVNIQKEIDRLNEVAKNLNESLIDLQELGKYEQYIKGGSGYIPEAPRDGQAYVRKDGEWVLLSTFL

SEQ ID NO: 6219 - protein, 1241 aa, Artificial Sequence
  SARS-CoV-2/USA/NY-NYUMC7/2020__EPI_ISL_418192 spike protein (1-1211)(G889C_L1034C) Foldon construct
MFVFLVLLPLVSSQCVNLTTRTQLPPAYTNSFTRGVYYPDKVFRSSVLHSTQDLFLPFFSNVTWFHAIHVSGTNGTKRFDNPVLPFNDGVYFASTEKSNIIRGWIFGTTLDSKTQSLLIVNNATNVVIKVCEFQFCNDPFLGVYHHKNNKSWMESEFRVYSSANNCTFEYVSQPFLMDLEGKQGNFKNLREFVFKNIDGYFKIYSKHTPINLVRDLPQGFSALEPLVDLPIGINITRFQTLLALHRSYLTPGDSSSGWTAGAAAYYVGYLQPRTFLLKYNENGTITDAVDCALDPLSETKCTLKSFTVEKGIYQTSNFRVQPTESIVRFPNITNLCPFGEVFNATRFASVYAWNRKRISNCVADYSVLYNSASFSTFKCYGVSPTKLNDLCFTNVYADSFVIRGDEVRQIAPGQTGKIADYNYKLPDDFTGCVIAWNSNNLDSKVGGNYNYLYRLFRKSNLKPFERDISTEIYQAGSTPCNGVEGFNCYFPLQSYGFQPTNGVGYQPYRVVVLSFELLHAPATVCGPKKSTNLVKNKCVNFNFNGLTGTGVLTESNKKFLPFQQFGRDIADTTDAVRDPQTLEILDITPCSFGGVSVITPGTNTSNQVAVLYQGVNCTEVPVAIHADQLTPTWRVYSTGSNVFQTRAGCLIGAEHVNNSYECDIPIGAGICASYQTQTNSPRRARSVASQSIIAYTMSLGAENSVAYSNNSIAIPTNFTISVTTEILPVSMTKTSVDCTMYICGDSTECSNLLLQYGSFCTQLNRALTGIAVEQDKNTQEVFAQVKQIYKTPPIKDFGGFNFSQILPDPSKPSKRSFIEDLLFNKVTLADAGFIKQYGDCLGDIAARDLICAQKFNGLTVLPPLLTDEMIAQYTSALLAGTITSGWTFCAGAALQIPFAMQMAYRFNGIGVTQNVLYENQKLIANQFNSAIGKIQDSLSSTASALGKLQDVVNQNAQALNTLVKQLSSNFGAISSVLNDILSRLDKVEAEVQIDRLITGRLQSLQTYVTQQLIRAAEIRASANLAATKMSECVCGQSKRVDFCGKGYHLMSFPQSAPHGVVFLHVTYVPAQEKNFTTAPAICHDGKAHFPREGVFVSNGTHWFVTQRNFYEPQIITTDNTFVSGNCDVVIGIVNNTVYDPLQPELDSFKEELDKYFKNHTSPDVDLGDISGINASVVNIQKEIDRLNEVAKNLNESLIDLQELGKYEQYIKGGSGYIPEAPRDGQAYVRKDGEWVLLSTFL

SEQ ID NO: 6220 - protein, 1241 aa, Artificial Sequence
  SARS-CoV-2/Iceland/189/2020__EPI_ISL_417709 spike protein (1-1211)(G889C_L1034C) Foldon construct
MFVFLVLLPLVSSQCVNLTTRTQLPPAYTNSFTRGVYYPDKVFRSSVLHSTQDLFLPFFSNVTWFHAIHVSGTNGTKRFDNPVLPFNDGVYFASTEKSNIIRGWIFGTTLDSKTQSLLIVNNATNVVIKVCEFQFCNDPFLGVYYHKNNKSWMESEFRVYSSANNCTFEYVSQPFLMDLEGKQGNFKNLREFVFKNIDGYFKIYSKHTPINLVRDLPQGFSALEPLVDLPIGINITRFQTLLALHRSYLTPGDSSSGWTAGAAAYYVGYLQPRTFLLKYNENGTITDAVDCALDPLSETKCTLKSFTVEKGIYQTSNFRVQPTESIVRFPNITNLCPFGEVFNATRFASVYAWNRKRISNCVADYSVLYNSASFSTFKCYGVSPTKLNDLCFTNVYADSFVIRGDEVRQIAPGQTGKIADYNYKLPDDFTGCVIAWNSNNLDSKVGGNYNYLYRLFRKSNLKPFERDISTEIYQAGSTPCNGVEGFNCYFPLQSYGFQPTNGVGYQPYRVVVLSFELLHAPATVCGPKKSTNLVKNKCVNFNFNGLTGTGVLTESNKKFLPFQQFGRDIADTTDAVRDPQTLEILDITPCSFGGVSVITPGTNTSNQVAVLYQGVNCTEVPVAIHADQLTPTWRVYSTGSNVFQTRAGCLIGAEHVNNSYECDIPIGAGICASYQTQTNSPRRARSVASQSIIAYTMSLGAENSVAYSNNSIAIPTNFTISVTTEILPVSMTKTSVDCTMYICGDSTECSNLLLQYGSFCTQLNRALTGIAVEQDKNTQEVFAQVKQIYKTPPIKDFGGFNFSQILPDPSKPSKRSFIEDLLFNKVTLADAGFTKQYGDCLGDIAARDLICAQKFNGLTVLPPLLTDEMIAQYTSALLAGTITSGWTFCAGAALQIPFAMQMAYRFNGIGVTQNVLYENQKLIANQFNSAIGKIQDSLSSTASALGKLQDVVNQNAQALNTLVKQLSSNFGAISSVLNDILSRLDKVEAEVQIDRLITGRLQSLQTYVTQQLIRAAEIRASANLAATKMSECVCGQSKRVDFCGKGYHLMSFPQSAPHGVVFLHVTYVPAQEKNFTTAPAICHDGKAHFPREGVFVSNGTHWFVTQRNFYEPQIITTDNTFVSGNCDVVIGIVNNTVYDPLQPELDSFKEELDKYFKNHTSPDVDLGDISGINASVVNIQKEIDRLNEVAKNLNESLIDLQELGKYEQYIKGGSGYIPEAPRDGQAYVRKDGEWVLLSTFL

SEQ ID NO: 6221 - protein, 1241 aa, Artificial Sequence
  SARS-CoV-2/Australia/NSW56/2020__EPI_ISL_417408 spike protein (1-1211)(G889C_L1034C) Foldon construct
MFVFLVLLPLVSSQCVNLTTRTQLPPAYTNSFTRGVYYPDKVFRSSVLHSTQDLFLPFFSNVTWFHAIHVSGTNGTKRFDNPVLPFNDGVYFASTEKSNIIRGWIFGTTLDSKTQSLLIVNNATNVVIKVCEFQFCNDPFLGVYYHKNNKSWMESEFRVYSSANNCTFEYVSQPFLMDLEGKQGNFKNLREFVFKNIDGYFKIYSKHTPINLVRDLPQGFSALEPLVDLPIGINITRFQTLLALHRSYLTPGDSSSGWTAGAAAYYVGYLQPRTFLLKYNENGTITDAVDCALDPLSETKCTLKSFTVEKGIYQTSNFRVQPTESIVRFPNITNLCPFGEVFNATRFASVYAWNRKRISNCVADYSVLYNSASFSTFKCYGVSPTKLNDLCFTNVYADSFVIRGDEVRQIAPGQTGKIADYNYKLPDDFTGCVIAWNSNNLDSKVGGNYNYLYRLFRKSNLKPFERDISTEIYQAGSTPCNGVEGFNCYFPLQSYGFQPTNGVGYQPYRVVVLSFELLHAPATVCGPKKSTNLVKNKCVNFNFNGLTGTGVLTESNKKFLPFQQFGRDIADTTDAVRDPQTLEILDITPCSFGGVSVITPGTNTSNQVAVLYQDVNCTEVPVAIHADQLTPTWRVYSTGSNVFQTRAGCLIGAEHVNNSYECDIPIGAGICASYQTQTNSPRRARSVASQSIIAYTMSLGAENSVAYSNNSIAIPTNFTISVTTEILPVSMTKTSVDCTMYICGDSTECSNLLLQYGSFCTQLNRALTGIAVEQDKNTQEVFAQVKQIYKTPPIKDFGGFNFSQILPDSSKPSKRSFIEDLLFNKVTLADAGFIKQYGDCLGDIAARDLICAQKFNGLTVLPPLLTDEMIAQYTSALLAGTITSGWTFCAGAALQIPFAMQMAYRFNGIGVTQNVLYENQKLIANQFNSAIGKIQDSLSSTASALGKLQDVVNQNAQALNTLVKQLSSNFGAISSVLNDILSRLDKVEAEVQIDRLITGRLQSLQTYVTQQLIRAAEIRASANLAATKMSECVCGQSKRVDFCGKGYHLMSFPQSAPHGVVFLHVTYVPAQEKNFTTAPAICHDGKAHFPREGVFVSNGTHWFVTQRNFYEPQIITTDNTFVSGNCDVVIGIVNNTVYDPLQPELDSFKEELDKYFKNHTSPDVDLGDISGINASVVNIQKEIDRLNEVAKNLNESLIDLQELGKYEQYIKGGSGYIPEAPRDGQAYVRKDGEWVLLSTFL

SEQ ID NO: 6222 - protein, 1241 aa, Artificial Sequence
  SARS-CoV-2/Iceland/280/2020__EPI_ISL_417608 spike protein (1-1211)(G889C_L1034C) Foldon construct
MFVFLVLLPLVSSQCVNLTTRTQLPPAYTNSFTRGVYYPDKVFRSSVLHSTQDLFLPFFSNVTWFHAIHVSGTNGTKRFDNPVLPFNDGVYFASTEKSNIIRGWIFGTTLDSKTQSLLIVNNATNVVIKVCEFQFCNDPFLGVYYHKNNKSWMESEFRVYSSANNCTFEYVSQPFLMDLEGKQGNFKNLREFVFKNIDGYFKIYSKHTPINLVRDLPQGFSALEPLVDLPIGINITRFQTLLALHRSYLTPGDSSSGWTAGAAAYYVGYLQPRTFLLKYNENGTITDAVDCALDPLSETKCTLKSFTVEKGIYQTSNFRVQPTESIVRFPNITNLCPFGEVFNATRFASVYAWNRKRISNCVADYSVLYNSASFSTFKCYGVSPTKLNDLCFTNVYADSFVIRGDEVRQIAPGQTGKIADYNYKLPDDFTGCVIAWNSNNLDSKVGGNYNYLYRLFRKSNLKPFERDISTEIYQAGSTPCNGVEGFNCYFPLQSYGFQPTNGVGYQPYRVVVLSFELLHAPATVCGPKKSTNLVKNKCVNFNFNGLTGTGVLTESNKKFLPFQQFGRDIADTTDAVRDPQTLEILDITPCSFGGVSVITPGTNTSNQVAVLYQGVNCTEVPVAIHADQLTPTWRVYSTGSNVFQTRAGCLIGAEHVNNSYECDIPIGAGICASYHTQTNSPRRARSVASQSIIAYTMSLGAENSVAYSNNSIAIPTNFTISVTTEILPVSMTKTSVDCTMYICGDSTECSNLLLQYGSFCTQLNRALTGIAVEQDKNTQEVFAQVKQIYKTPPIKDFGGFNFSQILPDPSKPSKRSFIEDLLFNKVTLADAGFIKQYGDCLGDIAARDLICAQKFNGLTVLPPLLTDEMIAQYTSALLAGTITSGWTFCAGAALQIPFAMQMAYRFNGIGVTQNVLYENQKLIANQFNSAIGKIQDSLSSTASALGKLQDVVNQNAQALNTLVKQLSSNFGAISSVLNDILSRLDKVEAEVQIDRLITGRLQSLQTYVTQQLIRAAEIRASANLAATKMSECVCGQSKRVDFCGKGYHLMSFPQSAPHGVVFLHVTYVPAQEKNFTTAPAICHDGKAHFPREGVFVSNGTHWFVTQRNFYEPQIITTDNTFVSGNCDVVIGIVNNTVYDPLQPELDSFKEELDKYFKNHTSPDVDLGDISGINASVVNIQKEIDRLNEVAKNLNESLIDLQELGKYEQYIKGGSGYIPEAPRDGQAYVRKDGEWVLLSTFL

SEQ ID NO: 6223 - protein, 1241 aa, Artificial Sequence; identical to SEQ ID NO: 6178
  SARS-CoV-2/Iceland/247/2020__EPI_ISL_417575 spike protein (1-1211)(G889C_L1034C) Foldon construct

SEQ ID NO: 6224 - protein, 1241 aa, Artificial Sequence
  SARS-CoV-2/Iceland/238/2020__EPI_ISL_417566 spike protein (1-1211)(G889C_L1034C) Foldon construct
MFVFLVLLPLVSSQCVNLTTRTQLPPAYTNSFTRGVYYPDKVFRSSVLHSTQDLFLPFFSNVTWFHAIHVSGTNGTKRFDNPVLPFNDGVYFASTEKSNIIRGWIFGTTLDSKTQSLLIVNNATNVVIKVCEFQFCNDPFLGVYYHKNNKSWMESEFRVYSSANNCTFEYVSQPFLMDLEGKQGNFKNLREFVFKNIDGYFKIYSKHTPINLVRDLPQGFSALEPLVDLPIGINITRFQTLLALHRSYLTPGDSSSGWTAGAAAYYVGYLQPRTFLLKYNENGTITDAVDCALDPLSETKCTLKSFTVEKGIYQTSNFRVQPTESIVRFPNITNLCPFGEVFNATRFASVYAWNRKRISNCVADYSVLYNSASFSTFKCYGVSPTKLNDLCFTNVYADSFVIRGDEVRQIAPGQTGKIADYNYKLPDDFTGCVIAWNSNNLDSKVGGNYNYLYRLFRKSNLKPFERDISTEIYQAGSTPCNGVEGFNCYFPLQSYGFQPTNGVGYQPYRVVVLSFELLHAPATVCGPKKSTNLVKNKCVNFNFNGLTGTGVLTESNKKFLPFQQFGRDIADTTDAVRDPQTLEILDITPCSFGGVSVITPGTNTSNQVAVLYQGVNCTEVPVAIHADQLTPTWRVYSTGSNVFQTRAGCLIGAEHVNNSYECDIPIGAGICASYQTQTNSPRRARSVASQSIIAYTMSLGAENSVAYSNNSIAIPTNFTISVTTEILPVSMTKTSVDCTMYICGDSTECSNLLLQYGSFCTQLNRALTGIAVEQDKNTQEVFAQVKQIYKTPPIKDFGGFNFSQILPDPSKPSKRSFIEDLLFNKVTLADVGFIKQYGDCLGDIAARDLICAQKFNGLTVLPPLLTDEMIAQYTSALLAGTITSGWTFCAGAALQIPFAMQMAYRFNGIGVTQNVLYENQKLIANQFNSAIGKIQDSLSSTASALGKLQDVVNQNAQALNTLVKQLSSNFGAISSVLNDILSRLDKVEAEVQIDRLITGRLQSLQTYVTQQLIRAAEIRASANLAATKMSECVCGQSKRVDFCGKGYHLMSFPQSAPHGVVFLHVTYVPAQEKNFTTAPAICHDGKAHFPREGVFVSNGTHWFVTQRNFYEPQIITTDNTFVSGNCDVVIGIVNNTVYDPLQPELDSFKEELDKYFKNHTSPDVDLGDISGINASVVNIQKEIDRLNEVAKNLNESLIDLQELGKYEQYIKGGSGYIPEAPRDGQAYVRKDGEWVLLSTFL

SEQ ID NO: 6225 - protein, 1241 aa, Artificial Sequence
  SARS-CoV-2/Greece/16/2020__EPI_ISL_418265 spike protein (1-1211)(G889C_L1034C) Foldon construct
MFVFLVLLPLVSSQCVNLTTRTQLPPAYTNSFTRGVYYPDKVFRSSVLHSTQDLFLPFFSNVTWFHAIHVSGTNGTKRFDNPVLPFNDGVYFASTEKSNIIRGWIFGTTLDSKTQSLLIVNNATNVVIKVCEFQFCNDPFLGVYYHKNNKSWMESEFRVYSSANNCTFEYVSQPFLMDLEGKQGNFKNLREFVFKNVDGYFKIYSKHTPINLVRDLPQGFSALEPLVDLPIGINITRFQTLLALHRSYLTPGDSSSGWTAGAAAYYVGYLQPRTFLLKYNENGTITDAVDCALDPLSETKCTLKSFTVEKGIYQTSNFRVQPTESIVRFPNITNLCPFGEVFNATRFASVYAWNRKRISNCVADYSVLYNSASFSTFKCYGVSPTKLNDLCFTNVYADSFVIRGDEVRQIAPGQTGKIADYNYKLPDDFTGCVIAWNSNNLDSKVGGNYNYLYRLFRKSNLKPFERDISTEIYQAGSTPCNGVEGFNCYFPLQSYGFQPTNGVGYQPYRVVVLSFELLHAPATVCGPKKSTNLVKNKCVNFNFNGLTGTGVLTESNKKFLPFQQFGRDIADTTDAVRDPQTLEILDITPCSFGGVSVITPGTNTSNQVAVLYQDVNCTEVPVAIHADQLTPTWRVYSTGSNVFQTRAGCLIGAEHVNNSYECDIPIGAGICASYQTQTNSPRRARSVASQSIIAYTMSLGAENSVAYSNNSIAIPTNFTISVTTEILPVSMTKTSVDCTMYICGDSTECSNLLLQYGSFCTQLNRALTGIAVEQDKNTQEVFAQVKQIYKTPPIKDFGGFNFSQILPDPSKPSKRSFIEDLLFNKVTLADAGFIKQYGDCLGDIAARDLICAQKFNGLTVLPPLLTDEMIAQYTSALLAGTITSGWTFCAGAALQIPFAMQMAYRFNGIGVTQNVLYENQKLIANQFNSAIGKIQDSLSSTASALGKLQDVVNQNAQALNTLVKQLSSNFGAISSVLNDILSRLDKVEAEVQIDRLITGRLQSLQTYVTQQLIRAAEIRASANLAATKMSECVCGQSKRVDFCGKGYHLMSFPQSAPHGVVFLHVTYVPAQEKNFTTAPAICHDGKAHFPREGVFVSNGTHWFVTQRNFYEPQIITTDNTFVSGNCDVVIGIVNNTVYDPLQPELDSFKEELDKYFKNHTSPDVDLGDISGINASVVNIQKEIDRLNEVAKNLNESLIDLQELGKYEQYIKGGSGYIPEAPRDGQAYVRKDGEWVLLSTFL

SEQ ID NO: 6226 - protein, 1241 aa, Artificial Sequence
  SARS-CoV-2/Iceland/319/2020__EPI_ISL_417648 spike protein (1-1211)(G889C_L1034C) Foldon construct
MFVFLVLLPLVSSQCVNLTTRTQLPPAYTNSFTRGVYYPDKVFRSSVLHSTQDLFLPFFSNVTWFHAIHVSGTNGTKRFDNPVLPFNDGVYFASTEKSNIIRGWIFGTTLDSKTQSLLIVNNATNVVIKVCEFQFCNDPFLGVYYHKNNKSWMESEFRVYSSANNCTFEYVSQPFLIDLEGKQGNFKNLREFVFKNIDGYFKIYSKHTPINLVRDLPQGFSALEPLVDLPIGINITRFQTLLALHRSYLTPGDSSSGWTAGAAAYYVGYLQPRTFLLKYNENGTITDAVDCALDPLSETKCTLKSFTVEKGIYQTSNFRVQPTESIVRFPNITNLCPFGEVFNATRFASVYAWNRKRISNCVADYSVLYNSASFSTFKCYGVSPTKLNDLCFTNVYADSFVIRGDEVRQIAPGQTGKIADYNYKLPDDFTGCVIAWNSNNLDSKVGGNYNYLYRLFRKSNLKPFERDISTEIYQAGSTPCNGVEGFNCYFPLQSYGFQPTNGVGYQPYRVVVLSFELLHAPATVCGPKKSTNLVKNKCVNFNFNGLTGTGVLTESNKKFLPFQQFGRDIADTTDAVRDPQTLEILDITPCSFGGVSVITPGTNTSNQVAVLYQGVNCTEVPVAIHADQLTPTWRVYSTGSNVFQTRAGCLIGAEHVNNSYECDIPIGAGICASYQTQTNSPRRARSVASQSIIAYTMSLGAENSVAYSNNSIAIPTNFTISVTTEILPVSMTKTSVDCTMYICGDSTECSNLLLQYGSFCTQLNRALTGIAVEQDKNTQEVFAQVKQIYKTPPIKDFGGFNFSQILPDPSKPSKRSFIEDLLFNKVTLADAGFIKQYGDCLGDIAARDLICAQKFNGLTVLPPLLTDEMIAQYTSALLAGTITSGWTFCAGAALQIPFAMQMAYRFNGIGVTQNVLYENQKLIANQFNSAIGKIQDSLSSTASALGKLQDVVNQNAQALNTLVKQLSSNFGAISSVLNDILSRLDKVEAEVQIDRLITGRLQSLQTYVTQQLIRAAEIRASANLAATKMSECVCGQSKRVDFCGKGYHLMSFPQSAPHGVVFLHVTYVPAQEKNFTTAPAICHDGKAHFPREGVFVSNGTHWFVTQRNFYEPQIITTDNTFVSGNCDVVIGIVNNTVYDPLQPELDSFKEELDKYFKNHTSPDVDLGDISGINASVVNIQKEIDRLNEVAKNLNESLIDLQELGKYEQYIKGGSGYIPEAPRDGQAYVRKDGEWVLLSTFL

SEQ ID NO: 6227 - protein, 1241 aa, Artificial Sequence
  SARS-CoV-2/Congo/94/2020__EPI_ISL_417947 spike protein (1-1211)(G889C_L1034C) Foldon construct
MFVFLVLLPLVSSQCVNLTTRTQLPPAYTNSFTRGVYYPDKVFRSSVLHSTQDLFLPFFSNVTWFHAIHVSGTNGTKRFDNPVLPFNDGVYFASTEKSNIIRGWIFGTTLDSKTQSLLIVNNATNVVIKVCEFQFCNDPFLGVYYHKNNKSWMESEFRVYSSANNCTFEYVSQPFLMDLEGKQGNFKNLREFVFKNIDGYFKIYSKHTPINLVRDLPQGFSALEPLVDLPIGINITRFQTLLALHRSYLTPGDSSSGWTAGAAAYYVGYLQPRTFLLKYNENGTITDAVDCALDPLSETKCTLKSFTVEKGIYQTSNFRVQPTESIVRFPNITNLCPFGEVFNATRFASVYAWNRKRISNCVADYSVLYNSASFSTFKCYGVSPTKLNDLCFTNVYADSFVIRGDEVRQIAPGQTGKIADYNYKLPDDFTGCVIAWNSNNLDSKVGGNYNYLYRLFRKSNLKPFERDISTEIYQAGSTPCNGVEGFNCYFPLQSYGFQPTNGVGYQPYRVVVLSFELLHAPATVCGPKKSTNLVKNKCVNFNFNGLTGTGVLTESNKKFLPFQQFGRDIADTTDAVRDPQTLEILDITPCSFGGVSVITPGTNTSNQVAVLYQGVNCTEVPVAIHADQLTPTWRVYSTGSNVFQTRAGCLIGAEHVNNSYECDIPIGAGICASYQTQTNSPRRARSVASQSIIAYTMSLGAENSVAYSNNSIAIPTNFTISVTTEILPVSMTKTSVDCTMYICGDSTECSNLLLQYGSFCTQLNRALTGIAVEQDKNTQEVFAQVKQIYKTPPIKDFGGFNFSQILPDPSKPSKRSFIEDILFNKVTLADAGFIKQYGDCLGDIAARDLICAQKFNGLTVLPPLLTDEMIAQYTSALLAGTITSGWTFCAGAALQIPFAMQMAYRFNGIGVTQNVLYENQKLIANQFNSAIGKIQDSLSSTASALGKLQDVVNQNAQALNTLVKQLSSNFGAISSVLNDILSRLDKVEAEVQIDRLITGRLQSLQTYVTQQLIRAAEIRASANLAATKMSECVCGQSKRVDFCGKGYHLMSFPQSAPHGVVFLHVTYVPAQEKNFTTAPAICHDGKAHFPREGVFVSNGTHWFVTQRNFYEPQIITTDNTFVSGNCDVVIGIVNNTVYDPLQPELDSFKEELDKYFKNHTSPDVDLGDISGINASVVNIQKEIDRLNEVAKNLNESLIDLQELGKYEQYIKGGSGYIPEAPRDGQAYVRKDGEWVLLSTFL

SEQ ID NO: 6228 - protein, 1241 aa, Artificial Sequence
  SARS-CoV-2/Congo/158/2020__EPI_ISL_417950 spike protein (1-1211)(G889C_L1034C) Foldon construct
MFVFLVLLPLVSSQCVNLTTRTQLPPAYTNSFTRGVYYPDKVFRSSVLHSTQDLFLPFFSNVTWFHAIHVSGTNGTKRFDNPVLPFNDGVYFASTEKSNIIRGWIFGTTLDSKTQSLLIVNNATNVVIKVCEFQFCNDPFLGVYYHKNNKSWMESEFRVYSSANNCTFEYVSQPFLMDLEGKQGNFKNLREFVFKNIDGYFKIYSKHTPINLVRDLPQGFSALEPLVDLPIGINITRFQTLLALHRSYLTPGDSSSGWTAGAAAYYVGYLQPRTFLLKYNENGTITDAVDCALDPLSETKCTLKSFTVEKGIYQTSNFRVQPTESIVRFPNITNLCPFGEVFNATRFASVYAWNRKRISNCVADYSVLYNSASFSTFKCYGVSPTKLNDLCFTNVYADSFVIRGDEVRQIAPGQTGKIADYNYKLPDDFTGCVIAWNSNNLDSKVGGNYNYLYRLFRKSNLKPFERDISTEIYQAGSTPCNGVEGFNCYFPLQSYGFQPTNGVGYQPYRVVVLSFELLHAPATVCGPKKSTNLVKNKCVNFNFNGLTGTGVLTESNKKFLPFQQFGRDIADTTDAVRDPQTLEILDITPCSFGGVSVITPGTNTSNQVAVLYQDVNCTEVPVAIHADQLTPTWRVYSTGSNVFQTRAGCLIGAEHVNNSYECDIPIGAGICASYQTQTNSPRRARSVASQSIIAYTMSLGAENSVAYSNNSIAIPTNFTISVTTEILPVSMTKTSVDCTMYICGDSTECSNLLLQYGSFCTQLNRALTGIAVEQDKNTQEVFAQVKQIYKTPPIKDFGGFNFSQILPDPSKPSKRSFIEDLLFNKVTLADAGFIKQYGDCLGDIAARDLICAQKFNGLTVLPPLLTDEMIAQYTSALLAGTITSGWTFCAGAALQIPFAMQMAYRFNGIGVTQNVLYENQKLIANQFNSAIGKIQDSLSSTASALGKLQDVVNQNAQALNTLVKQLSSNFGAISSVLNDILSRLDKVEAEVQIDRLITGRLQSLQTYVTQQLIRAAEIRASANLAATKMSECVCGQSKRVDFCGKGYHLMSFPQSAPHGVVFLHVTYVPAQEKNFTTAPAICHDGKAHFPREGVFVSNGTHWFVTQRNFYEPQIITTDNTFLSGNCDVVIGIVNNTVYDPLQPELDSFKEELDKYFKNHTSPDVDLGDISGINASVVNIQKEIDRLNEVAKNLNESLIDLQELGKYEQYIKGGSGYIPEAPRDGQAYVRKDGEWVLLSTFL

SEQ ID NO: 6229 - protein, 1241 aa, Artificial Sequence
  SARS-CoV-2/USA/UT-00034/2020__EPI_ISL_417977 spike protein (1-1211)(G889C_L1034C) Foldon construct
MFVFLVLLPLVSSQCVNLTTRTQLPPAYTNSFTRGVYYPDKVFRSSVLHSTQDLFLPFFSNVTWFHAIHVSGTNGTKRFDNPVLPFNDGVYFASTEKSNIIRGWIFGTTLDSKTQSLLIVNNATNVVIKVCEFQFCNDPFLGVYYYKNNKSWMESEFRVYSSANNCTFEYVSQPFLMDLEGKQGNFKNLREFVFKNIDGYFKIYSKHTPINLVRDLPQGFSALEPLVDLPIGINITRFQTLLALHRSYLTPGDSSSGWTAGAAAYYVGYLQPRTFLLKYNENGTITDAVDCALDPLSETKCTLKSFTVEKGIYQTSNFRVQPTESIVRFPNITNLCPFGEVFNATRFASVYAWNRKRISNCVADYSVLYNSASFSTFKCYGVSPTKLNDLCFTNVYADSFVIRGDEVRQIAPGQTGKIADYNYKLPDDFTGCVIAWNSNNLDSKVGGNYNYLYRLFRKSNLKPFERDISTEIYQAGSTPCNGVEGFNCYFPLQSYGFQPTNGVGYQPYRVVVLSFELLHAPATVCGPKKSTNLVKNKCVNFNFNGLTGTGVLTESNKKFLPFQQFGRDIADTTDAVRDPQTLEILDITPCSFGGVSVITPGTNTSNQVAVLYQGVNCTEVPVAIHADQLTPTWRVYSTGSNVFQTRAGCLIGAEHVNNSYECDIPIGAGICASYQTQTNSPRRARSVASQSIIAYTMSLGAENSVAYSNNSIAIPTNFTISVTTEILPVSMTKTSVDCTMYICGDSTECSNLLLQYGSFCTQLNRALTGIAVEQDKNTQEVFAQVKQIYKTPPIKDFGGFNFSQILPDPSKPSKRSFIEDLLFNKVTLADAGFIKQYGDCLGDIAARDLICAQKFNGLTVLPPLLTDEMIAQYTSALLAGTITSGWTFCAGAALQIPFAMQMAYRFNGIGVTQNVLYENQKLIANQFNSAIGKIQDSLSSTASALGKLQDVVNQNAQALNTLVKQLSSNFGAISSVLNDILSRLDKVEAEVQIDRLITGRLQSLQTYVTQQLIRAAEIRASANLAATKMSECVCGQSKRVDFCGKGYHLMSFPQSAPHGVVFLHVTYVPAQEKNFTTAPAICHDGKAHFPREGVFVSNGTHWFVTQRNFYEPQIITTDNTFVSGNCDVVIGIVNNTVYDPLQPELDSFKEELDKYFKNHTSPDVDLGDISGINASVVNIQKEIDRLNEVAKNLNESLIDLQELGKYEQYIKGGSGYIPEAPRDGQAYVRKDGEWVLLSTFL

SEQ ID NO: 6230 - protein, 1241 aa, Artificial Sequence
  SARS-CoV-2/USA/UT-00033/2020__EPI_ISL_417976 spike protein (1-1211)(G889C_L1034C) Foldon construct
MFVFLVLLPLVSSQCVNLTTRTQLPPAYTNSFTRGVYYPDKVFRSSVLHSTQDLFLPFFSNVTWFHAIHVSGTNGTKRFDNPVLPFNDGVYFASTEKSNIIRGWIFGTTLDSKTQSLLIVNNATNVVIKVCEFQFCNDPFLGVYYHKNNKSWMESEFRVYSSANNCTFEYVSQPFLMDLEGKQGNFKNLREFVFKNIDGYFKIYSKHTPINLVRDLPQGFSALEPLVDLPIGINITRFQTLLALHRSYLTPGDSSSGLTAGAAAYYVGYLQPRTFLLKYNENGTITDAVDCALDPLSETKCTLKSFTVEKGIYQTSNFRVQPTESIVRFPNITNLCPFGEVFNATRFASVYAWNRKRISNCVADYSVLYNSASFSTFKCYGVSPTKLNDLCFTNVYADSFVIRGDEVRQIAPGQTGKIADYNYKLPDDFTGCVIAWNSNNLDSKVGGNYNYLYRLFRKSNLKPFERDISTEIYQAGSTPCNGVEGFNCYFPLQSYGFQPTNGVGYQPYRVVVLSFELLHAPATVCGPKKSTNLVKNKCVNFNFNGLTGTGVLTESNKKFLPFQQFGRDIADTTDAVRDPQTLEILDITPCSFGGVSVITPGTNTSNQVAVLYQGVNCTEVPVAIHADQLTPTWRVYSTGSNVFQTRAGCLIGAEHVNNSYECDIPIGAGICASYQTQTNSPRRARSVASQSIIAYTMSLGAENSVAYSNNSIAIPTNFTISVTTEILPVSMTKTSVDCTMYICGDSTECSNLLLQYGSFCTQLNRALTGIAVEQDKNTQEVFAQVKQIYKTPPIKDFGGFNFSQILPDPSKPSKRSFIEDLLFNKVTLADAGFIKQYGDCLGDIAARDLICAQKFNGLTVLPPLLTDEMIAQYTSALLAGTITSGWTFCAGAALQIPFAMQMAYRFNGIGVTQNVLYENQKLIANQFNSAIGKIQDSLSSTASALGKLQDVVNQNAQALNTLVKQLSSNFGAISSVLNDILSRLDKVEAEVQIDRLITGRLQSLQTYVTQQLIRAAEIRASANLAATKMSECVCGQSKRVDFCGKGYHLMSFPQSAPHGVVFLHVTYVPAQEKNFTTAPAICHDGKAHFPREGVFVSNGTHWFVTQRNFYEPQIITTDNTFVSGNCDVVIGIVNNTVYDPLQPELDSFKEELDKYFKNHTSPDVDLGDISGINASVVNIQKEIDRLNEVAKNLNESLIDLQELGKYEQYIKGGSGYIPEAPRDGQAYVRKDGEWVLLSTFL

SEQ ID NO: 6231 - protein, 1241 aa, Artificial Sequence
  SARS-CoV-2/USA/WI-13/2020__EPI_ISL_417516 spike protein (1-1211)(G889C_L1034C) Foldon construct
MFVFLVLLPLVSSQCVNLTTRTQLPPAYTNSFTRGVYYPDKVFRSSVLHSTQDLFLPFFSNVTWFHAIHVSGTNGTKRFDNPVLPFNDGVYFASTEKSNIIRGWIFGTTLDSKTQSLLIVNNATNVVIKVCEFQFCNDPFLGVYYHKNNKSWMESEFRVYSSANNCTFEYVSQPFLMDLEGKQGNFKNLREFVFKNIDGYFKIYSKHTPINLVRDLPQGFSALEPLVDLPIGINITRFQTLLALHRSYLTPGDSSSGWTAGAAAYYVGYLQPRTFLLKYNENGTITDAVDCALDPLSETKCTLKSFTVEKGIYQTSNFRVLPTESIVRFPNITNLCPFGEVFNATRFASVYAWNRKRISNCVADYSVLYNSASFSTFKCYGVSPTKLNDLCFTNVYADSFVIRGDEVRQIAPGQTGKIADYNYKLPDDFTGCVIAWNSNNLDSKVGGNYNYLYRLFRKSNLKPFERDISTEIYQAGSTPCNGVEGFNCYFPLQSYGFQPTNGVGYQPYRVVVLSFELLHAPATVCGPKKSTNLVKNKCVNFNFNGLTGTGVLTESNKKFLPFQQFGRDIADTTDAVRDPQTLEILDITPCSFGGVSVITPGTNTSNQVAVLYQGVNCTEVPVAIHADQLTPTWRVYSTGSNVFQTRAGCLIGAEHVNNSYECDIPIGAGICASYQTQTNSPRRARSVASQSIIAYTMSLGAENSVAYSNNSIAIPTNFTISVTTEILPVSMTKTSVDCTMYICGDSTECSNLLLQYGSFCTQLNRALTGIAVEQDKNTQEVFAQVKQIYKTPPIKDFGGFNFSQILPDPSKPSKRSFIEDLLFNKVTLADAGFIKQYGDCLGDIAARDLICAQKFNGLTVLPPLLTDEMIAQYTSALLAGTITSGWTFCAGAALQIPFAMQMAYRFNGIGVTQNVLYENQKLIANQFNSAIGKIQDSLSSTASALGKLQDVVNQNAQALNTLVKQLSSNFGAISSVLNDILSRLDKVEAEVQIDRLITGRLQSLQTYVTQQLIRAAEIRASANLAATKMSECVCGQSKRVDFCGKGYHLMSFPQSAPHGVVFLHVTYVPAQEKNFTTAPAICHDGKAHFPREGVFVSNGTHWFVTQRNFYEPQIITTDNTFVSGNCDVVIGIVNNTVYDPLQPELDSFKEELDKYFKNHTSPDVDLGDISGINASVVNIQKEIDRLNEVAKNLNESLIDLQELGKYEQYIKGGSGYIPEAPRDGQAYVRKDGEWVLLSTFL

SEQ ID NO: 6232 - protein, 1240 aa, Artificial Sequence
  SARS-CoV-2/India/1-27/2020__EPI_ISL_413522 spike protein (1-1210)(G888C_L1033C) Foldon construct
MFVFLVLLPLVSSQCVNLTTRTQLPPAYTNSFTRGVYYPDKVFRSSVLHSTQDLFLPFFSNVTWFHAIHVSGTNGTKRFDNPVLPFNDGVYFASTEKSNIIRGWIFGTTLDSKTQSLLIVNNATNVVIKVCEFQFCNDPFLGVYHKNNKSWMESEFRVYSSANNCTFEYVSQPFLMDLEGKQGNFKNLREFVFKNIDGYFKIYSKHTPINLVRDLPQGFSALEPLVDLPIGINITRFQTLLALHRSYLTPGDSSSGWTAGAAAYYVGYLQPRTFLLKYNENGTITDAVDCALDPLSETKCTLKSFTVEKGIYQTSNFRVQPTESIVRFPNITNLCPFGEVFNATRFASVYAWNRKRISNCVADYSVLYNSASFSTFKCYGVSPTKLNDLCFTNVYADSFVIRGDEVIQIAPGQTGKIADYNYKLPDDFTGCVIAWNSNNLDSKVGGNYNYLYRLFRKSNLKPFERDISTEIYQAGSTPCNGVEGFNCYFPLQSYGFQPTNGVGYQPYRVVVLSFELLHAPATVCGPKKSTNLVKNKCVNFNFNGLTGTGVLTESNKKFLPFQQFGRDIADTTDAVRDPQTLEILDITPCSFGGVSVITPGTNTSNQVAVLYQDVNCTEVPVAIHADQLTPTWRVYSTGSNVFQTRAGCLIGAEHVNNSYECDIPIGAGICASYQTQTNSPRRARSVASQSIIAYTMSLGAENSVAYSNNSIAIPTNFTISVTTEILPVSMTKTSVDCTMYICGDSTECSNLLLQYGSFCTQLNRALTGIAVEQDKNTQEVFAQVKQIYKTPPIKDFGGFNFSQILPDPSKPSKRSFIEDLLFNKVTLADAGFIKQYGDCLGDIAARDLICAQKFNGLTVLPPLLTDEMIAQYTSALLAGTITSGWTFCAGAALQIPFAMQMAYRFNGIGVTQNVLYENQKLIANQFNSAIGKIQDSLSSTASALGKLQDVVNQNAQALNTLVKQLSSNFGAISSVLNDILSRLDKVEAEVQIDRLITGRLQSLQTYVTQQLIRAAEIRASANLAATKMSECVCGQSKRVDFCGKGYHLMSFPQSAPHGVVFLHVTYVPAQEKNFTTAPAICHDGKAHFPREGVFVSNGTHWFVTQRNFYEPQIITTDNTFVSGNCDVVIGIVNNTVYDPLQPELDSFKEELDKYFKNHTSPDVDLGDISGINASVVNIQKEIDRLNEVAKNLNESLIDLQELGKYEQYIKGGSGYIPEAPRDGQAYVRKDGEWVLLSTFL

SEQ ID NO: 6233 - protein, 1235 aa, Artificial Sequence
  SARS-CoV-2/pangolin/Guangxi/P4L/2017__EPI_ISL_410538 spike protein (1-1205)(G883C_L1028C) Foldon construct
MFVFLFVLPLVSSQCVNLTTRTGIPPGYTNSSTRGVYYPDKVFRSSILHLTQDLFLPFFSNVTWFNTINYQGGFKKFDNPVLPFNDGVYFASTEKSNIIRGWIFGTTLDARTQSLLIVNNATNVVIKVCEFQFCTDPFLGVYYHNNNKTWVENEFRVYSSANNCTFEYISQPFLMDLEGKQGNFKNLREFVFKNVDGYFKIYSKHTPIDLVRDLPRGFAALEPLVDLPIGINITRFQTLLALHRSYLTPGNLESGWTTGAAAYYVGYLQQRTFLLSYNQNGTITDAVDCSLDPLSETKCTLKSLTVEKGIYQTSNFRVQPTISIVRFPNITNLCPFGEVFNASKFASVYAWNRKRISNCVADYSVLYNSTSFSTFKCYGVSPTKLNDLCFTNVYADSFVVKGDEVRQIAPGQTGVIADYNYKLPDDFTGCVIAWNSVKQDALTGGNYGYLYRLFRKSKLKPFERDISTEIYQAGSTPCNGQVGLNCYYPLERYGFHPTTGVNYQPFRVVVLSFELLNGPATVCGPKLSTTLVKDKCVNFNFNGLTGTGVLTTSKKQFLPFQQFGRDISDTTDAVRDPQTLEILDITPCSFGGVSVITPGTNTSNQVAVLYQDVNCTEVPMAIHAEQLTPAWRVYSAGANVFQTRAGCLVGAEHVNNSYECDIPVGAGICASYHSMSSLRSVNQRSIIAYTMSLGAENSVAYSNNSIAIPTNFTISVTTEILPVSMTKTSVDCTMYICGDSIECSNLLLQYGSFCTQLNRALTGIAVEQDKNTQEVFAQVKQIYKTPPIKDFGGFNFSQILPDPSKPSKRSFIEDLLFNKVTLADAGFIKQYGDCLGDIAARDLICAQKFNGLTVLPPLLTDEMIAQYTSALLAGTITSGWTFCAGAALQIPFAMQMAYRFNGIGVTQNVLYENQKLIANQFNSAIGKIQDSLSSTASALGKLQDVVNQNAQALNTLVKQLSSNFGAISSVLNDILSRLDKVEAEVQIDRLITGRLQSLQTYVTQQLIRAAEIRASANLAATKMSECVCGQSKRVDFCGKGYHLMSFPQSAPHGVVFLHVTYVPAQEKNFTTAPAICHEGKAHFPREGVFVSNGTHWFITQRNFYEPQIITTDNTFVSGSCDVVIGIVNNTVYDPLQPELDSFKEELDKYFKNHTSPDVDLGDISGINASVVNIQKEIDRLNEVAKNLNESPIDLQELGKYEQYIKGGSGYIPEAPRDGQAYVRKDGEWVLLSTFL

SEQ ID NO: 6234 - protein, 1235 aa, Artificial Sequence
  SARS-CoV-2/pangolin/Guangxi/P5L/2017__EPI_ISL_410540 spike protein (1-1205)(G883C_L1028C) Foldon construct
MFVFLFVLPLVSSQCVNLTTRTGIPPGYTNSSTRGVYYPDKVFRSSILHLTQDLFLPFFSNVTWFNTINYQGGFKKFDNPVLPFNDGVYFASTEKSNIIRGWIFGTTLDARTQSLLIVNNATNVVIKVCEFQFCTDPFLGVYYHNNNKTWVENEFRVYSSANNCTFEYISQPFLMDLEGKQGNFKNLREFVFKNVDGYFKIYSKHTPIDLVRDLPRGFAALEPLVDLPIGINITRFQTLLALHRSYLTPGKLESGWTTGAAAYYVGYLQQRTFLLSYNQNGTITDAVDCSLDPLSETKCTLKSLTVEKGIYQTSNFRVQPTISIVRFPNITNLCPFGEVFNASKFASVYAWNRKRISNCVADYSVLYNSTSFSTFKCYGVSPTKLNDLCFTNVYADSFVVKGDEVRQIAPGQTGVIADYNYKLPDDFTGCVIAWNSVKQDALTGGNYGYLYRLFRKSKLKPFERDISTEIYQAGSTPCNGQVGLNCYYPLERYGFHPTTGVNYQPFRVVVLSFELLNGPATVCGPKLSTTLVKDKCVNFNFNGLTGTGVLTTSKKQFLPFQQFGRDISDTTDAVRDPQTLEILDITPCSFGGVSVITPGTNTSNQVAVLYQDVNCTEVPMAIHAEQLTPAWRVYSAGANVFQTRAGCLVGAEHVNNSYECDIPVGAGICASYHSMSSFRSVNQRSIIAYTMSLGAENSVAYSNNSIAIPTNFTISVTTEILPVSMTKTSVDCTMYICGDSIECSNLLLQYGSFCTQLNRALTGIAVEQDKNTQEVFAQVKQIYKTPPIKDFGGFNFSQILPDPSKPSKRSFIEDLLFNKVTLADAGFIKQYGDCLGDIAARDLICAQKFNGLTVLPPLLTDEMIAQYTSALLAGTITSGWTFCAGAALQIPFAMQMAYRFNGIGVTQNVLYENQKLIANQFNSAIGKIQDSLSSTASALGKLQDVVNQNAQALNTLVKQLSSNFGAISSVLNDILSRLDKVEAEVQIDRLITGRLQSLQTYVTQQLIRAAEIRASANLAATKMSECVCGQSKRVDFCGKGYHLMSFPQSAPHGVVFLHVTYVPAQEKNFTTAPAICHEGKAHFPREGVFVSNGTHWFITQRNFYEPQIITTDNTFVSGSCDVVIGIVNNTVYDPLQPELDSFKEELDKYFKNHTSPDVDLGDISGINASVVNIQKEIDRLNEVAKNLNESLIDLQELGKYEQYIKGGSGYIPEAPRDGQAYVRKDGEWVLLSTFL

SEQ ID NO: 6235 - protein, 1235 aa, Artificial Sequence
  SARS-CoV-2/pangolin/Guangxi/P5E/2017__EPI_ISL_410541 spike protein (1-1205)(G883C_L1028C) Foldon construct
MFVFLFVLPLVSSQCVNLTTRTGIPPGYTNSSTRGVYYPDKVFRSSILHLTQDLFLPFFSNVTWFNTITYQGGSKKFDNPVLPFNDGVYFASTEKSNIIRGWIFGTTLDARTQSLLIVNNATNVVIKVCEFQFCTDPFLGVYYHNNNKTWVENEFRVYSSANNCTFEYISQPFLMDLEGKQGNFKNLREFVFKNVDGYFKIYSKHTPIDLVRDLPRGFAALEPLVDLPIGINITRFQTLLALHRSYLTPGKLESGWTTGAAAYYVGYLQQRTFLLSYNQNGTITDAVDCSLDPLSETKCTLKSLTVEKGIYQTSNFRVQPTISIVRFPNITNLCPFGEVFNASKFASVYAWNRKRISNCVADYSVLYNSTSFSTFKCYGVSPTKLNDLCFTNVYADSFVVKGDEVRQIAPGQTGVIADYNYKLPDDFTGCVIAWNSVKQDALTGDNYGYLYRLFRKSKLKPFERDISTEIYQAGSTPCNGQVGLNCYYPLERYGFHPTTGVNYQPFRVVVLSFELLNGPATVCGPKLSTTLVKDKCVNFNFNGLTGTGVLTTSKKQFLPFQQFGRDISDTTDAVRDPQTLEILDITPCSFGGVSVITPGTNTSNQVAVLYQDVNCTEVPMAIHAEQLTPAWRVYSAGANVFQTRAGCLVGAEHVNNSYECDIPVGAGICASYHSMSSFRSVNQRSIIAYTMSLGAENSVAYSNNSIAIPTNFTISVTTEILPVSMTKTSVDCTMYICGDSIECSNLLLQYGSFCTQLNRALTGIAVEQDKNTQEVFAQVKQIYKTPPIKDFGGFNFSQILPDPSKPSKRSFIEDLLFNKVTLADAGFIKQYGDCLGDIAARDLICAQKFNGLTVLPPLLTDEMIAQYTSALLAGTITSGWTFCAGAALQIPFAMQMAYRFNGIGVTQNVLYENQKLIANQFNSAIGKIQDSLSSTASALGKLQDVVNQNAQALNTLVKQLSSNFGAISSVLNDILSRLDKVEAEVQIDRLITGRLQSLQTYVTQQLIRAAEIRASANLAATKMSECVCGQSKRVDFCGKGYHLMSFPQSAPHGVVFLHVTYVPAQEKNFTTAPAICHEGKAHFPREGVFVSNGTHWFITQRNFYEPQIITTDNTFVSGSCDVVIGIVNNTVYDPLQPELDSFKEELDKYFKNHTSPDVDLGDISGINASVVNIQKEIDRLNEVAKNLNESLIDLQELGKYEQYIKGGSGYIPEAPRDGQAYVRKDGEWVLLSTFL

SEQ ID NO: 6236 - protein, 1233 aa, Artificial Sequence
  SARS-CoV-2/pangolin/Guangxi/P1E/2017__EPI_ISL_410539 spike protein (1-1203)(G881C_L1026C) Foldon construct
MFVFLFVLPLVSSQCVNLTTRTGIQPGYTNSSTRGVYYPDKVFRSSILHLTQDLFLPFFSNVTWFNTINYQGGFKKFDNPVLPFNDGVYFASTEKSNIIRGWIFGTTLDARTQSLLIVNNATNVVIKVCEFQFCTDPFLGVYYHNNNKTWVENEFRVYSSANNCTFEYISQPFLMDLEGKQGNFKNLREFVFKNVDGYFKIYSKHTPIDLVRDLPRGFAALEPLVDLPIGINITRFQTLLALHRSYLTPGKLESGWTTGAAAYYVGYLQQRTFLLSYNQNGTITDAVDCSLDPLSETKCTLKSLTVEKGIYQTSNFRVQPTISIVRFPNITNLCPFGEVFNASKFASVYAWNRKRISNCVADYSVLYNSTSFSTFKCYGVSPTKLNDLCFTNVYADSFVVKGDEVRQIAPGQTGVIADYNYKLPDDFTGCVIAWNSVKQDALTGGNYLYRLFRKSKLKPFERDISTEIYQAGSTPCNGQVGLNCYYPLERYGFHPTTGVNYQPFRVVVLSFELLNGPATVCGPKLSTTLVKDKCVNFNFNGLTGTGVLTTSKKQFLPFQQFGRDISDTTDAVRDPQTLEILDITPCSFGGVSVITPGTNTSNQVAVLYQDVNCTEVPMAIHAEQLTPAWRVYSAGANVFQTRAGCLVGAEHVNNSYECDIPVGAGICASYHSMSSLRSVNQRSIIAYTMSLGAENSVAYSNNSIAIPTNFTISVTTEILPVSMTKTSVDCTMYICGDSIECSNLLLQYGSFCTQLNRALTGIAVEQDKNTQEVFAQVKQIYKTPPIKDFGGFNFSQILPDPSKPSKRSFIEDLLFNKVTLADAGFIKQYGDCLGDIAARDLICAQKFNGLTVLPPLLTDEMIAQYTSALLAGTITSGWTFCAGAALQIPFAMQMAYRFNGIGVTQNVLYENQKLIANQFNSAIGKIQDSLSSTASALGKLQDVVNQNAQALNTLVKQLSSNFGAISSVLNDILSRLDKVEAEVQIDRLITGRLQSLQTYVTQQLIRAAEIRASANLAATKMSECVCGQSKRVDFCGKGYHLMSFPQSAPHGVVFLHVTYVPAQEKNFTTAPAICHEGKAHFPREGVFVSNGTHWFITQRNFYEPQIITTDNTFVSGSCDVVIGIVNNTVYDPLQPELDSFKEELDKYFKNHTSPDVDLGDISGINASVVNIQKEIDRLNEVAKNLNESLIDLQELGKYEQYIKGGSGYIPEAPRDGQAYVRKDGEWVLLSTFL

SEQ ID NO: 6237 - protein, 1241 aa, Artificial Sequence
  SARS-CoV-2/Wuhan/WIV05/2019__EPI_ISL_402128 spike protein (1-1211)(I909C_Y1047C) Foldon construct
MFVFLVLLPLVSSQCVNLTTRTQLPPAYTNSFTRGVYYPDKVFRSSVLHSTQDLFLPFFSNVTWFHAIHVSGTNGTKRFDNPVLPFNDGVYFASTEKSNIIRGWIFGTTLDSKTQSLLIVNNATNVVIKVCEFQFCNDPFLGVYYHKNNKSWMESEFRVYSSANNCTFEYVSQPFLMDLEGKQGNFKNLREFVFKNIDGYFKIYSKHTPINLVRDLPQGFSALEPLVDLPIGINITRFQTLLALHRSYLTPGDSSSGWTAGAAAYYVGYLQPRTFLLKYNENGTITDAVDCALDPLSETKCTLKSFTVEKGIYQTSNFRVQPTESIVRFPNITNLCPFGEVFNATRFASVYAWNRKRISNCVADYSVLYNSASFSTFKCYGVSPTKLNDLCFTNVYADSFVIRGDEVRQIAPGQTGKIADYNYKLPDDFTGCVIAWNSNNLDSKVGGNYNYLYRLFRKSNLKPFERDISTEIYQAGSTPCNGVEGFNCYFPLQSYGFQPTNGVGYQPYRVVVLSFELLHAPATVCGPKKSTNLVKNKCVNFNFNGLTGTGVLTESNKKFLPFQQFGRDIADTTDAVRDPQTLEILDITPCSFGGVSVITPGTNTSNQVAVLYQDVNCTEVPVAIHADQLTPTWRVYSTGSNVFQTRAGCLIGAEHVNNSYECDIPIGAGICASYQTQTNSPRRARSVASQSIIAYTMSLGAENSVAYSNNSIAIPTNFTISVTTEILPVSMTKTSVDCTMYICGDSTECSNLLLQYGSFCTQLNRALTGIAVEQDKNTQEVFAQVKQIYKTPPIKDFGGFNFSQILPDPSKPSKRSFIEDLLFNKVTLADAGFIKQYGDCLGDIAARDLICAQKFNGLTVLPPLLTDEMIAQYTSALLAGTITSGWTFGAGAALQIPFAMQMAYRFNGCGVTQNVLYENQKLIANQFNSAIGKIQDSLSSTASALGKLQDVVNQNAQALNTLVKQLSSNFGAISSVLNDILSRLDKVEAEVQIDRLITGRLQSLQTYVTQQLIRAAEIRASANLAATKMSECVLGQSKRVDFCGKGCHLMSFPQSAPHGVVFLHVTYVPAQEKNFTTAPAICHDGKAHFPREGVFVSNGTHWFVTQRNFYEPQIITTDNTFVSGNCDVVIGIVNNTVYDPLQPELDSFKEELDKYFKNHTSPDVDLGDISGINASVVNIQKEIDRLNEVAKNLNESLIDLQELGKYEQYIKGGSGYIPEAPRDGQAYVRKDGEWVLLSTFL

SEQ ID NO: 6238 - protein, 1237 aa, Artificial Sequence
  SARS-CoV-2/bat/Yunnan/RaTG13/2013__EPI_ISL_402131 spike protein (1-1207)(I905C_Y1043C) Foldon construct
MFVFLVLLPLVSSQCVNLTTRTQLPPAYTNSSTRGVYYPDKVFRSSVLHLTQDLFLPFFSNVTWFHAIHVSGTNGIKRFDNPVLPFNDGVYFASTEKSNIIRGWIFGTTLDSKTQSLLIVNNATNVVIKVCEFQFCNDPFLGVYYHKNNKSWMESEFRVYSSANNCTFEYVSQPFLMDLEGKQGNFKNLREFVFKNIDGYFKIYSKHTPINLVRDLPPGFSALEPLVDLPIGINITRFQTLLALHRSYLTPGDSSSGWTAGAAAYYVGYLQPRTFLLKYNENGTITDAVDCALDPLSETKCTLKSFTVEKGIYQTSNFRVQPTDSIVRFPNITNLCPFGEVFNATTFASVYAWNRKRISNCVADYSVLYNSTSFSTFKCYGVSPTKLNDLCFTNVYADSFVITGDEVRQIAPGQTGKIADYNYKLPDDFTGCVIAWNSKHIDAKEGGNFNYLYRLFRKANLKPFERDISTEIYQAGSKPCNGQTGLNCYYPLYRYGFYPTDGVGHQPYRVVVLSFELLNAPATVCGPKKSTNLVKNKCVNFNFNGLTGTGVLTESNKKFLPFQQFGRDIADTTDAVRDPQTLEILDITPCSFGGVSVITPGTNASNQVAVLYQDVNCTEVPVAIHADQLTPTWRVYSTGSNVFQTRAGCLIGAEHVNNSYECDIPIGAGICASYQTQTNSRSVASQSIIAYTMSLGAENSVAYSNNSIAIPTNFTISVTTEILPVSMTKTSVDCTMYICGDSTECSNLLLQYGSFCTQLNRALTGIAVEQDKNTQEVFAQVKQIYKTPPIKDFGGFNFSQILPDPSKPSKRSFIEDLLFNKVTLADAGFIKQYGDCLGDIAARDLICAQKFNGLTVLPPLLTDEMIAQYTSALLAGTITSGWTFGAGAALQIPFAMQMAYRFNGCGVTQNVLYENQKLIANQFNSAIGKIQDSLSSTASALGKLQDVVNQNAQALNTLVKQLSSNFGAISSVLNDILSRLDKVEAEVQIDRLITGRLQSLQTYVTQQLIRAAEIRASANLAATKMSECVLGQSKRVDFCGKGCHLMSFPQSAPHGVVFLHVTYVPAQEKNFTTAPAICHDGKAHFPREGVFVSNGTHWFVTQRNFYEPQIITTDNTFVSGSCDVVIGIVNNTVYDPLQPELDSFKEELDKYFKNHTSPDVDLGDISGINASVVNIQKEIDRLNEVAKNLNESLIDLQELGKYEQYIKGGSGYIPEAPRDGQAYVRKDGEWVLLSTFL

SEQ ID NO: 6239 - protein, 1241 aa, Artificial Sequence
  SARS-CoV-2/Wuhan/HBCDC-HB-01/2019__EPI_ISL_402132 spike protein (1-1211)(I909C_Y1047C) Foldon construct
MFVFLVLLPLVSSQCVNLTTRTQLPPAYTNSITRGVYYPDKVFRSSVLHSTQDLFLPFFSNVTWFHAIHVSGTNGTKRFDNPVLPFNDGVYFASTEKSNIIRGWIFGTTLDSKTQSLLIVNNATNVVIKVCEFQFCNDPFLGVYYHKNNKSWMESEFRVYSSANNCTFEYVSQPFLMDLEGKQGNFKNLREFVFKNIDGYFKIYSKHTPINLVRDLPQGFSALEPLVDLPIGINITRFQTLLALHRSYLTPGDSSSGWTAGAAAYYVGYLQPRTFLLKYNENGTITDAVDCALDPLSETKCTLKSFTVEKGIYQTSNFRVQPTESIVRFPNITNLCPFGEVFNATRFASVYAWNRKRISNCVADYSVLYNSASFSTFKCYGVSPTKLNDLCFTNVYADSFVIRGDEVRQIAPGQTGKIADYNYKLPDDFTGCVIAWNSNNLDSKVGGNYNYLYRLFRKSNLKPFERDISTEIYQAGSTPCNGVEGFNCYFPLQSYGFQPTNGVGYQPYRVVVLSFELLHAPATVCGPKKSTNLVKNKCVNFNFNGLTGTGVLTESNKKFLPFQQFGRDIADTTDAVRDPQTLEILDITPCSFGGVSVITPGTNTSNQVAVLYQDVNCTEVPVAIHADQLTPTWRVYSTGSNVFQTRAGCLIGAEHVNNSYECDIPIGAGICASYQTQTNSPRRARSVASQSIIAYTMSLGAENSVAYSNNSIAIPTNFTISVTTEILPVSMTKTSVDCTMYICGDSTECSNLLLQYGSFCTQLNRALTGIAVEQDKNTQEVFAQVKQIYKTPPIKDFGGFNFSQILPDPSKPSKRSFIEDLLFNKVTLADAGFIKQYGDCLGDIAARDLICAQKFNGLTVLPPLLTDEMIAQYTSALLAGTITSGWTFGAGAALQIPFAMQMAYRFNGCGVTQNVLYENQKLIANQFNSAIGKIQDSLSSTASALGKLQDVVNQNAQALNTLVKQLSSNFGAISSVLNDILSRLDKVEAEVQIDRLITGRLQSLQTYVTQQLIRAAEIRASANLAATKMSECVLGQSKRVDFCGKGCHLMSFPQSAPHGVVFLHVTYVPAQEKNFTTAPAICHDGKAHFPREGVFVSNGTHWFVTQRNFYEPQIITTDNTFVSGNCDVVIGIVNNTVYDPLQPELDSFKEELDKYFKNHTSPDVDLGDISGINASVVNIQKEIDRLNEVAKNLNESLIDLQELGKYEQYIKGGSGYIPEAPRDGQAYVRKDGEWVLLSTFL

SEQ ID NO: 6240 - protein, 1241 aa, Artificial Sequence
  SARS-CoV-2/Guangdong/20SF028/2020__EPI_ISL_403936 spike protein (1-1211)(I909C_Y1047C) Foldon construct
MFVFLVLLPLVSSQCVNLTTRTQLPPAYTNSFTRGVYYPDKVFRSSVLYSTQDLFLPFFSNVTWFHAIHVSGTNGTKRFDNPVLPFNDGVYFASTEKSNIIRGWIFGTTLDSKTQSLLIVNNATNVVIKVCEFQFCNDPFLGVYYHKNNKSWMESEFRVYSSANNCTFEYVSQPFLMDLEGKQGNFKNLREFVFKNIDGYFKIYSKHTPINLVRDLPQGFSALEPLVDLPIGINITRFQTLLALHRSYLTPGDSSSGWTAGAAAYYVGYLQPRTFLLKYNENGTITDAVDCALDPLSETKCTLKSFTVEKGIYQTSNFRVQPTESIVRFPNITNLCPFGEVFNATRFASVYAWNRKRISNCVADYSVLYNSASFSTFKCYGVSPTKLNDLCFTNVYADSFVIRGDEVRQIAPGQTGKIADYNYKLPDDFTGCVIAWNSNNLDSKVGGNYNYLYRLFRKSNLKPFERDISTEIYQAGSTPCNGVEGFNCYFPLQSYGFQPTNGVGYQPYRVVVLSFELLHAPATVCGPKKSTNLVKNKCVNFNFNGLTGTGVLTESNKKFLPFQQFGRDIADTTDAVRDPQTLEILDITPCSFGGVSVITPGTNTSNQVAVLYQDVNCTEVPVAIHADQLTPTWRVYSTGSNVFQTRAGCLIGAEHVNNSYECDIPIGAGICASYQTQTNSPRRARSVASQSIIAYTMSLGAENSVAYSNNSIAIPTNFTISVTTEILPVSMTKTSVDCTMYICGDSTECSNLLLQYGSFCTQLNRALTGIAVEQDKNTQEVFAQVKQIYKTPPIKDFGGFNFSQILPDPSKPSKRSFIEDLLFNKVTLADAGFIKQYGDCLGDIAARDLICAQKFNGLTVLPPLLTDEMIAQYTSALLAGTITSGWTFGAGAALQIPFAMQMAYRFNGCGVTQNVLYENQKLIANQFNSAIGKIQDSLSSTASALGKLQDVVNQNAQALNTLVKQLSSNFGAISSVLNDILSRLDKVEAEVQIDRLITGRLQSLQTYVTQQLIRAAEIRASANLAATKMSECVLGQSKRVDFCGKGCHLMSFPQSAPHGVVFLHVTYVPAQEKNFTTAPAICHDGKAHFPREGVFVSNGTHWFVTQRNFYEPQIITTDNTFVSGNCDVVIGIVNNTVYDPLQPELDSFKEELDKYFKNHTSPDVDLGDISGINASVVNIQKEIDRLNEVAKNLNESLIDLQELGKYEQYIKGGSGYIPEAPRDGQAYVRKDGEWVLLSTFL

SEQ ID NO: 6241 - protein, 1241 aa, Artificial Sequence
  SARS-CoV-2/Shenzhen/SZTH-001/2020__EPI_ISL_406592 spike protein (1-1211)(I909C_Y1047C) Foldon construct
MFVFLVLLPLVSSQCVNLTTRTQLPPAYTNSFTRGVYYPDKVFRSSVLHSTQDLFLPFFSNVTWFHAIHVSGTNGTKRFDNPVLPFNDGVYFASTEKSNIIRGWIFGTTLDSKTQSLLIVNNATNVVIKVCEFQFCNDPFLGVYYHKNNKSWMESEFRVYSSANNCTFEYVSQPFLMDLEGKQGNFKNLREFVFKNIDGYFKIYSKHTPINLVRDLPQGFSALEPLVDLPIGINITRFQTLLALHRSYLTPGDSSSGWTAGAAAYYVGYLQPRTFLLKYNENGTITDAVDCALDPLSETKCTLKSFTVEKGIYQTSNFRVQPTESIVRFPNITNLCPFGEVFNATRFASVYAWNRKRISNCVADYSVLYNSASFSTFKCYGVSPTKLNDLCFTNVYADSFVIRGDEVRQIAPGQTGKIADYNYKLPDDFTGCVIAWNSNNLDSKVGGNYNYLYRLFRKSNLKPFERDISTEIYQAGSTPCNGVEGFNCYFPLQSYGFQPTNGVGYQPYRVVVLSFELLHAPATVCGPKKSTNLVKNKCVNFNFNGLTGTGVLTESNKKFLPFQQFGRDIADTTDAVRDPQTLEILDITPCSFGGVSVITPGTNTSNQVAVLYQDVNCTEVPVAIHADQLTPTWRVYSTGSNVFQTRAGCLIGAEHVNNSYECDIPIGAGICASYQTQTNSPRRARSVASQSIIAYTMSLGAENSVAYSNNSIAIPTNFTISVTTEILPVSMTKTSVDCTMYICGDSTECSNLLLQYGSFCTQLNRALTGIAVEQDKNTQEVFAQVKQIYKTPPIKDFGGFNFSQILPDPSKPSKRSFIEDLLFNKVTLADAGFIKQYGDCLGDIAARDLICAQKFNGLTVLPPLLTDEMIAQYTSALLAGTITSGWTFGAGAALQIPFAMQMAYRFNGCGVTQNVLYENQKLIANQFNSAIGKIQDSLSSTASALGKLQDVVNQNAQALNTLVKQLSSNFGAISSVLNDILSRLDKVEAEVQIDRLITGRLQSLQTYVTQQLIRAAEIRASANLAATKMSECVLGQSKRVDFCGKGCHLMSFPQSAPHGVVFLHVTYVPAQEKNFTTAPAICHDGKAHFPREGVFVSNGTHWFVTQRNFYEPQIITTDNTFVSGNCDVLIGIVNNTVYDPLQPELDSFKEELDKYFKNHTSPDVDLGDISGINASVVNIQKEIDRLNEVAKNLNESLIDLQELGKYEQYIKGGSGYIPEAPRDGQAYVRKDGEWVLLSTFL

SEQ ID NO: 6242 - protein, 1241 aa, Artificial Sequence
  SARS-CoV-2/Shenzhen/SZTH-004/2020__EPI_ISL_406595 spike protein (1-1211)(I909C_Y1047C) Foldon construct
MFVFLVLLPLVSSQCVNLTTRTQLPPAYTNSFTRGVYYPDKVFRSSVLHSTQDLFLPFFSNVTWFHAIHVSGTNGTKRFDNPVLPFNDGVYFASTEKSNIIRGWIFGTTLDSKTQSLLIVNNATNVVIKVCEFQFCNDPFLGVYYHKNNKSWMESEFRVYSSANNCTFEYVSQPFLMDLEGKQGNFKNLREFVFKNIDGYFKIYSKHTPINLVRDLPQGFSALEPLVDLPIGINITRFQTLLALHRSYLTPGDSSSGWTAGAAAYYVGYLQPRTFLLKYNENGTITDAVDCALDPLSETKCTLKSFTVEKGIYQTSNFRVQPTESIVRFPNITNLCPFGEVFNATRFASVYAWDRKRISNCVAYYSVLYNSASFSTFKCYGVSPTKLNDLCFTNVYADSFVIRGDEVRQIAPGQTGKIADYNYKLPDDFTGCVIAWNSNNLDSKVGGNYNYLYRLFRKSNLKPFERDISTEIYQAGSTPCNGVEGFNCYFPLQSYGFQPTNGVGYQPYRVVVLSFELLHAPATVCGPKKSTNLVKNKCVNFNFNGLTGTGVLTESNKKFLPFQQFGRDIADTTDAVRDPQTLEILDITPCSFGGVSVITPGTNTSNQVAVLYQDVNCTEVPVAIHADQLTPTWRVYSTGSNVFQTRAGCLIGAEHVNNSYECDIPIGAGICASYQTQTNSPRRARSVASQSIIAYTMSLGAENSVAYSNNSIAIPTNFTISVTTEILPVSMTKTSVDCTMYICGDSTECSNLLLQYGSFCTQLNRALTGIAVEQDKNTQEVFAQVKQIYKTPPIKDFGGFNFSQILPDPSKPSKRSFIEDLLFNKVTLADAGFIKQYGDCLGDIAARDLICAQKFNGLTVLPPLLTDEMIAQYTSALLAGTITSGWTFGAGAALQIPFAMQMAYRFNGCGVTQNVLYENQKLIANQFNSAIGKIQDSLSSTASALGKLQDVVNQNAQALNTLVKQLSSNFGAISSVLNDILSRLDKVEAEVQIDRLITGRLQSLQTYVTQQLIRAAEIRASANLAATKMSECVLGQSKRVDFCGKGCHLMSFPQSAPHGVVFLHVTYVPAQEKNFTTAPAICHDGKAHFPREGVFVSNGTHWFVTQRNFYEPQIITTDNTFVSGNCDVVIGIVNNTVYDPLQPELDSFKEELDKYFKNHTSPDVDLGDISGINASVVNIQKEIDRLNEVAKNLNESLIDLQELGKYEQYIKGGSGYIPEAPRDGQAYVRKDGEWVLLSTFL

SEQ ID NO: 6243 - protein, 1241 aa, Artificial Sequence
  SARS-CoV-2/France/IDF0372/2020__EPI_ISL_406596 spike protein (1-1211)(I909C_Y1047C) Foldon construct
MFVFLVLLPLVSSQCVNLTTRTQLPPAYTNSFTRGVYYPDKVFRSSVLHSTQDLFLPFFSNVTWFHAIHVSGTNGTKRFDNPVLPFNDGVYFASTEKSNIIRGWIFGTTLDSKTQSLLIVNNATNVVIKVCEFQFCNDPFLGVYYHKNNKSWMESEFRVYSSANNCTFEYVSQPFLMDLEGKQGNFKNLREFVFKNIDGYFKIYSKHTPINLVRDLPQGFSALEPLVDLPIGINITRFQTLLALHRSYLTPGDSSSGWTAGAAAYYVGYLQPRTFLLKYNENGTITDAVDCALDPLSETKCTLKSFTVEKGIYQTSNFRVQPTESIVRFPNITNLCPFGEVFNATRFASVYAWNRKRISNCVADYSFLYNSASFSTFKCYGVSPTKLNDLCFTNVYADSFVIRGDEVRQIAPGQTGKIADYNYKLPDDFTGCVIAWNSNNLDSKVGGNYNYLYRLFRKSNLKPFERDISTEIYQAGSTPCNGVEGFNCYFPLQSYGFQPTNGVGYQPYRVVVLSFELLHAPATVCGPKKSTNLVKNKCVNFNFNGLTGTGVLTESNKKFLPFQQFGRDIADTTDAVRDPQTLEILDITPCSFGGVSVITPGTNTSNQVAVLYQDVNCTEVPVAIHADQLTPTWRVYSTGSNVFQTRAGCLIGAEHVNNSYECDIPIGAGICASYQTQTNSPRRARSVASQSIIAYTMSLGAENSVAYSNNSIAIPTNFTISVTTEILPVSMTKTSVDCTMYICGDSTECSNLLLQYGSFCTQLNRALTGIAVEQDKNTQEVFAQVKQIYKTPPIKDFGGFNFSQILPDPSKPSKRSFIEDLLFNKVTLADAGFIKQYGDCLGDIAARDLICAQKFNGLTVLPPLLTDEMIAQYTSALLAGTITSGWTFGAGAALQIPFAMQMAYRFNGCGVTQNVLYENQKLIANQFNSAIGKIQDSLSSTASALGKLQDVVNQNAQALNTLVKQLSSNFGAISSVLNDILSRLDKVEAEVQIDRLITGRLQSLQTYVTQQLIRAAEIRASANLAATKMSECVLGQSKRVDFCGKGCHLMSFPQSAPHGVVFLHVTYVPAQEKNFTTAPAICHDGKAHFPREGVFVSNGTHWFVTQRNFYEPQIITTDNTFVSGNCDVVIGIVNNTVYDPLQPELDSFKEELDKYFKNHTSPDVDLGDISGINASVVNIQKEIDRLNEVAKNLNESLIDLQELGKYEQYIKGGSGYIPEAPRDGQAYVRKDGEWVLLSTFL

SEQ ID NO: 6244 - protein, 1241 aa, Artificial Sequence
  SARS-CoV-2/Australia/VIC01/2020__EPI_ISL_406844 spike protein (1-1211)(I909C_Y1047C) Foldon construct
MFVFLVLLPLVSSQCVNLTTRTQLPPAYTNSFTRGVYYPDKVFRSSVLHSTQDLFLPFFSNVTWFHAIHVSGTNGTKRFDNPVLPFNDGVYFASTEKSNIIRGWIFGTTLDSKTQSLLIVNNATNVVIKVCEFQFCNDPFLGVYYHKNNKSWMESEFRVYSSANNCTFEYVSQPFLMDLEGKQGNFKNLREFVFKNIDGYFKIYSKHTPINLVRDLPQGFSALEPLVDLPIGINITRFQTLLALHRRYLTPGDSSSGWTAGAAAYYVGYLQPRTFLLKYNENGTITDAVDCALDPLSETKCTLKSFTVEKGIYQTSNFRVQPTESIVRFPNITNLCPFGEVFNATRFASVYAWNRKRISNCVADYSVLYNSASFSTFKCYGVSPTKLNDLCFTNVYADSFVIRGDEVRQIAPGQTGKIADYNYKLPDDFTGCVIAWNSNNLDSKVGGNYNYLYRLFRKSNLKPFERDISTEIYQAGSTPCNGVEGFNCYFPLQSYGFQPTNGVGYQPYRVVVLSFELLHAPATVCGPKKSTNLVKNKCVNFNFNGLTGTGVLTESNKKFLPFQQFGRDIADTTDAVRDPQTLEILDITPCSFGGVSVITPGTNTSNQVAVLYQDVNCTEVPVAIHADQLTPTWRVYSTGSNVFQTRAGCLIGAEHVNNSYECDIPIGAGICASYQTQTNSPRRARSVASQSIIAYTMSLGAENSVAYSNNSIAIPTNFTISVTTEILPVSMTKTSVDCTMYICGDSTECSNLLLQYGSFCTQLNRALTGIAVEQDKNTQEVFAQVKQIYKTPPIKDFGGFNFSQILPDPSKPSKRSFIEDLLFNKVTLADAGFIKQYGDCLGDIAARDLICAQKFNGLTVLPPLLTDEMIAQYTSALLAGTITSGWTFGAGAALQIPFAMQMAYRFNGCGVTQNVLYENQKLIANQFNSAIGKIQDSLSSTASALGKLQDVVNQNAQALNTLVKQLSSNFGAISSVLNDILSRLDKVEAEVQIDRLITGRLQSLQTYVTQQLIRAAEIRASANLAATKMSECVLGQSKRVDFCGKGCHLMSFPQSAPHGVVFLHVTYVPAQEKNFTTAPAICHDGKAHFPREGVFVSNGTHWFVTQRNFYEPQIITTDNTFVSGNCDVVIGIVNNTVYDPLQPELDSFKEELDKYFKNHTSPDVDLGDISGINASVVNIQKEIDRLNEVAKNLNESLIDLQELGKYEQYIKGGSGYIPEAPRDGQAYVRKDGEWVLLSTFL

SEQ ID NO: 6245 - protein, 1241 aa, Artificial Sequence
  SARS-CoV-2/Germany/BavPat1/2020__EPI_ISL_406862 spike protein (1-1211)(I909C_Y1047C) Foldon construct
MFVFLVLLPLVSSQCVNLTTRTQLPPAYTNSFTRGVYYPDKVFRSSVLHSTQDLFLPFFSNVTWFHAIHVSGTNGTKRFDNPVLPFNDGVYFASTEKSNIIRGWIFGTTLDSKTQSLLIVNNATNVVIKVCEFQFCNDPFLGVYYHKNNKSWMESEFRVYSSANNCTFEYVSQPFLMDLEGKQGNFKNLREFVFKNIDGYFKIYSKHTPINLVRDLPQGFSALEPLVDLPIGINITRFQTLLALHRSYLTPGDSSSGWTAGAAAYYVGYLQPRTFLLKYNENGTITDAVDCALDPLSETKCTLKSFTVEKGIYQTSNFRVQPTESIVRFPNITNLCPFGEVFNATRFASVYAWNRKRISNCVADYSVLYNSASFSTFKCYGVSPTKLNDLCFTNVYADSFVIRGDEVRQIAPGQTGKIADYNYKLPDDFTGCVIAWNSNNLDSKVGGNYNYLYRLFRKSNLKPFERDISTEIYQAGSTPCNGVEGFNCYFPLQSYGFQPTNGVGYQPYRVVVLSFELLHAPATVCGPKKSTNLVKNKCVNFNFNGLTGTGVLTESNKKFLPFQQFGRDIADTTDAVRDPQTLEILDITPCSFGGVSVITPGTNTSNQVAVLYQGVNCTEVPVAIHADQLTPTWRVYSTGSNVFQTRAGCLIGAEHVNNSYECDIPIGAGICASYQTQTNSPRRARSVASQSIIAYTMSLGAENSVAYSNNSIAIPTNFTISVTTEILPVSMTKTSVDCTMYICGDSTECSNLLLQYGSFCTQLNRALTGIAVEQDKNTQEVFAQVKQIYKTPPIKDFGGFNFSQILPDPSKPSKRSFIEDLLFNKVTLADAGFIKQYGDCLGDIAARDLICAQKFNGLTVLPPLLTDEMIAQYTSALLAGTITSGWTFGAGAALQIPFAMQMAYRFNGCGVTQNVLYENQKLIANQFNSAIGKIQDSLSSTASALGKLQDVVNQNAQALNTLVKQLSSNFGAISSVLNDILSRLDKVEAEVQIDRLITGRLQSLQTYVTQQLIRAAEIRASANLAATKMSECVLGQSKRVDFCGKGCHLMSFPQSAPHGVVFLHVTYVPAQEKNFTTAPAICHDGKAHFPREGVFVSNGTHWFVTQRNFYEPQIITTDNTFVSGNCDVVIGIVNNTVYDPLQPELDSFKEELDKYFKNHTSPDVDLGDISGINASVVNIQKEIDRLNEVAKNLNESLIDLQELGKYEQYIKGGSGYIPEAPRDGQAYVRKDGEWVLLSTFL

SEQ ID NO: 6246 - protein, 1241 aa, Artificial Sequence
  SARS-CoV-2/Wuhan/HBCDC-HB-02/2020__EPI_ISL_412978 spike protein (1-1211)(I909C_Y1047C) Foldon construct
MFVFLVLLPLVSSQCVNLTTRTQLPPAYTNSFTRGVYYPDKVFRSSVLHSTQDLFLPFFSNVTWFHAIHVSGTNGTKRFDNPVLPFNDGVYFASTEKSNIIRGWIFGTTLDSKTQSLLIVNNATNVVIKVCEFQFCNDPFLGVYYHKNNKSWMESEFRVYSSANNCTFEYVSQPFLMDLEGKQGNFKNLREFVFKNIDGYFKIYSKHTPINLVRDLPQGFSALEPLVDLPIGINITRFQTLLALHRSYLTPGDSSSGWTAGAAAYYVGYLQPRTFLLKYNENGTITDAVDCALDPLSETKCTLKSFTVEKGIYQTSNFRVQPTESIVRFPNITNLCPFGEVFNATRFASVYAWNRKRISNCVADYSVLYNSASFSTFKCYGVSPTKLNDLCFTNVYADSFVIRGDEVRQIAPGQTGKIADYNYKLPDDFTGCVIAWNSNNLDSKVGGNYNYLYRLFRKSNLKPFERDISTEIYQAGSTPCNGVEGFNCYFPLQSYGFQPTNGVGYQPYRVVVLSFELLHAPATVCGPKKSTNLVKNKCVNFNFNGLTGTGVLTESNKKFLPFQQFGRDIADTTDAVRDPQTLEILDITPCSFGGVSVITPGTNTSNQVAVLYQDVNCTEVPVAIHADQLTPTWRVYSTGSNVFQTRAGCLIGAEHVNNSYECDIPIGAGICASYQTQTNSPRRARSVASQSIIAYTMSLGAENSVAYSNNSIAIPTNFTISVTTEILPVSMTKTSVDCTMYICGDSTECSNFLLQYGSFCTQLNRALTGIAVEQDKNTQEVFAQVKQIYKTPPIKDFGGFNFSQILPDPSKPSKRSFIEDLLFNKVTLADAGFIKQYGDCLGDIAARDLICAQKFNGLTVLPPLLTDEMIAQYTSALLAGTITSGWTFGAGAALQIPFAMQMAYRFNGCGVTQNVLYENQKLIANQFNSAIGKIQDSLSSTASALGKLQDVVNQNAQALNTLVKQLSSNFGAISSVLNDILSRLDKVEAEVQIDRLITGRLQSLQTYVTQQLIRAAEIRASANLAATKMSECVLGQSKRVDFCGKGCHLMSFPQSAPHGVVFLHVTYVPAQEKNFTTAPAICHDGKAHFPREGVFVSNGTHWFVTQRNFYEPQIITTDNTFVSGNCDVVIGIVNNTVYDPLQPELDSFKEELDKYFKNHTSPDVDLGDISGINASVVNIQKEIDRLNEVAKNLNESLIDLQELGKYEQYIKGGSGYIPEAPRDGQAYVRKDGEWVLLSTFL

SEQ ID NO: 6247 - protein, 1241 aa, Artificial Sequence
  SARS-CoV-2/Australia/QLD02/2020__EPI_ISL_407896 spike protein (1-1211)(I909C_Y1047C) Foldon construct
MFVFLVLLPLVSSQCVNLTTRTQLPPAYTNSFTRGVYYPDKVFRSSVLHSTQDLFLPFFSNVTWFHAIHVSGTNGTKRFDNPVLPFNDGVYFASTEKSNIIRGWIFGTTLDSKTQSLLIVNNATNVVIKVCEFQFCNDPFLGVYYHKNNKSWMESEFRVYSSANNCTFEYVSQPFLMDLEGKQGNFKNLREFVFKNIDGYFKIYSKHTPINLVRDLPQGFSALEPLVDLPIGINITRFQTLLALHRSYLTPGDSSSGWTAGAAAYYVGYLQPRTFLLKYNENGTITDAVDCALDPLSETKCTLKSFTVEKGIYQTSNFRVQPTESIVRFPNITNLCPFGEVFNATRFASVYAWNRKRISNCVADYSVLYNSASFSTFKCYGVSPTKLNDLCFTNVYADSFVIRGDEVRQIAPGQTGKIADYNYKLPDDFTGCVIAWNSNNLDSKVGGNYNYLYRLFRKSNLKPFERDISTEIYQAGSTPCNGVEGFNCYFPLQSYGFQPTNGVGYQPYRVVVLSFELLHAPATVCGPKKSTNLVKNKCVNFNFNGLTGTGVLTESNKKFLPFQQFGRDIADTTDAVRDPQTLEILDITPCSFGGVSVITPGTNTSNQVAVLYQDVNCTEVPVAIHADQLTPTWRVYSTGSNVFQTRAGCLIGAEHVNNSYECDIPIGAGICASYQTQTNSPRRARSVASQSIIAYTMSLGAENSVAYSNNSIAIPTNFTISVTTEILPVSMTKTSVDCTMYICGDSTECSNLLLQYGSFCTQLNRALTGIAVEQDKNTQEVFAQVKQIYKTPPIKDFGGFNFSQILPDPSKPSKRSFIEDLLFNKVTLADAGFIKQYGDCLGDIAARDLICAQKFNGLTVLPPLLTDEMIAQYTSALLAGTITSGWTFGAGAALQIPFAMQMAYRFNGCGVTQNVLYENQKLIANQFNSAIGKIQDSLSSTASALGKLQDVVNQNAQALNTLVKQLSSNFGAISSVLNDILSRLDKVEAEVQIDRLITGRLQSLQTYVTQQLIRAAEIRASANLAATKMSECVLGQSKRVDFCGKGCHLMSFPQSAPHGVVFLHVTYVPAQEKNFTTAPAICHDGKAHFPREGVFVSNGTHWFVTQRNFYEPQIITTDNTFVSGNCDVVIGIVNNTVYDPLQLELDSFKEELDKYFKNHTSPDVDLGDISGINASVVNIQKEIDRLNEVAKNLNESLIDLQELGKYEQYIKGGSGYIPEAPRDGQAYVRKDGEWVLLSTFL

SEQ ID NO: 6248 - protein, 1241 aa, Artificial Sequence
  SARS-CoV-2/India/1-31/2020__EPI_ISL_413523 spike protein (1-1211)(I909C_Y1047C) Foldon construct
MFVFLVLLPLVSSQCVNLTTRTQLPPAYTNSFTRGVYYPDKVFRSSVLHSTQDLFLPFFSNVTWFHAIHVSGTNGTKRFDNPVLPFNDGVYFASTEKSNIIRGWIFGTTLDSKTQSLLIVNNATNVVIKVCEFQFCNDPFLGVYYHKNNKSWMESEFRVYSSANNCTFEYVSQPFLMDLEGKQGNFKNLREFVFKNIDGYFKIYSKHTPINLVRDLPQGFSALEPLVDLPIGINITRFQTLLALHRSYLTPGDSSSGWTAGAAAYYVGYLQPRTFLLKYNENGTITDAVDCALDPLSETKCTLKSFTVEKGIYQTSNFRVQPTESIVRFPNITNLCPFGEVFNATRFASVYAWNRKRISNCVADYSVLYNSASFSTFKCYGVSPTKLNDLCFTNVYADSFVIRGDEVRQIAPGQTGKIADYNYKLPDDFTGCVIAWNSNNLDSKVGGNYNYLYRLFRKSNLKPFERDISTEIYQAGSTPCNGVEGFNCYFPLQSYGFQPTNGVGYQPYRVVVLSFELLHAPATVCGPKKSTNLVKNKCVNFNFNGLTGTGVLTESNKKFLPFQQFGRDIADTTDAVRDPQTLEILDITPCSFGGVSVITPGTNTSNQVAVLYQDVNCTEVPVAIHADQLTPTWRVYSTGSNVFQTRAGCLIGAEHVNNSYECDIPIGAGICASYQTQTNSPRRARSVASQSIIAYTMSLGAENSVAYSNNSIAIPTNFTISVTTEILPVSMTKTSVDCTMYICGDSTECSNLLLQYGSFCTQLNRALTGIAVEQDKNTQEVFAQVKQIYKTPPIKDFGGFNFSQILPDPSKPSKRSFIEDLLFNKVTLADAGFIKQYGDCLGDIAARDLICAQKFNGLTVLPPLLTDEMIAQYTSALLAGTITSGWTFGAGAALQIPFAMQMAYRFNGCGVTQNVLYENQKLIANQFNSVIGKIQDSLSSTASALGKLQDVVNQNAQALNTLVKQLSSNFGAISSVLNDILSRLDKVEAEVQIDRLITGRLQSLQTYVTQQLIRAAEIRASANLAATKMSECVLGQSKRVDFCGKGCHLMSFPQSAPHGVVFLHVTYVPAQEKNFTTAPAICHDGKAHFPREGVFVSNGTHWFVTQRNFYEPQIITTDNTFVSGNCDVVIGIVNNTVYDPLQPELDSFKEELDKYFKNHTSPDVDLGDISGINASVVNIQKEIDRLNEVAKNLNESLIDLQELGKYEQYIKGGSGYIPEAPRDGQAYVRKDGEWVLLSTFL

SEQ ID NO: 6249 - protein, 1241 aa, Artificial Sequence
  SARS-CoV-2/Guangdong/GD2020087-P0008/2020__EPI_ISL_413863 spike protein (1-1211)(I909C_Y1047C) Foldon construct
MFVFLVLLPLVSSQCVNLTTRTQLPPAYTNSFTRGVYYPDKVFRSSVLHSTQDLFLPFFSNVTWFHAIHVSGTNGTKRFDNPVLPFNDGVYFASTEKSNIIRGWIFGTTLDSKTQSLLIVNNATNVVIKVCEFQFCNDPFLGVYYHKNNKSWMESEFRVYSSANNCTFEYVSQPFLMDLEGKQGNFKNLREFVFKNIDGYFKIYSKHTPINLVRDLPQGFSALEPLVDLPIGINITRFQTLLALHRSYLTPGDSSSGWTAGAAAYYVGYLQPRTFLLKYNENGTITDAVDCALDPLSETKCTLKSFTVEKGIYQTSNFRVQPTESIVRFPNITNLCPFGEVFNATRFASVYAWNRKRISNCVADYSVLYNSASFSTFKCYGVSPTKLNDLCFTNVYADSFVIRGDEVREIAPGQTGKIADYNYKLPDDFTGCVIAWNSNNLDSKVGGNYNYLYRLFRKSNLKPFERDISTEIYQAGSTPCNGVEGFNCYFPLQSYGFQPTNGVGYQPYRVVVLSFELLHAPATVCGPKKSTNLVKNKCVNFNFNGLTGTGVLTESNKKFLPFQQFGRDIADTTDAVRDPQTLEILDITPCSFGGVSVITPGTNTSNQVAVLYQDVNCTEVPVAIHADQLTPTWRVYSTGSNVFQTRAGCLIGAEHVNNSYECDIPIGAGICASYQTQTNSPRRARSVASQSIIAYTMSLGAENSVAYSNNSIAIPTNFTISVTTEILPVSMTKTSVDCTMYICGDSTECSNLLLQYGSFCTQLNRALTGIAVEQDKNTQEVFAQVKQIYKTPPIKDFGGFNFSQILPDPSKPSKRSFIEDLLFNKVTLADAGFIKQYGDCLGDIAARDLICAQKFNGLTVLPPLLTDEMIAQYTSALLAGTITSGWTFGAGAALQIPFAMQMAYRFNGCGVTQNVLYENQKLIANQFNSAIGKIQDSLSSTASALGKLQDVVNQNAQALNTLVKQLSSNFGAISSVLNDILSRLDKVEAEVQIDRLITGRLQSLQTYVTQQLIRAAEIRASANLAATKMSECVLGQSKRVDFCGKGCHLMSFPQSAPHGVVFLHVTYVPAQEKNFTTAPAICHDGKAHFPREGVFVSNGTHWFVTQRNFYEPQIITTDNTFVSGNCDVVIGIVNNTVYDPLQPELDSFKEELDKYFKNHTSPDVDLGDISGINASVVNIQKEIDRLNEVAKNLNESLIDLQELGKYEQYIKGGSGYIPEAPRDGQAYVRKDGEWVLLSTFL

SEQ ID NO: 6250 - protein, 1241 aa, Artificial Sequence
  SARS-CoV-2/Sweden/01/2020__EPI_ISL_411951 spike protein (1-1211)(I909C_Y1047C) Foldon construct
MFVFLVLLPLVSSQCVNLTTRTQLPPAYTNSFTRGVYYPDKVFRSSVLHSTQDLFLPFFSNVTWFHAIHVSGTNGTKRFDNPVLPFNDGVYFASTEKSNIIRGWIFGTTLDSKTQSLLIVNNATNVVIKVCEFQFCNDPFLGVYYHKNNKSWMESEFRVYSSANNCTFEYVSQPFLMDLEGKQGNFKNLREFVFKNIDGYFKIYSKHTPINLVRDLPQGFSALEPLVDLPIGINITRFQTLLALHRSYLTPGDSSSGWTAGAAAYYVGYLQPRTFLLKYNENGTITDAVDCALDPLSETKCTLKSFTVEKGIYQTSNFRVQPTESIVRFPNITNLCPFGEVFNATRFASVYAWNRKRISNCVADYSVLYNSASFSTFKCYGVSPTKLNDLCFTNVYADSFVIRGDEVRQIAPGQTGKIADYNYKLPDDFTGCVIAWNSNNLDSKVGGNYNYLYRLFRKSNLKPFERDISTEIYQAGSTPCNGVEGFNCYFPLQSYGFQPTNGVGYQPYRVVVLSFELLHAPATVCGPKKSTNLVKNKCVNFNFNGLTGTGVLTESNKKFLPFQQFGRDIADTTDAVRDPQTLEILDITPCSFGGVSVITPGTNTSNQVAVLYQDVNCTEVPVAIHADQLTPTWRVYSTGSNVFQTRAGCLIGAEHVNNSYECDIPIGAGICASYQTQTNSPRRARSVASQSIIAYTMSLGAENSVAYSNNSIAIPTNFTISVTTEILPVSMTKTSVDCTMYICGDSTECSNLLLQYGSFCTQLNRALTGIAVEQDKNTQEVFAQVKQIYKTPPIKDCGGFNFSQILPDPSKPSKRSFIEDLLFNKVTLADAGFIKQYGDCLGDIAARDLICAQKFNGLTVLPPLLTDEMIAQYTSALLAGTITSGWTFGAGAALQIPFAMQMAYRFNGCGVTQNVLYENQKLIANQFNSAIGKIQDSLSSTASALGKLQDVVNQNAQALNTLVKQLSSNFGAISSVLNDILSRLDKVEAEVQIDRLITGRLQSLQTYVTQQLIRAAEIRASANLAATKMSECVLGQSKRVDFCGKGCHLMSFPQSAPHGVVFLHVTYVPAQEKNFTTAPAICHDGKAHFPREGVFVSNGTHWFVTQRNFYEPQIITTDNTFVSGNCDVVIGIVNNTVYDPLQPELDSFKEELDKYFKNHTSPDVDLGDISGINASVVNIQKEIDRLNEVAKNLNESLIDLQELGKYEQYIKGGSGYIPEAPRDGQAYVRKDGEWVLLSTFL

SEQ ID NO: 6251 - protein, 1241 aa, Artificial Sequence
  SARS-CoV-2/Tianmen/HBCDC-HB-07/2020__EPI_ISL_412983 spike protein (1-1211)(I909C_Y1047C) Foldon construct
MFVFLVLLPLVSSQCVNLTTRTQLPPAYTNSFTRGVYYPDKVFRSSVLHSTQDLFLPFFSNVTWFHAIHVSGTNGTKRFDNPVLPFNDGVYFASTEKSNIIRGWIFGTTLDSKTQSLLIVNNATNVVIKVCEFQFCNDPFLGVYYHKNNKSWMESEFRVYSSANNCTFEYVSQPFLMDLEGKQGNFKNLREFVFKNIDGYFKIYSKHTPINLVRDLPQGFSALEPLVDLPIGINITRFQTLLALHRSYLTPGDSSSGWTAGAAAYYVGYLQPRTFLLKYNENGTITDAVDCALDPLSETKCTLKSFTVEKGIYQTSNFRVQPTESIVRFPNITNLCPFGEVFNATRFASVYAWNRKRISNCVADYSVLYNSASFSTFKCYGVSPTKLNDLCFTNVYADSFVIRGDEVRQIAPGQTGKIADYNYKLPDDFTGCVIAWNSNNLDSKVGGNYNYLYRLFRKSNLKPFERDISTEIYQAGSTPCNGVEGFNCYFPLQSYGFQPTNGVGYQPYRVVVLSFELLHAPATVCGPKKSTNLVKNKCVNFNFNGLTGTGVLTESNKKFLPFQQFGRDIADTTDAVRDPQTLEILDITPCSFGGVSVITPGTNTSNQVAVLYQDLNCTEVPVAIHADQLTPTWRVYSTGSNVFQTRAGCLIGAEHVNNSYECDIPIGAGICASYQTQTNSPRRARSVASQSIIAYTMSLGAENSVAYSNNSIAIPTNFTISVTTEILPVSMTKTSVDCTMYICGDSTECSNLLLQYGSFCTQLNRALTGIAVEQDKNTQEVFAQVKQIYKTPPIKDFGGFNFSQILPDPSKPSKRSFIEDLLFNKVTLADAGFIKQYGDCLGDIAARDLICAQKFNGLTVLPPLLTDEMIAQYTSALLAGTITSGWTFGAGAALQIPFAMQMAYRFNGCGVTQNVLYENQKLIANQFNSAIGKIQDSLSSTASALGKLQDVVNQNAQALNTLVKQLSSNFGAISSVLNDILSRLDKVEAEVQIDRLITGRLQSLQTYVTQQLIRAAEIRASANLAATKMSECVLGQSKRVDFCGKGCHLMSFPQSAPHGVVFLHVTYVPAQEKNFTTAPAICHDGKAHFPREGVFVSNGTHWFVTQRNFYEPQIITTDNTFVSGNCDVVIGIVNNTVYDPLQPELDSFKEELDKYFKNHTSPDVDLGDISGINASVVNIQKEIDRLNEVAKNLNESLIDLQELGKYEQYIKGGSGYIPEAPRDGQAYVRKDGEWVLLSTFL

SEQ ID NO: 6252 - protein, 1241 aa, Artificial Sequence
  SARS-CoV-2/Hong Kong/case42_VM20002493/2020__EPI_ISL_414527 spike protein (1-1211)(I909C_Y1047C) Foldon construct
MFVFLVLLPLVSSQCVNLTTRTQLPPAYTNSFTRGVYYPDKVFRSSVLHSTQDLFLPFFSNVTWFHAIHVSGTNGTKRFDNPVLPFNDGVYFASTEKSNIIRGWIFGTTLDSKTQSLLIVNNATNVVIKVCEFQFCNDPFLGVYYHKNNKSWMESEFRVYSSANNCTFEYVSQPFLMDLEGKQGNFKNLREFVFKNIDGYFKIYSKHTPINLVRDLPQGFSALEPLVDLPIGINITRFQTLLALHRSYLTPGDSSSGWTAGAAAYYVGYLQPRTFLLKYNENGTITDAVDCALDPLSETKCTLKSFTVEKGIYQTSNFRVQPTESIVRFPNITNLCPFGEVFNATRFASVYAWNRKRISNCVADYSVLYNSASFSTFKCYGVSPTKLNDLCFTNVYADSFVIRGDEVRQIAPGQTGKIADYNYKLPDDFTGCVIAWNSNNLDSKVGGNYNYLYRLFRKSNLKPFERDISTEIYQAGSTPCNGVEGFNCYFPLQSYGFQPTNGVGYQPYRVVVLSFELLHAPATVCGPKKSTNLVKNKCVNFNFNGLTGTGVLTESNKKFLPFQQFGRDIADTTDAVRDPQTLEILDITPCSFGGVSVITPGTNTSNQVAVLYQDVNCTEVPVAIHADQLTPTWRVYSTGSNVFQTRAGCLIGAEHVNNSYECDIPIGAGICASYQTQTNSPRRARSVASQSIIAYTMSLGAENSVAYSNNSIAIPTNFAISVTTEILPVSMTKTSVDCTMYICGDSTECSNLLLQYGSFCTQLNRALTGIAVEQDKNTQEVFAQVKQIYKTPPIKDFGGFNFSQILPDPSKPSKRSFIEDLLFNKVTLADAGFIKQYGDCLGDIAARDLICAQKFNGLTVLPPLLTDEMIAQYTSALLAGTITSGWTFGAGAALQIPFAMQMAYRFNGCGVTQNVLYENQKLIANQFNSAIGKIQDSLSSTASALGKLQDVVNQNAQALNTLVKQLSSNFGAISSVLNDILSRLDKVEAEVQIDRLITGRLQSLQTYVTQQLIRAAEIRASANLAATKMSECVLGQSKRVDFCGKGCHLMSFPQSAPHGVVFLHVTYVPAQEKNFTTAPAICHDGKAHFPREGVFVSNGTHWFVTQRNFYEPQIITTDNTFVSGNCDVVIGIVNNTVYDPLQPELDSFKEELDKYFKNHTSPDVDLGDISGINASVVNIQKEIDRLNEVAKNLNESLIDLQELGKYEQYIKGGSGYIPEAPRDGQAYVRKDGEWVLLSTFL

SEQ ID NO: 6253 - protein, 1241 aa, Artificial Sequence
  SARS-CoV-2/USA/CruiseA-23/2020__EPI_ISL_414482 spike protein (1-1211)(I909C_Y1047C) Foldon construct
MFVFLVLLPLVSSQCVNLTTRTQLPPAYTNSFTRGVYYPDKVFRSSVLHSTQDLFLPFFSNVTWFHAIHVSGTNGTKRFDNPVLPFNDGVYFASTEKSNIIRGWIFGTTLDSKTQSLLIVNNATNVVIKVCEFQFCNDPFLGVYYHKNNKSWMESEFRVYSSANNCTFEYVSQPFLMDLEVKQGNFKNLREFVFKNIDGYFKIYSKHTPINLVRDLPQGFSALEPLVDLPIGINITRFQTLLALHRSYLTPGDSSSGWTAGAAAYYVGYLQPRTFLLKYNENGTITDAVDCALDPLSETKCTLKSFTVEKGIYQTSNFRVQPTESIVRFPNITNLCPFGEVFNATRFASVYAWNRKRISNCVADYSVLYNSASFSTFKCYGVSPTKLNDLCFTNVYADSFVIRGDEVRQIAPGQTGKIADYNYKLPDDFTGCVIAWNSNNLDSKVGGNYNYLYRLFRKSNLKPFERDISTEIYQAGSTPCNGVEGFNCYFPLQSYGFQPTNGVGYQPYRVVVLSFELLHAPATVCGPKKSTNLVKNKCVNFNFNGLTGTGVLTESNKKFLPFQQFGRDIADTTDAVRDPQTLEILDITPCSFGGVSVITPGTNTSNQVAVLYQDVNCTEVPVAIHADQLTPTWRVYSTGSNVFQTRAGCLIGAEHVNNSYECDIPIGAGICASYQTQTNSPRRARSVASQSIIAYTMSLGAENSVAYSNNSIAIPTNFTISVTTEILPVSMTKTSVDCTMYICGDSTECSNLLLQYGSFCTQLNRALTGIAVEQDKNTQEVFAQVKQIYKTPPIKDFGGFNFSQILPDPSKPSKRSFIEDLLFNKVTLADAGFIKQYGDCLGDIAARDLICAQKFNGLTVLPPLLTDEMIAQYTSALLAGTITSGWTFGAGAALQIPFAMQMAYRFNGCGVTQNVLYENQKLIANQFNSAIGKIQDSLSSTASALGKLQDVVNQNAQALNTLVKQLSSNFGAISSVLNDILSRLDKVEAEVQIDRLITGRLQSLQTYVTQQLIRAAEIRASANLAATKMSECVLGQSKRVDFCGKGCHLMSFPQSAPHGVVFLHVTYVPAQEKNFTTAPAICHDGKAHFPREGVFVSNGTHWFVTQRNFYEPQIITTDNTFVSGNCDVVIGIVNNTVYDPLQPELDSFKEELDKYFKNHTSPDVDLGDISGINASVVNIQKEIDRLNEVAKNLNESLIDLQELGKYEQYIKGGSGYIPEAPRDGQAYVRKDGEWVLLSTFL

SEQ ID NO: 6254 - protein, 1241 aa, Artificial Sequence
  SARS-CoV-2/Hong Kong/case85_VM20002868/2020__EPI_ISL_414519 spike protein (1-1211)(I909C_Y1047C) Foldon construct
MFVFLVLVPLVSSQCVNLTTRTQLPPAYTNSFTRGVYYPDKVFRSSVLHSTQDLFLPFFSNVTWFHAIHVSGTNGTKRFDNPVLPFNDGVYFASTEKSNIIRGWIFGTTLDSKTQSLLIVNNATNVVIKVCEFQFCNDPFLGVYYHKNNKSWMESEFRVYSSANNCTFEYVSQPFLMDLEGKQGNFKNLREFVFKNIDGYFKIYSKHTPINLVRDLPQGFSALEPLVDLPIGINITRFQTLLALHRSYLTPGDSSSGWTAGAAAYYVGYLQPRTFLLKYNENGTITDAVDCALDPLSETKCTLKSFTVEKGIYQTSNFRVQPTESIVRFPNITNLCPFGEVFNATRFASVYAWNRKRISNCVADYSVLYNSASFSTFKCYGVSPTKLNDLCFTNVYADSFVIRGDEVRQIAPGQTGKIADYNYKLPDDFTGCVIAWNSNNLDSKVGGNYNYLYRLFRKSNLKPFERDISTEIYQAGSTPCNGVEGFNCYFPLQSYGFQPTNGVGYQPYRVVVLSFELLHAPATVCGPKKSTNLVKNKCVNFNFNGLTGTGVLTESNKKFLPFQQFGRDIADTTDAVRDPQTLEILDITPCSFGGVSVITPGTNTSNQVAVLYQDVNCTEVPVAIHADQLTPTWRVYSTGSNVFQTRAGCLIGAEHVNNSYECDIPIGAGICASYQTQTNSPRRARSVASQSIIAYTMSLGAENSVAYSNNSIAIPTNFTISVTTEILPVSMTKTSVDCTMYICGDSTECSNLLLQYGSFCTQLNRALTGIAVEQDKNTQEVFAQVKQIYKTPPIKDFGGFNFSQILPDPSKPSKRSFIEDLLFNKVTLADAGFIKQYGDCLGDIAARDLICAQKFNGLTVLPPLLTDEMIAQYTSALLAGTITSGWTFGAGAALQIPFAMQMAYRFNGCGVTQNVLYENQKLIANQFNSAIGKIQDSLSSTASALGKLQDVVNQNAQALNTLVKQLSSNFGAISSVLNDILSRLDKVEAEVQIDRLITGRLQSLQTYVTQQLIRAAEIRASANLAATKMSECVLGQSKRVDFCGKGCHLMSFPQSAPHGVVFLHVTYVPAQEKNFTTAPAICHDGKAHFPREGVFVSNGTHWFVTQRNFYEPQIITTDNTFVSGNCDVVIGIVNNTVYDPLQPELDSFKEELDKYFKNHTSPDVDLGDISGINASVVNIQKEIDRLNEVAKNLNESLIDLQELGKYEQYIKGGSGYIPEAPRDGQAYVRKDGEWVLLSTFL

SEQ ID NO: 6255 - protein, 1241 aa, Artificial Sequence; identical to SEQ ID NO: 6245
  SARS-CoV-2/England/200990660/2020__EPI_ISL_414523 spike protein (1-1211)(I909C_Y1047C) Foldon construct

SEQ ID NO: 6256 - protein, 1241 aa, Artificial Sequence
  SARS-CoV-2/Australia/NSW09/2020__EPI_ISL_413595 spike protein (1-1211)(I909C_Y1047C) Foldon construct
MFVFLVLLPLVSSQCVNLTTRTQLPPAYTNSFTRGVYYPDKVFRSSVLHSTQDLFLPFFSNVTWFHAIHVSGTNGTKRFDNPVLPFNDGVYFASTEKSNIIRGWIFGTTLDSKTQSLLIVNNATNVVIKVCEFQFCNDPFLGVYYHKNNKSWMESEFRVYSSANNCTFEYVSQPFLMDLEGKQGNFKNLREFVFKNIDGYFKIYSKHTPINLVRDLPQGFSALEPLVDLPIGINITRFQTLLALHRSYLTPGDSSSGWTAGAAAYYVGYLQPRTFLLKYNENGTITDAVDCALDPLSETKCTLKSFTVEKGIYQTSNFRVQPTESIVRFPNITNLCPFGEVFNATRFASVYAWNRKRISNCVADYSVLYNSASFSTFKCYGVSPTKLNDLCFTNVYADSFVIRGDEVRQIAPGQTGKIADYNYKLPDDFTGCVIAWNSNNLDSKVGGNYNYLYRLFRKSNLKPFERDISTEIYQAGSTPCNGVEGFNCYFPLQSYGFQPTNGVGYQPYRVVVLSFELLHAPATVCGPKKSTNLVKNKCVNFNFNGLTGTGVLTESNKKFLPFQQFGRDIADTTDAVRDPQTLEILDITPCSFGGVSVITPGTNTSNQVAVLYQDVNCTEVPVAIHADQLTPTWRVYSTGSNVFQTRAGCLIGAEHVNNSYECDIPIGAGICASYQTQTNSPRRARSVASQSIIAYTMSLGAENSVAYSNNSIAIPTNFTISVTTEILPVSMTKTSVDCTMYICGDSTECSNLLLQYGSFCTQLNRALTGIAVEQDKNTQEVFAQVKQIYKTPPIKDFGGFNFSQILPDPSKPSKRSFIEDLLFNKVTLADAGFIKQYGDCLGDIAARDLICAQKFNGLTVLPPLLTDEMIAQYTSALLAGTITSGWTFGAGAALQIPFAMQMAYRFNGCGVTQNVLYENQKLIANQFNSAIGKIQDSLSFTASALGKLQDVVNQNAQALNTLVKQLSSNFGAISSVLNDILSRLDKVEAEVQIDRLITGRLQSLQTYVTQQLIRAAEIRASANLAATKMSECVLGQSKRVDFCGKGCHLMSFPQSAPHGVVFLHVTYVPAQEKNFTTAPAICHDGKAHFPREGVFVSNGTHWFVTQRNFYEPQIITTDNTFVSGNCDVVIGIVNNTVYDPLQPELDSFKEELDKYFKNHTSPDVDLGDISGINASVVNIQKEIDRLNEVAKNLNESLIDLQELGKYEQYIKGGSGYIPEAPRDGQAYVRKDGEWVLLSTFL

SEQ ID NO: 6257 - protein, 1241 aa, Artificial Sequence; identical to SEQ ID NO: 6237
  SARS-CoV-2/Australia/NSW10/2020__EPI_ISL_413596 spike protein (1-1211)(I909C_Y1047C) Foldon construct

SEQ ID NO: 6258 - protein, 1241 aa, Artificial Sequence
  SARS-CoV-2/Switzerland/1000477797/2020__EPI_ISL_413023 spike protein (1-1211)(I909C_Y1047C) Foldon construct
MFVFLVLLPLVSSQCVNLTTRTQLPPAYTNSFTRGVYYPDKVFRSSVLHSTQDLFLPFFSNVTWFHAIHVSGTNGTKRFDNPVLPFNDGVYFASTEKSNIIRGWIFGTTLDSKTQSLLIVNNATNVVIKVCEFQFCNDPFLGVYYHKNNKSWMESEFRVYSSANNCTFEYVSQPFLMDLEGKQGNFKNLREFVFKNIDGYFNIYSKHTPINLVRDLPQGFSALEPLVDLPIGINITRFQTLLALHRSYLTPGDSSSGWTAGAAAYYVGYLQPRTFLLKYNENGTITDAVDCALDPLSETKCTLKSFTVEKGIYQTSNFRVQPTESIVRFPNITNLCPFGEVFNATRFASVYAWNRKRISNCVADYSVLYNSASFSTFKCYGVSPTKLNDLCFTNVYADSFVIRGDEVRQIAPGQTGKIADYNYKLPDDFTGCVIAWNSNNLDSKVGGNYNYLYRLFRKSNLKPFERDISTEIYQAGSTPCNGVEGFNCYFPLQSYGFQPTNGVGYQPYRVVVLSFELLHAPATVCGPKKSTNLVKNKCVNFNFNGLTGTGVLTESNKKFLPFQQFGRDIADTTDAVRDPQTLEILDITPCSFGGVSVITPGTNTSNQVAVLYQGVNCTEVPVAIHADQLTPTWRVYSTGSNVFQTRAGCLIGAEHVNNSYECDIPIGAGICASYQTQTNSPRRARSVASQSIIAYTMSLGAENSVAYSNNSIAIPTNFTISVTTEILPVSMTKTSVDCTMYICGDSTECSNLLLQYGSFCTQLNRALTGIAVEQDKNTQEVFAQVKQIYKTPPIKDFGGFNFSQILPDPSKPSKRSFIEDLLFNKVTLADAGFIKQYGDCLGDIAARDLICAQKFNGLTVLPPLLTDEMIAQYTSALLAGTITSGWTFGAGAALQIPFAMQMAYRFNGCGVTQNVLYENQKLIANQFNSAIGKIQDSLSSTASALGKLQDVVNQNAQALNTLVKQLSSNFGAISSVLNDILSRLDKVEAEVQIDRLITGRLQSLQTYVTQQLIRAAEIRASANLAATKMSECVLGQSKRVDFCGKGCHLMSFPQSAPHGVVFLHVTYVPAQEKNFTTAPAICHDGKAHFPREGVFVSNGTHWFVTQRNFYEPQIITTDNTFVSGNCDVVIGIVNNTVYDPLQPELDSFKEELDKYFKNHTSPDVDLGDISGINASVVNIQKEIDRLNEVAKNLNESLIDLQELGKYEQYIKGGSGYIPEAPRDGQAYVRKDGEWVLLSTFL

SEQ ID NO: 6259 - protein, 1241 aa, Artificial Sequence
  SARS-CoV-2/Belgium/BA-02291/2020__EPI_ISL_415159 spike protein (1-1211)(I909C_Y1047C) Foldon construct
MFVFLVLLPLVSSQCVNLTTRTQLPPAYTNSFTRGVYYPDKVFRSSVLHSTQDLFLPFFSNVTWFHAIHVSGTNGTKRFDNPVLPFNDGVYFASTEKSNIIRGWIFGTTLDSKTQSLLIVNNATNVVIKVCEFQFCNDPFLGVYYHKNNKSWMESEFRVYSSANNCTFEYVSQPFLMDLEGKQGNFKNLREFVFKNIDGYFKIYSKHTPINLVRDLPQGFSALEPLVDLPIGINITRFQTLLALHRSYLTPGDSSSGWTAGAAAYYVGYLQPRTFLLKYNENGTITDAVDCALDPLSETKCTLKSFTVEKGIYQTSNFRVQPTESIVRFPNITNLCPFGEVFNATRFASVYAWNRKRISNCVADYSVLYNSASFSTFKCYGVSPTKLNDLCFTNVYADSFVIRGDEVRQIAPGQTGKIADYNYKLPDDFTGCVIAWNSNNLDSKVGGNYNYLYRLFRRSNLKPFERDISTEIYQAGSTPCNGVEGFNCYFPLQSYGFQPTNGVGYQPYRVVVLSFELLPAPATVCGPKKSTNLVKNKCVNFNFNGLTGTGVLTESNKKFLPFQQFGRDIADTTDAVRDPQTLEILDITPCSFGGVSVITPGTNTSNQVAVLYQGVNCTEVPVAIHADQLTPTWRVYSTGSNVFQTRAGCLIGAEHVNNSYECDIPIGAGICASYQTQTNSPRRARSVASQSIIAYTMSLGAENSVAYSNNSIAIPTNFTISVTTEILPVSMTKTSVDCTMYICGDSTECSNLLLQYGSFCTQLNRALTGIAVEQDKNTQEVFAQVKQIYKTPPIKDFGGFNFSQILPDPSKPSKRSFIEDLLFNKVTLADAGFIKQYGDCLGDIAARDLICAQKFNGLTVLPPLLTDEMIAQYTSALLAGTITSGWTFGAGAALQIPFAMQMAYRFNGCGVTQNVLYENQKLIANQFNSAIGKIQDSLSSAAPALGKLQDVVNQNAQALNTLVKQLSSNFGAISSVLNDILSRLDKVEAEVQIDRLITGRLQSLQTYVTQQLIRAAEIRASANLAATKMSECVLGQSKRVDFCGKGCHLMSFPQSAPHGVVFLHVTYVPAQEKNFTTAPAICHDGKAHFPREGVFVSNGTHWFVTQRNFYEPQIITTDNTFVSGNCDVVIGIVNNTVYDPLQPELDSFKEELDKYFKNHTSPDVDLGDISGINASVVNIQKEIDRLNEVAKNLNESLIDLQELGKYEQYIKGGSGYIPEAPRDGQAYVRKDGEWVLLSTFL

SEQ ID NO: 6260 - protein, 1241 aa, Artificial Sequence
  SARS-CoV-2/USA/WA8-UW5/2020__EPI_ISL_413486 spike protein (1-1211)(I909C_Y1047C) Foldon construct
MFVFLVLLPLVSSQCVNLTTRTQLPPAYTNSFTRGVYYPDKVFRSSVLHSTQDLFLPFFSNVTWFHAIHVSGTNGTKRFDNPVLPFNDGVYFASTEKSNIIRGWIFGTTLDSKTQSLLIVNNATNVVIKVCEFQFCNDPFLGVYYHKNNKSWMESEFRVYSSANNCTFEYVSQPFLMDLEGKQGNFKNLREFVFKNIDGYFKIYSKHTPINLVRDLPQGFSALEPLVDLPIGINITRFQTLLALHRSYLTPGDSSSGWTAGAAAYYVGYLQPRTFLLKYNENGTITDAVDCALDPLSETKCTLKSFTVEKGIYQTSNFRVQPTESIVRFPNITNLCPFGEVFNATRFASVYAWNRKRISNCVADYSVLYNSASFSTFKCYGVSPTKLNDLCFTNVYADSFVIRGDEVRQIAPGQTGKIADYNYKLPDDFTGCVIAWNSNNLDSKVGGNYNYLYRLFRKSNLKPFERDISTEIYQAGSTPCNGVEGFNCYFPLQSYGFQPTNGVGYQPYRVVVLSFELLHAPATVCGPKKSTNLVKNKCVNFNFNGLTGTGVLTESNKKFLPFQQFGRDIADTTDAVRDPQTLEILDITPCSFGGVSVITPGTNTSNQVAVLYQDVNCTEVPVAIHADQLTPTWRVYSTGSNVFQTRAGCLIGAEYVNNSYECDIPIGAGICASYQTQTNSPRRARSVASQSIIAYTMSLGAENSVAYSNNSIAIPTNFTISVTTEILPVSMTKTSVDCTMYICGDSTECSNLLLQYGSFCTQLNRALTGIAVEQDKNTQEVFAQVKQIYKTPPIKDFGGFNFSQILPDPSKPSKRSFIEDLLFNKVTLADAGFIKQYGDCLGDIAARDLICAQKFNGLTVLPPLLTDEMIAQYTSALLAGTITSGWTFGAGAALQIPFAMQMAYRFNGCGVTQNVLYENQKLIANQFNSAIGKIQDSLSSTASALGKLQDVVNQNAQALNTLVKQLSSNFGAISSVLNDILSRLDKVEAEVQIDRLITGRLQSLQTYVTQQLIRAAEIRASANLAATKMSECVLGQSKRVDFCGKGCHLMSFPQSAPHGVVFLHVTYVPAQEKNFTTAPAICHDGKAHFPREGVFVSNGTHWFVTQRNFYEPQIITTDNTFVSGNCDVVIGIVNNTVYDPLQPELDSFKEELDKYFKNHTSPDVDLGDISGINASVVNIQKEIDRLNEVAKNLNESLIDLQELGKYEQYIKGGSGYIPEAPRDGQAYVRKDGEWVLLSTFL

SEQ ID NO: 6261 - protein, 1241 aa, Artificial Sequence
  SARS-CoV-2/England/20102000506/2020__EPI_ISL_415147 spike protein (1-1211)(I909C_Y1047C) Foldon construct
MFVFLVLLPLVSSQCVNLTTRTQLPPAYTNSFTRGVYYPDKVFRSSVLHSTQDLFLPFFSNVTWFHAIHVSGTNGTKRFDNPVLPFNDGVYFASTEKSNIIRGWIFGTTLDSKTQSLLIVNNATNVVIKVCEFQFCNDPFLGVYYHKNNKSWMESEFRVYSSANNCTFEYVSQPFLMDLEGKQGNFKNLREFVFKNIDGYFKIYSKHTPINLVRDLPQGFSALEPLVDLPIGINITRFQTLLALHRSYLTPGDSSSGWTAGAAAYYVGYLQPRTFLLKYNENGTITDAVDCALDPLSETKCTLKSFTVEKGIYQTSNFRVQPTESIVRFPNITNLCPFGEVFNATRFASVYAWNRKRISNCVADYSVLYNSASFSTFKCYGVSPTKLNDLCFTNVYADSFVIRGDEVRQIAPGQTGKIADYNYKLPDDFTGCVIAWNSNNLDSKVGGNYNYLYRLFRKSNLKPFERDISTEIYQAGSTPCNGVEGFNCYFPLQSYGFQPTNGVGYQPYRVVVLSFELLHAPATVCGPKKSTNLVKNKCVNFNFNGLTGTGVLTESNKKFLPFQQFGRDIADTTDAVRDPQTLEILDITPCSFGGVSVITPGTNTSNQVAVLYQGVNCTEVPVAIHADQLTPTWRVYSTGSNVFQTRAGCLIGAEHVNNSYECDIPIGAGICASYQTQTNSPRRARSVASQSIIAYTMSLGAENSVAYSNNSIAIPTNFTISVTTEILPVSMTKTSVDCTMYICGDSTECSNLLLQYGSFCTQLNRALTGIAVEQDKNTQEVFAQVKQIYKTPPIKDFGGFNFSQILPDPSKPSKRSFIEDLLFNKVTLADAGFIKQYGYCLGDIAARDLICAQKFNGLTVLPPLLTDEMIAQYTSALLAGTITSGWTFGAGAALQIPFAMQMAYRFNGCGVTQNVLYENQKLIANQFNSAIGKIQDSLSSTASALGKLQDVVNQNAQALNTLVKQLSSNFGAISSVLNDILSRLDKVEAEVQIDRLITGRLQSLQTYVTQQLIRAAEIRASANLAATKMSECVLGQSKRVDFCGKGCHLMSFPQSAPHGVVFLHVTYVPAQEKNFTTAPAICHDGKAHFPREGVFVSNGTHWFVTQRNFYEPQIITTDNTFVSGNCDVVIGIVNNTVYDPLQPELDSFKEELDKYFKNHTSPDVDLGDISGINASVVNIQKEIDRLNEVAKNLNESLIDLQELGKYEQYIKGGSGYIPEAPRDGQAYVRKDGEWVLLSTFL

SEQ ID NO: 6262 - protein, 1241 aa, Artificial Sequence
  SARS-CoV-2/Belgium/VAG-03013/2020__EPI_ISL_415155 spike protein (1-1211)(I909C_Y1047C) Foldon construct
MFVFLVLLPLVSSQCVNLTTRTQLPPAYTNSFTRGVYYPDKVFRSSVLHSTQDLFLPFFSNVTWFHAIHVSGTNGTKRFDNPVLPFNDGVYFASTEKSNIIRGWIFGTTLDSKTQSLLIVNNATNVVIKVCEFQFCNDPFLGVYYHKNNKSWMESEFRVYSSANNCTFEYVSQPFLMDLEGKQGNFKNLREFVFKNIDGYFKIYSKHTPINLVRDLPQGFSALEPLVDLPIGINITRFQTLLALHRSYLTPGDSSSGWTAGAAAYYVGYLQPRTFLLKYNENGTITDAVDCALDPLSETKCTLKSFTVEKGIYQTSNFRVQPTESIVRFPNITNLCPFGEVFNATRFASVYAWNRKRISNCVADYSVLYNSASFSTFKCYGVSPTKLNDLCFTNVYADSFVIRGDEVRQIAPGQTGKIADYNYKLPDDFTGCVIAWNSNNLDSKVGGNYNYLYRLFRKSNLKPFERDISTEIYQAGSTPCNGVEGFNCYFPLQSYGFQPTNGVGYQPYRVVVLSFELLHAPATVCGPKKSTNLVKNKCVNFNFNGLTGTGVLTESNKKFLPFQQFGRDIADTTDAVRDPQTLEILDITPCSFGGVSVITPGTNTSNQVAVLYQGVNCTEVPVAIHADQLTPTWRVYSTGSNVFQTRAGCLIGAEHVNNSYECDIPIGAGICASYQTQTNSPRRARSVASQSIIAYTMSLGAENSVAYSNNSIAIPTNFTISVTTEILPVSMTKTSVDCTMYICGDSTECSNLLLQYGSFCTQLNRALTGIAVEQDKNTQEVFAQVKQIYKTPPIKDFGGFNFSQILPDPSKPSKRSFIEDLLFNKVTLADAGFIKQYGDCLGDIAARDLICAQKFNGLTVLPPLLTDEMIAQYTSALLAGTITSGWTFGAGAALQIPFAMQMAYRFNGCGVTQNVLYENQKLIANQFNSAIGKIQDSLSSTATALGKLQDVVNQNAQALNTLVKQLSSNFGAISSVLNDILSRLDKVEAEVQIDRLITGRLQSLQTYVTQQLIRAAEIRASANLAATKMSECVLGQSKRVDFCGKGCHLMSFPQSAPHGVVFLHVTYVPAQEKNFTTAPAICHDGKAHFPREGVFVSNGTHWFVTQRNFYEPQIITTDNTFVSGNCDVVIGIVNNTVYDPLQPELDSFKEELDKYFKNHTSPDVDLGDISGINASVVNIQKEIDRLNEVAKNLNESLIDLQELGKYEQYIKGGSGYIPEAPRDGQAYVRKDGEWVLLSTFL

SEQ ID NO: 6263 - protein, 1241 aa, Artificial Sequence
  SARS-CoV-2/Belgium/BC-03016/2020__EPI_ISL_415157 spike protein (1-1211)(I909C_Y1047C) Foldon construct
MFVFLVLLPLVSSQCVNLTTRTQLPPAYTNSFTRGVYYPDKVFRSSVLHSTQDLFLPFFSNVTWFHAIHVSGTNGTKRFDNPVLPFNDGVYFASTEKSNIIRGWIFGTTLDSKTQSLLIVNNATNVVIKVCEFQFCNDPFLGVYYHKNNKSWMESEFRVYSSANNCTFEYVSQPFLMDLEGKQGNFKNLREFVFKNIDGYFKIYSKHTPINLVRDLPQGFSALEPLVDLPIGINITRFQTLLALHRSYLTPGDSSSGWTAGAAAYYVGYLQPRTFLLKYNENGTITDAVDCALDPLSETKCTLKSFTVEKGIYQTSNFRVQPTESIVRFPNITNLCPFGEVFNATRFASVYAWNRKRISNCVADYSVLYNSASFSTFKCYGVSPTKLNDLCFTNVYADSFVIRGDEVRQIAPGQTGKIADYNYKLPDDFTGCVIAWNSNNLDSKVGGNYNYLYRLFRKSNLKPFERDISTEIYQAGSTPCNGVEGFNCYFPLQSYGFQPTNGVGYQPYRVVVLSFELLHAPATVCGPKKSTNLVKNKCVNFNFNGLTGTGVLTESNKKFLPFQQFGRDIADTTDAVRDPQTLEILDITPCSFGGVSVITPGTNTSNQVAVLYQGVNCTEVPVAIHADQLTPTWRVYSTGSNVFQTRAGCLIGAEHVNNSYECDIPIGAGICASYQTQTNSPRRARSVASQSIIAYTMSLGAENSVAYSNNSIAIPTNFTISVTTEILPVSMTKTSVDCTMYICGDSTECSNLLLQYGSFCTQLNRALTGIAVEQDKNTQEVFAQVKQIYKTPPIKDFGGFNFSQILPDPSKPSKRSFIEDLLFNKVTLADAGFIKQYGDCLGDIAARDLICAQKFNGLTVLPPLLTDEMIAQYTSALLAGTITSGWTFGAGAALQIPFAMQMAYRFNGCGVTQNVLYENQKLIANQFNSAIGKIQDSLSSTAPALGKLQDVVNQNAQALNTLVKQLSSNFGAISSVLNDILSRLDKVEAEVQIDRLITGRLQSLQTYVTQQLIRAAEIRASANLAATKMSECVLGQSKRVDFCGKGCHLMSFPQSAPHGVVFLHVTYVPAQEKNFTTAPAICHDGKAHFPREGVFVSNGTHWFVTQRNFYEPQIITTDNTFVSGNCDVVIGIVNNTVYDPLQPELDSFKEELDKYFKNHTSPDVDLGDISGINASVVNIQKEIDRLNEVAKNLNESLIDLQELGKYEQYIKGGSGYIPEAPRDGQAYVRKDGEWVLLSTFL

SEQ ID NO: 6264 - protein, 1241 aa, Artificial Sequence
  SARS-CoV-2/Germany/BavPat3/2020__EPI_ISL_414521 spike protein (1-1211)(I909C_Y1047C) Foldon construct
MFVFLVLLPLVSSQCVNLTTRTQLPPAYTNSFTRGVYYPDKVFRSSVLHSTQDLFLPFFSNVTWFHAIHVSGTNGTKRFDNPVLPFNDGVYFASTEKSNIIRGWIFGTTLDSKTQSLLIVNNATNVVIKVCEFQFCNDPFLGVYYHKNNKSWMESEFRVYSSANNCTFEYVSQPFLMDLEGKQGNFKNLREFVFKNIDGYFKIYSKHTPINLVRDLPQGFSALEPLVDLPIGINITRFQTLLALHRSYLTPGDSSSGWTAGAAAYYVGYLQPRTFLLKYNENGTITDAVDCALDPLSETKCTLKSFTVEKGIYQTSNFRVQPTESIVRFPNITNLCPFGEVFNATRFASVYAWNRKRISNCVADYSVLYNSASFSTFKCYGVSPTKLNDLCFTNVYADSFVIRGDEVRQIAPGQTGKIADYNYKLPDDFTGCVIAWNSNNLDSKVGGNYNYLYRLFRKSNLKPFERDISTEIYQAGSTPCNGVEGFNCYFPLQSYGFQPTNGVGYQPYRVVVLSFELLHAPATVCGPKKSTNLVKNKCVNFNFNGLTGTGVLTESNKKFLPFQQFGRDIADTTDAVRDPQTLEILDITPCSFGGVSVITPGTNTSNQVAVLYQDVNCTEVPVAIHADQLTPTWRVYSTGSNVFQTRAGCLIGAEHVNNSYECDIPIGAGICASYQTQTNSPRRARSVASQSIIAYTMSLGAENSVAYSNNSIAIPTNFTISVTTEILPVSMTKTSVDCTMYICGDSTECSNLLLQYGSFCTQLNRALTGIAVEQDKNTQQVFAQVKQIYKTPPIKDFGGFNFSQILPDPSKPSKRSFIEDLLFNKVTLADAGFIKQYGDCLGDIAARDLICAQKFNGLTVLPPLLTDEMIAQYTSALLAGTITSGWTFGAGAALQIPFAMQMAYRFNGCGVTQNVLYENQKLIANQFNSAIGKIQDSLSSTASALGKLQDVVNQNAQALNTLVKQLSSNFGAISSVLNDILSRLDKVEAEVQIDRLITGRLQSLQTYVTQQLIRAAEIRASANLAATKMSECVLGQSKRVDFCGKGCHLMSFPQSAPHGVVFLHVTYVPAQEKNFTTAPAICHDGKAHFPREGVFVSNGTHWFVTQRNFYEPQIITTDNTFVSGNCDVVIGIVNNTVYDPLQPELDSFKEELDKYFKNHTSPDVDLGDISGINASVVNIQKEIDRLNEVAKNLNESLIDLQELGKYEQYIKGGSGYIPEAPRDGQAYVRKDGEWVLLSTFL

SEQ ID NO: 6265 - protein, 1241 aa, Artificial Sequence
  SARS-CoV-2/France/HF1805/2020__EPI_ISL_414628 spike protein (1-1211)(I909C_Y1047C) Foldon construct
MFVFLVLLPLVSSQCVNLTTRTQLPPAYTNSFTRGVYYPDKVFRSSVLHSTQDLFLPFFSNVTWFHAIHVSGTNGTKRFDNPVLPFNDGVYFASTEKSNIIRGWIFGTTLDSKTQSLLIVNNATNVVIKVCEFQFCNDPFLGVYYHKNNKSWMESEFRVYSSANNCTFEYVSQPFLMDLEGKQGNFKNLREFVFKNIDGYFKIYSKHTPINLVRDLPQGFSALEPLVDLPIGINITRFQTLLALHRSYLTPGDSSSGWTAGAAAYYVGYLQPRTFLLKYNENGTITDAVDCALDPLSETKCTLKSFTVEKGIYQTSNFRVQPTESIVRFPNITNLCPFGEVFNATRFASVYAWNRKRISNCVADYSVLYNSASFSTFKCYGVSPTKLNDLCFTNVYADSFVIRGDEVRQIAPGQTGKIADYNYKLPDDFTGCVIAWNSNNLDSKVGGNYNYLYRLFRKSNLKPFERDISTEIYQAGSTPCNGVEGFNCYFPLQSYGFQPTNGVGYQPYRVVVLSFELLHAPATVCGPKKSTNLVKNKCVNFNFNGLTGTGVLTESNKKFLPFQQFGRDIADTTDAVRDPQTLEILDITPCSFGGVSVITPGTNTSNQVAVLYQGVNCTEVPVAIHADQLTPTWRVYSTGSNVFQTRAGCLIGAEHVNNSYECDIPIGAGICASYQTQTNSPRRARSVASQSIIAYTMSLGAENSVAYSNNSIAIPTNFTISVTTEILPVSMTKTSVDCTMYICGDSTECSNLLLQYGSFCTQLNRALTGIAVEQDKNTQEVFAQVKQIYKTPPIKDFGGFNFSQILPDPSKPSKRSFIEDLLFNKVTLADAGFIKQYGDCLGDIAARDLICAQKFNGLTVLPPLLTDEMIAQYTSALLAGTITSGWTFGAGAALQIPFAMQMAYRFNGCGVTQNVLYENQKLIANQFNSAIGKIQDSLSSTASALGKLQDVVNQNAQALNTLVKQLSSNFGAISSVLNDILSRLDKVEAEVQIDRLITGRLQSLQTYVTQQLIRAAEIRASANLAATKMSECVLGQSKRVDFCGKGCHLMSFPQSAPHGVVFLHVTYVPAQEKNFTTAPAICHDGKAHFPREGVFVSNGTHWFVTQRNFYEPQIITTDNTFVSGNCDVVIGVVNNTVYDPLQPELDSFKEELDKYFKNHTSPDVDLGDISGINASVVNIQKEIDRLNEVAKNLNESLIDLQELGKYEQYIKGGSGYIPEAPRDGQAYVRKDGEWVLLSTFL

SEQ ID NO: 6266 - protein, 1241 aa, Artificial Sequence
  SARS-CoV-2/Netherlands/ZuidHolland_9/2020__EPI_ISL_414445 spike protein (1-1211)(I909C_Y1047C) Foldon construct
MFVFLVLLPLVSSQCVNLTTRTQLPPAYTNSFTRGVYYPDKVFRSSVLHSTQDLFLPFFSNVTWFHAIHVSGTNGTKRFDNPVLPFNDGVYFASTEKSNIIRGWIFGTTLDSKTQSLLIVNNATNVVIKVCEFQFCNDPFLGVYYHKNNKSWMESEFRVYSSANNCTFEYVSQPFLMDLEGKQGNFKNLREFVFKNIDGYFKIYSKHTPINLVRDLPQGFSALEPLVDLPIGINITRFQTLLALHRSYLTPGDSSSGWTAGAAAYYVGYLQPRTFLLKYNENGTITDAVDCALDPLSETKCTLKSFTVEKGIYQTSNFRVQPTESIVRFPNITNLCPFGEVFNATRFASVYAWNRKRISNCVADYSVLYNSASFSTFKCYGVSPTKLNDLCFTNVYADSFVIRGDEVRQIAPGQTGKIADYNYKLPDDFTGCVIAWNSNNLDSKVGGNYNYLYRLFRKSNLKPFERDISTEIYQAGSTPCNGVEGFNCYFPLQSYGFQPTNGVGYQPYRVVVLSFELLHAPATVCGPKKSTNLVKNKCVNFNFNGLTGTGVLTESNKKFLPFQQFGRDIADTTDAVRDPQTLEILDITPCSFGGVSVITPGTNTSNQVAVLYQGVNCTEVPVAIHADQLTPTWRVYSTGSNVFQTRAGCLIGAEHVNNSYECDIPIGAGICASYQTQTNSPRRARSVASQSIIAYTMSLGAENSVAYSNNSIAIPTNFTISVTTEILPVSMTKTSVDCTMYICGDSTECSNLLLQYGSFCTQLNRALTGIAVEQDKNTQEVFAQVKQIYKTPPIKDFGGFNFSQILPDPSKPSKRSFIEDLLFNKVTLADAGFIKQYGDCLGDIAARDLICVQKFNGLTVLPPLLTDEMIAQYTSALLAGTITSGWTFGAGAALQIPFAMQMAYRFNGCGVTQNVLYENQKLIANQFNSAIGKIQDSLSSTASALGKLQDVVNQNAQALNTLVKQLSSNFGAISSVLNDILSRLDKVEAEVQIDRLITGRLQSLQTYVTQQLIRAAEIRASANLAATKMSECVLGQSKRVDFCGKGCHLMSFPQSAPHGVVFLHVTYVPAQEKNFTTAPAICHDGKAHFPREGVFVSNGTHWFVTQRNFYEPQIITTDNTFVSGNCDVVIGIVNNTVYDPLQPELDSFKEELDKYFKNHTSPDVDLGDISGINASVVNIQKEIDRLNEVAKNLNESLIDLQELGKYEQYIKGGSGYIPEAPRDGQAYVRKDGEWVLLSTFL

SEQ ID NO: 6267 - protein, 1241 aa, Artificial Sequence
  SARS-CoV-2/Finland/FIN03032020A/2020__EPI_ISL_413602 spike protein (1-1211)(I909C_Y1047C) Foldon construct
MFVFLVLLPLVSSQCVNLTTRTQLPPAYTNSFTRGVYYPDKVFRSSVLHSTQDLFLPFFSNVTWFHAIHVSGTNGTKRFDNPVLPFNDGVYFASTEKSNIIRGWIFGTTLDSKTQSLLIVNNATNVVIKVCEFQFCNDPFLGVYYHKNNKSWMESEFRVYSSANNCTFEYVSQPFLMDLEGKQGNFKNLREFVFKNIDGYFKIYSKHTPINLVRDLPQGFSALEPLVDLPIGINITRFQTLLALHRSYLTPGDSSSGWTAGAAAYYVGYLQPRTFLLKYNENGTITDAVDCALDPLSETKCTLKSFTVEKGIYQTSNFRVQPTESIVRFPNITNLCPFGEVFNATRFASVYAWNRKRISNCVADYSVLYNSASFSTFKCYGVSPTKLNDLCFTNVYADSFVIRGDEVRQIAPGQTGKIADYNYKLPDDFTGCVISWNSNNLDSKVGGNYNYLYRLFRKSNLKPFERDISTEIYQAGSTPCNGVEGFNCYFPLQSYGFQPTNGVGYQPYRVVVLSFELLHAPATVCGPKKSTNLVKNKCVNFNFNGLTGTGVLTESNKKFLPFQQFGRDIADTTDAVRDPQTLEILDITPCSFGGVSVITPGTNTSNQVAVLYQGVNCTEVPVAIHADQLTPTWRVYSTGSNVFQTRAGCLIGAEHVNNSYECDIPIGAGICASYQTQTNSPRRARSVASQSIIAYTMSLGAENSVAYSNNSIAIPTNFTISVTTEILPVSMTKTSVDCTMYICGDSTECSNLLLQYGSFCTQLNRALTGIAVEQDKNTQEVFAQVKQIYKTPPIKDFGGFNFSQILPDPSKPSKRSFIEDLLFNKVTLADAGFIKQYGDCLGDIAARDLICAQKFNGLTVLPPLLTDEMIAQYTSALLAGTITSGWTFGAGAALQIPFAMQMAYRFNGCGVTQNVLYENQKLIANQFNSAIGKIQDSLSSTASALGKLQDVVNQNAQALNTLVKQLSSNFGAISSVLNDILSRLDKVEAEVQIDRLITGRLQSLQTYVTQQLIRAAEIRASANLAATKMSECVLGQSKRVDFCGKGCHLMSFPQSAPHGVVFLHVTYVPAQEKNFTTAPAICHDGKAHFPREGVFVSNGTHWFVTQRNFYEPQIITTDNTFVSGNCDVVIGIVNNTVYDPLQPELDSFKEELDKYFKNHTSPDVDLGDISGINASVVNIQKEIDRLNEVAKNLNESLIDLQELGKYEQYIKGGSGYIPEAPRDGQAYVRKDGEWVLLSTFL

SEQ ID NO: 6268 - protein, 1241 aa, Artificial Sequence
  SARS-CoV-2/France/GE1977/2020__EPI_ISL_414632 spike protein (1-1211)(I909C_Y1047C) Foldon construct
MFVFLVLLPLVSSQCVNLTTRTQLPPAYTNSFTRGVYYPDKVFRSSVLHSTQDLFLPFFSNVTWFHAIHVSGTNGTKRFDNPVLPFNDGVYFASTEKSNIIRGWIFGTTLDSKTQSLLIVNNATNVVIKVCEFQFCNDPFLGVYYHKNNKSWMESEFRVYSSANNCTFEYVSQPFLMDLEGKQGNFKNLREFVFKNIDGYFKIYSKHTPINLVRDLPQGFSALEPLVDLPIGINITRFQTLLALHRSYLTPGDSSSGWTAGAAAYYVGYLQPRTFLLKYNENGTITDAVDCALDPLSETKCTLKSFTVEKGIYQTSNFRVQPTESIVRFPNITNLCPFGEVFNATRFASVYAWNRKRISNCVADYSVLYNSASFSTFKCYGVSPTKLNDLCFTNVYADSFVIRGDEVRQIAPGQTGKIADYNYKLPDDFTGCVIAWNSNNLDSKVGGNYNYLYRLFRKSNLKPFERDISTEIYQAGSTPCNGVEGFNCYFPLQSYGFQPTNGVGYQPYRVVVLSFELLHAPATVCGPKKSTNLVKNKCVNFNFNGLTGTGVLTESNKKFLPFQQFGRDIADTTDAVRDPQTLEILDITPCSFGGVSVITPGTNTSNQVAVLYQGVNCTEVPVAIHADQLTPTWRVYSTGSNVFQTRAGCLIGAEHVNNSYECDIPIGAGICASYQTQTNSPRRARSVASQSIIAYTMSLGAENSVAYSNNSIAIPTNFTISVTTEILPVSMTKTSVDCTMYICGDSTECSNLLLQYGSFCTQLNRALTGIAVEQDKNTQEVFAQVKQIYKTPPIKDFGGFNFSQILPDPSKPSKRSFIEDLLFNKVTLADAGFIKQYGDCLGDIAARDLICAQKFNGLTVLPPLLTDEMIAQYTSALLAGTITSGWTFGAGAALQIPFAMQMAYRFNGCGVTQNVLYENQKLIANQFNSAIGKIQDSLFSTASALGKLQDVVNQNAQALNTLVKQLSSNFGAISSVLNDILSRLDKVEAEVQIDRLITGRLQSLQTYVTQQLIRAAEIRASANLAATKMSECVLGQSKRVDFCGKGCHLMSFPQSAPHGVVFLHVTYVPAQEKNFTTAPAICHDGKAHFPREGVFVSNGTHWFVTQRNFYEPQIITTDNTFVSGNCDVVIGIVNNTVYDPLQPELDSFKEELDKYFKNHTSPDVDLGDISGINASVVNIQKEIDRLNEVAKNLNESLIDLQELGKYEQYIKGGSGYIPEAPRDGQAYVRKDGEWVLLSTFL

SEQ ID NO: 6269 - protein, 1241 aa, Artificial Sequence
  SARS-CoV-2/Finland/FIN-313/2020__EPI_ISL_414641 spike protein (1-1211)(I909C_Y1047C) Foldon construct
MFVFLVLLPLVSSQCVNLTTRTQLPPAYTNSFTRGVYYPDKVFRSSVLHSTQDLFLPFFSNVTWFHAIHVSGTNGTKRFDNPVLPFNDGVYFASTEKSNIIRGWIFGTTLDSKTQSLLIVNNATNVVIKVCEFQFCNDPFLGVYYHKNNKSWMESEFRVYSSANNCTFEYVSQPFLMDLEGKQGNFKNLREFVFKNIDGYFKIYSKHTPINLVRDLPQGFSALEPLVDLPIGINITRFKTLLALHRSYLTPGDSSSGWTAGAAAYYVGYLQPRTFLLKYNENGTITDAVDCALDPLSETKCTLKSFTVEKGIYQTSNFRVQPTESIVRFPNITNLCPFGEVFNATRFASVYAWNRKRISNCVADYSVLYNSASFSTFKCYGVSPTKLNDLCFTNVYADSFVIRGDEVRQIAPGQTGKIADYNYKLPDDFTGCVIAWNSNNLDSKVGGNYNYLYRLFRKSNLKPFERDISTEIYQAGSTPCNGVEGFNCYFPLQSYGFQPTNGVGYQPYRVVVLSFELLHAPATVCGPKKSTNLVKNKCVNFNFNGLTGTGVLTESNKKFLPFQQFGRDIADTTDAVRDPQTLEILDITPCSFGGVSVITPGTNTSNQVAVLYQGVNCTEVPVAIHADQLTPTWRVYSTGSNVFQTRAGCLIGAEHVNNSYECDIPIGAGICASYQTQTNSPRRARSVASQSIIAYTMSLGAENSVAYSNNSIAIPTNFTISVTTEILPVSMTKTSVDCTMYICGDSTECSNLLLQYGSFCTQLNRALTGIAVEQDKNTQEVFAQVKQIYKTPPIKDFGGFNFSQILPDPSKPSKRSFIEDLLFNKVTLADAGFIKQYGDCLGDIAARDLICAQKFNGLTVLPPLLTDEMIAQYTSALLAGTITSGWTFGAGAALQIPFAMQMAYRFNGCGVTQNVLYENQKLIANQFNSAIGKIQDSLSSTASALGKLQDVVNQNAQALNTLVKQLSSNFGAISSVLNDILSRLDKVEAEVQIDRLITGRLQSLQTYVTQQLIRAAEIRASANLAATKMSECVLGQSKRVDFCGKGCHLMSFPQSAPHGVVFLHVTYVPAQEKNFTTAPAICHDGKAHFPREGVFVSNGTHWFVTQRNFYEPQIITTDNTFVSGNCDVVIGIVNNTVYDPLQPELDSFKEELDKYFKNHTSPDVDLGDISGINASVVNIQKEIDRLNEVAKNLNESLIDLQELGKYEQYIKGGSGYIPEAPRDGQAYVRKDGEWVLLSTFL

SEQ ID NO: 6270 - protein, 1241 aa, Artificial Sequence
  SARS-CoV-2/Netherlands/ZuidHolland_2/2020__EPI_ISL_414556 spike protein (1-1211)(I909C_Y1047C) Foldon construct
MFVFLVLLPLVSSQCVNLTTRTQLPPAYTNSFTRGVYYPDKVFRSSVLHSTQDLFLPFFSNVTWFHAIHVSGTNGTKRFDNPVLPFNDGVYFASTEKSNIIRGWIFGTTLDSKTQSLLIVNNATNVVIKVCEFQFCNDPFLGVYYHKNNKSWMESEFRVYSSANNCTFEYVSQPFLMDLEGKQGNFKNLREFVFKNIDGYFKIYSKHTPINLVRDLPQGFSALEPLVDLPIGINITRFQTLLALHRSYLTPGDSSSGWTAGAAAYYVGYLQPRTFLLKYNENGTITDAVDCALDPLSETKCTLKSFTVEKGIYQTSNFRVQPTESIVRFPNITNLCPFGEVFNATRFASVYAWNRKRISNCVADYSVLYNSASFSTFKCYGVSPTKLNDLCFTNVYADSFVIRGDEVRQIAPGQTGKIADYNYKLPDDFTGCVIAWNSNNLDSKVGGNYNYLYRLFRKSNLKPFERDISTEIYQAGSTPCNGVEGFNCYFPLQSYGFQPTNGVGYQPYRVVVLSFELLHAPATVCGPKKSTNLVKNKCVNFNFNGLTGTGVLTESNKKFLPFQQFGRDIADTTDAVRDPQTLEILDITPCSFGGVSVITPGTNTSNQVAVLYQGVNCTEVPVAIHADQLTPTWRVYSTGSNVFQTRAGCLIGAEHVNNSYECDIPIGAGICASYQTQTNSPRRARSVASQSIIAYTMSLGAENSVAYSNNSIAIPTNFTISVTTEILPVSMTKTSVDCTMYICGDSTECSNLLLQYGSFCTQLNRALTGIALEQDKNTQEVFAQVKQIYKTPPIKDFGGFNFSQILPDPSKPSKRSFIEDLLFNKVTLADAGFIKQYGDCLGDIAARDLICAQKFNGLTVLPPLLTDEMIAQYTSALLAGTITSGWTFGAGAALQIPFAMQMAYRFNGCGVTQNVLYENQKLIANQFNSAIGKIQDSLSSTASALGKLQDVVNQNAQALNTLVKQLSSNFGAISSVLNDILSRLDKVEAEVQIDRLITGRLQSLQTYVTQQLIRAAEIRASANLAATKMSECVLGQSKRVDFCGKGCHLMSFPQSAPHGVVFLHVTYVPAQEKNFTTAPAICHDGKAHFPREGVFVSNGTHWFVTQRNFYEPQIITTDNTFVSGNCDVVIGIVNNTVYDPLQPELDSFKEELDKYFKNHTSPDVDLGDISGINASVVNIQKEIDRLNEVAKNLNESLIDLQELGKYEQYIKGGSGYIPEAPRDGQAYVRKDGEWVLLSTFL

SEQ ID NO: 6271 - protein, 1241 aa, Artificial Sequence
  SARS-CoV-2/USA/WA-UW31/2020__EPI_ISL_414618 spike protein (1-1211)(I909C_Y1047C) Foldon construct
MFVFLVLLPLVSSQCVNLTTRTQLPPAYTNSFTRGVYYPDKVFRSSVLHSTQDLFLPFFSNVTWFHAIHVSGTNGTKRFDNPVLPFNDGVYFASTEKSNIIRGWIFGTTLDSKTQSLLIVNNATNVVIKVCEFQFCNDPFLGVYYHKNNKSWMESEFRVYSSANNCTFEYVSQPFLMDLEGKQGNFKNLREFVFKNIDGYFKIYSKHTPINLVRDLPQGFSALEPLVDLPIGINITRFQTLLALHRSYLTPGDSSSGWTAGAAAYYVGYLQPRTFLLKYNENGTITDAVDCALDPLSETKCTLKSFTVEKGIYQTSNFRVQPTESIVRFPNITNLCPFGEVFNATRFASVYAWNRKRISNCVADYSVLYNSASFSTFKCYGVSPTKLNDLCFTNVYADSFVIRGDEVRQIAPGQTGKIADYNYKLPDDFTGCVIAWNSNNLDSKVGGNYNYLYRLFRKSNLKPFERDISTEIYQAGSTPCNGAEGFNCYFPLQSYGFQPTNGVGYQPYRVVVLSFELLHAPATVCGPKKSTNLVKNKCVNFNFNGLTGTGVLTESNKKFLPFQQFGRDIADTTDAVRDPQTLEILDITPCSFGGVSVITPGTNTSNQVAVLYQDVNCTEVPVAIHADQLTPTWRVYSTGSNVFQTRAGCLIGAEHVNNSYECDIPIGAGICASYQTQTNSPRRARSVASQSIIAYTMSLGAENSVAYSNNSIAIPTNFTISVTTEILPVSMTKTSVDCTMYICGDSTECSNLLLQYGSFCTQLNRALTGIAVEQDKNTQEVFAQVKQIYKTPPIKDFGGFNFSQILPDPSKPSKRSFIEDLLFNKVTLADAGFIKQYGDCLGDIAARDLICAQKFNGLTVLPPLLTDEMIAQYTSALLAGTITSGWTFGAGAALQIPFAMQMAYRFNGCGVTQNVLYENQKLIANQFNSAIGKIQDSLSSTASALGKLQDVVNQNAQALNTLVKQLSSNFGAISSVLNDILSRLDKVEAEVQIDRLITGRLQSLQTYVTQQLIRAAEIRASANLAATKMSECVLGQSKRVDFCGKGCHLMSFPQSAPHGVVFLHVTYVPAQEKNFTTAPAICHDGKAHFPREGVFVSNGTHWFVTQRNFYEPQIITTDNTFVSGNCDVVIGIVNNTVYDPLQPELDSFKEELDKYFKNHTSPDVDLGDISGINASVVNIQKEIDRLNEVAKNLNESLIDLQELGKYEQYIKGGSGYIPEAPRDGQAYVRKDGEWVLLSTFL

SEQ ID NO: 6272 - protein, 1241 aa, Artificial Sequence
  SARS-CoV-2/South Korea/SNU01/2020__EPI_ISL_411929 spike protein (1-1211)(I909C_Y1047C) Foldon construct
MFVFLVLLPLVSSQCVNLTTRTQLPPAYTNSFTRGVYYPDKVFRSSVLHSTQDLFLPFFSNVTWFHAIHVSGTNGTKRFDNPVLPFNDGVYFASTEKSNIIRGWIFGTTLDSKTQSLLIVNNATNVVIKVCEFQFCNDPFLGVYYHKNNKSWMESEFRVYSSANNCTFEYVSQPFLMDLEGKQGNFKNLREFVFKNIDGYFKIYSKHTPINLVRDLPQGFWALEPLVDLPIGINITRFQTLLALHRSYLTPGDSSSGWTAGAAAYYVGYLQPRTFLLKYNENGTITDAVDCALDPLSETKCTLKSFTVEKGIYQTSNFRVQPTESIVRFPNITNLCPFGEVFNATRFASVYAWNRKRISNCVADYSVLYNSASFSTFKCYGVSPTKLNDLCFTNVYADSFVIRGDEVRQIAPGQTGKIADYNYKLPDDFTGCVIAWNSNNLDSKVGGNYNYLYRLFRKSNLKPFERDISTEIYQAGSTPCNGVEGFNCYFPLQSYGFQPTNGVGYQPYRVVVLSFELLHAPATVCGPKKSTNLVKNKCVNFNFNGLTGTGVLTESNKKFLPFQQFGRDIADTTDAVRDPQTLEILDITPCSFGGVSVITPGTNTSNQVAVLYQDVNCTEVPVAIHADQLTPTWRVYSTGSNVFQTRAGCLIGAEHVNNSYECDIPIGAGICASYQTQTNSPRRARSVASQSIIAYTMSLGAENSVAYSNNSIAIPTNFTISVTTEILPVSMTKTSVDCTMYICGDSTECSNLLLQYGSFCTQLNRALTGIAVEQDKNTQEVFAQVKQIYKTPPIKDFGGFNFSQILPDPSKPSKRSFIEDLLFNKVTLADAGFIKQYGDCLGDIAARDLICAQKFNGLTVLPPLLTDEMIAQYTSALLAGTITSGWTFGAGAALQIPFAMQMAYRFNGCGVTQNVLYENQKLIANQFNSAIGKIQDSLSSTASALGKLQDVVNQNAQALNTLVKQLSSNFGAISSVLNDILSRLDKVEAEVQIDRLITGRLQSLQTYVTQQLIRAAEIRASANLAATKMSECVLGQSKRVDFCGKGCHLMSFPQSAPHGVVFLHVTYVPAQEKNFTTAPAICHDGKAHFPREGVFVSNGTHWFVTQRNFYEPQIITTDNTFVSGNCDVVIGIVNNTVYDPLQPELDSFKEELDKYFKNHTSPDVDLGDISGINASVVNIQKEIDRLNEVAKNLNESLIDLQELGKYEQYIKGGSGYIPEAPRDGQAYVRKDGEWVLLSTFL

SEQ ID NO: 6273 - protein, 1241 aa, Artificial Sequence
  SARS-CoV-2/China/WF0004/2020__EPI_ISL_413694 spike protein (1-1211)(I909C_Y1047C) Foldon construct
MFVFLVLLPLVSSQCVNLTTRTQLPPAYTNSFTRGVYYPDKVFRSSVLHSTQDLFLPFFSNVTWFHAIHVSGTNGTKRFDNPVLPFNDGVYFASTEKSNIIRGWIFGTTLDSKTQSLLIVNNATNVVIKVCEFQFCNDPFLGVYYHKNNKSWTESEFRVYSSANNCTFEYVSQPFLMDLEGKQGNFKNLREFVFKNIDGYFKIYSKHTPINLVRDLPQGFSALEPLVDLPIGINITRFQTLLALHRSYLTPGDSSSGWTAGAAAYYVGYLQPRTFLLKYNENGTITDAVDCALDPLSETKCTLKSFTVEKGIYQTSNFRVQPTESIVRFPNITNLCPFGEVFNATRFASVYAWNRKRISNCVADYSVLYNSASFSTFKCYGVSPTKLNDLCFTNVYADSFVIRGDEVRQIAPGQTGKIADYNYKLPDDFTGCVIAWNSNNLDSKVGGNYNYLYRLFRKSNLKPFERDISTEIYQAGSTPCNGVEGFNCYFPLQSYGFQPTNGVGYQPYRVVVLSFELLHAPATVCGPKKSTNLVKNKCVNFNFNGLTGTGVLTESNKKFLPFQQFGRDIADTTDAVRDPQTLEILDITPCSFGGVSVITPGTNTSNQVAVLYQDVNCTEVPVAIHADQLTPTWRVYSTGSNVFQTRAGCLIGAEHVNNSYECDIPIGAGICASYQTQTNSPRRARSVASQSIIAYTMSLGAENSVAYSNNSIAIPTNFTISVTTEILPVSMTKTSVDCTMYICGDSTECSNLLLQYGSFCTQLNRALTGIAVEQDKNTQEVFAQVKQIYKTPPIKDFGGFNFSQILPDPSKPSKRSFIEDLLFNKVTLADAGFIKQYGDCLGDIAARDLICAQKFNGLTVLPPLLTDEMIAQYTSALLAGTITSGWTFGAGAALQIPFAMQMAYRFNGCGVTQNVLYENQKLIANQFNSAIGKIQDSLSSTASALGKLQDVVNQNAQALNTLVKQLSSNFGAISSVLNDILSRLDKVEAEVQIDRLITGRLQSLQTYVTQQLIRAAEIRASANLAATKMSECVLGQSKRFDFCGKGCHLMSFPQSAPHGVVFLHVTYVPAQEKNFTTAPAICHDGKAHFPREGVFVSNGTHWFVTQRNFYEPQIITTDNTFVSGNCDVVIGIVNNTVYDPLQPELDSFKEELDKYFKNHTSPDVDLGDISGINASVVNIQKEIDRLNEVAKNLNESLIDLQELGKYEQYIKGGSGYIPEAPRDGQAYVRKDGEWVLLSTFL

SEQ ID NO: 6274 - protein, 1241 aa, Artificial Sequence
  SARS-CoV-2/China/WF0028/2020__EPI_ISL_413791 spike protein (1-1211)(I909C_Y1047C) Foldon construct
MFVFLVLLPLVSSQCVNLTTRTQLPPAYTNSFTRGVYYPDKVFRSSVLHSTQDLFLPFFSNVTWFHAIHVSGTNGTKRFDNPVLPFNDGVYFASTEKSNIIRGWIFGTTLDSKTQSLLIVNNATNVVIKVCEFQFCNDPFLGVYYHKNNKSWMESEFRVYSSANNCTFEYVSQPFLMDLEGKQGNFKNLREFVFKNIDGYFKIYSKHTPINLVRDLPQGFSALEPLVDLPIGINITRFQTLLALHRSYLTPGDSSSGWTAGAAAYYVGYLQPRTFLLKYNENGTITDAVDCALDPLSETKCTLKSFTVEKGIYQTSNFRVQPTESIVRFPNITNLCPFGEVFNATRFASVYAWNRKRISNCVADYSVLYNSASFSTFKCYGVSPTKLNDLCFTNVYADSFVIRGDEVRQIAPGQTGKIADYNYKLPDDFTGCVIAWNSNNLDSKVGGNYNYLYRLFRKSNLKPFERDISTEIYQAGSTPCNGVEGFNCYFPLQSYGFQPTNGVGYQPYRVVVLSFELLHAPATVCGPKKSTNLVKNKCVNFNFNGLTGTGVLTESNKKFLPFQQFGRDIADTTDAVRDPQTLEILDITPCSFGGVSVITPGTNTSNQVAVLYQDVNCTEVPVAIHADQLTPTWRVYSTGSNVFQTRAGCLIGAEHVNNSYECDIPIGAGICASYQTQTNSPRRARSVASQSIIAYTMSLGAENSVAYSNNSIAIPTNFTISVTTEILPVSMTKTSVDCTMYICGDSTECSNLLLQYGSFCTQLNRALTGIAVEQDKNTQEVFAQVKQIYKTPPIKDFGGFNFSQILPDPSKPSKRSFIEDLLFNKVTLADAGFIKQYGDCLGDIAARDLICAQKFNGLTVLPPLLTDEMIAQYTSALLAGTITSGWTFGAGAALQIPFAMQMAYRFNGCGVTQNVLYENQKLIANQFNSAIGKIQDSLSSTASALGKLQDVVNQNAQALNTLVKQLSSNFGAISSVLNDILSRLDKVEAEVQIDRLITGRLQSLQTYVTQQLIRAAEIRASANLAATKMSECVLGQSKRVDFCGKGCHLMSFPQSAPHGVVFLHVTYVPAQEKNFTTAPAICHDGKAHFPREGVFVSNGTHWFVTQRNFYEPQIITTDNTFVSGNCDVVIGIVNNTVYDPLQPELESFKEELDKYFKNHTSPDVDLGDISGINASVVNIQKEIDRLNEVAKNLNESLIDLQELGKYEQYIKGGSGYIPEAPRDGQAYVRKDGEWVLLSTFL

SEQ ID NO: 6275 - protein, 1241 aa, Artificial Sequence
  SARS-CoV-2/2019-nCoV/USA-CruiseA-18/2020__MT159716.1 spike protein (1-1211)(I909C_Y1047C) Foldon construct
MFVFLVLLPLVSSQCVNLTTRTQLPPAYTNSFTRGVYYPDKVFRSSVLHSTQDLFLPFFSNVTWFHAIHVSGTNGTKRFDNPVLPFNDGVYFASTEKSNIIRGWIFGTTLDSKTQSLLIVNNATNVVIKVCEFQFCNDPFLGVYYHKNNKSWMESELRVYSSANNCTFEYVSQPFLMDLEGKQGNFKNLREFVFKNIDGYFKIYSKHTPINLVRDLPQGFSALEPLVDLPIGINITRFQTLLALHRSYLTPGDSSSGWTAGAAAYYVGYLQPRTFLLKYNENGTITDAVDCALDPLSETKCTLKSFTVEKGIYQTSNFRVQPTESIVRFPNITNLCPFGEVFNATRFASVYAWNRKRISNCVADYSVLYNSASFSTFKCYGVSPTKLNDLCFTNVYADSFVIRGDEVRQIAPGQTGKIADYNYKLPDDFTGCVIAWNSNNLDSKVGGNYNYLYRLFRKSNLKPFERDISTEIYQAGSTPCNGVEGFNCYFPLQSYGFQPTNGVGYQPYRVVVLSFELLHAPATVCGPKKSTNLVKNKCVNFNFNGLTGTGVLTESNKKFLPFQQFGRDIADTTDAVRDPQTLEILDITPCSFGGVSVITPGTNTSNQVAVLYQDVNCTEVPVAIHADQLTPTWRVYSTGSNVFQTRAGCLIGAEHVNNSYECDIPIGAGICASYQTQTNSPRRARSVASQSIIAYTMSLGAENSVAYSNNSIAIPTNFTISVTTEILPVSMTKTSVDCTMYICGDSTECSNLLLQYGSFCTQLNRALTGIAVEQDKNTQEVFAQVKQIYKTPPIKDFGGFNFSQILPDPSKPSKRSFIEDLLFNKVTLADAGFIKQYGDCLGDIAARDLICAQKFNGLTVLPPLLTDEMIAQYTSALLAGTITSGWTFGAGAALQIPFAMQMAYRFNGCGVTQNVLYENQKLIANQFNSAIGKIQDSLSSTASALGKLQDVVNQNAQALNTLVKQLSSNFGAISSVLNDILSRLDKVEAEVQIDRLITGRLQSLQTYVTQQLIRAAEIRASANLAATKMSECVLGQSKRVDFCGKGCHLMSFPQSAPHGVVFLHVTYVPAQEKNFTTAPAICHDGKAHFPREGVFVSNGTHWFVTQRNFYEPQIITTDNTFVSGNCDVVIGIVNNTVYDPLQPELDSFKEELDKYFKNHTSPDVDLGDISGINASVVNIQKEIDRLNEVAKNLNESLIDLQELGKYEQYIKGGSGYIPEAPRDGQAYVRKDGEWVLLSTFL

SEQ ID NO: 6276 - protein, 1241 aa, Artificial Sequence
  SARS-CoV-2/SARS-CoV-2/Yunnan-01/human/2020/CHN__MT049951.1 spike protein (1-1211)(I909C_Y1047C) Foldon construct
MFVFLVLLPLVSSQCVNLTTRTQLPPANTNSFTRGVYYPDKVFRSSVLHSTQDLFLPFFSNVTWFHAIHVSGTNGTKRFDNPVLPFNDGVYFASTEKSNIIRGWIFGTTLDSKTQSLLIVNNATNVVIKVCEFQFCNDPFLGVYYHKNNKSWMESEFRVYSSANNCTFEYVSQPFLMDLEGKQGNFKNLREFVFKNIDGYFKIYSKHTPINLVRDLPQGFSALEPLVDLPIGINITRFQTLLALHRSYLTPGDSSSGWTAGAAAYYVGYLQPRTFLLKYNENGTITDAVDCALDPLSETKCTLKSFTVEKGIYQTSNFRVQPTESIVRFPNITNLCPFGEVFNATRFASVYAWNRKRISNCVADYSVLYNSASFSTFKCYGVSPTKLNDLCFTNVYADSFVIRGDEVRQIAPGQTGKIADYNYKLPDDFTGCVIAWNSNNLDSKVGGNYNYLYRLFRKSNLKPFERDISTEIYQAGSTPCNGVEGFNCYFPLQSYGFQPTNGVGYQPYRVVVLSFELLHAPATVCGPKKSTNLVKNKCVNFNFNGLTGTGVLTESNKKFLPFQQFGRDIADTTDAVRDPQTLEILDITPCSFGGVSVITPGTNTSNQVAVLYQDVNCTEVPVAIHADQLTPTWRVYSTGSNVFQTRAGCLIGAEHVNNSYECDIPIGAGICASYQTQTNSPRRARSVASQSIIAYTMSLGAENSVAYSNNSIAIPTNFTISVTTEILPVSMTKTSVDCTMYICGDSTECSNLLLQYGSFCTQLNRALTGIAVEQDKNTQEVFAQVKQIYKTPPIKDFGGFNFSQILPDPSKPSKRSFIEDLLFNKVTLADAGFIKQYGDCLGDIAARDLICAQKFNGLTVLPPLLTDEMIAQYTSALLAGTITSGWTFGAGAALQIPFAMQMAYRFNGCGVTQNVLYENQKLIANQFNSAIGKIQDSLSSTASALGKLQDVVNQNAQALNTLVKQLSSNFGAISSVLNDILSRLDKVEAEVQIDRLITGRLQSLQTYVTQQLIRAAEIRASANLAATKMSECVLGQSKRVDFCGKGCHLMSFPQSAPHGVVFLHVTYVPAQEKNFTTAPAICHDGKAHFPREGVFVSNGTHWFVTQRNFYEPQIITTDNTFVSGNCDVVIGIVNNTVYDPLQPELDSFKEELDKYFKNHTSPDVDLGDISGINASVVNIQKEIDRLNEVAKNLNESLIDLQELGKYEQYIKGGSGYIPEAPRDGQAYVRKDGEWVLLSTFL

SEQ ID NO: 6277 - protein, 1241 aa, Artificial Sequence
  SARS-CoV-2/USA/WA-UW292/2020__EPI_ISL_418077 spike protein (1-1211)(I909C_Y1047C) Foldon construct
MFVFLVLLPLVSSQCVNLTTRTQLPPAYTNSFTRGVYYPDKVFRSSVLHSTQDLFLPFFSNVTWFHAIHVSGTNGTKRFDNPVLPFNDGVYFASTEKSNIIRGWIFGTTLDSKTQSLLIVNNATNVVIKVCEFQFCNDPFLGVYYHKNNKSWMESEFRVYSSANNCTFEYVSQPFLMDLEGKQGNFKNLREFVFKNIDGYFKIYSKHTPINLVRDLPQGFSALEPLVDLPIGINITRFQTLLALHRSYLTPGDSSSGWTAGAAAYYVGYLQPRTFLLKYNENGTITDAVDCALDPLSETKCTLKSFTVEKGIYQTSNFRVQPTESIVRFPNITNLCPFGEVFNATRFASVYAWNRKRISNCVADYSVLYNSASFSTFKCYGVSPTKLNDLCFTNVYADSFVIRGDEVRQIAPGQTGKIADYNYKLPDDFTGCVIAWNSNNLDSKVGGNYNYLYRLFRKSNLKPFERDISTEIYQASSTPCNGVEGFNCYFPLQSYGFQPTNGVGYQPYRVVVLSFELLHAPATVCGPKKSTNLVKNKCVNFNFNGLTGTGVLTESNKKFLPFQQFGRDIADTTDAVRDPQTLEILDITPCSFGGVSVITPGTNTSNQVAVLYQDVNCTEVPVAIHADQLTPTWRVYSTGSNVFQTRAGCLIGAEHVNNSYECDIPIGAGICASYQTQTNSPRRARSVASQSIIAYTMSLGAENSVAYSNNSIAIPTNFTISVTTEILPVSMTKTSVDCTMYICGDSTECSNLLLQYGSFCTQLNRALTGIAVEQDKNTQEVFAQVKQIYKTPPIKDFGGFNFSQILPDPSKPSKRSFIEDLLFNKVTLADAGFIKQYGDCLGDIAARDLICAQKFNGLTVLPPLLTDEMIAQYTSALLAGTITSGWTFGAGAALQIPFAMQMAYRFNGCGVTQNVLYENQKLIANQFNSAIGKIQDSLSSTASALGKLQDVVNQNAQALNTLVKQLSSNFGAISSVLNDILSRLDKVEAEVQIDRLITGRLQSLQTYVTQQLIRAAEIRASANLAATKMSECVLGQSKRVDFCGKGCHLMSFPQSAPHGVVFLHVTYVPAQEKNFTTAPAICHDGKAHFPREGVFVSNGTHWFVTQRNFYEPQIITTDNTFVSGNCDVVIGIVNNTVYDPLQPELDSFKEELDKYFKNHTSPDVDLGDISGINASVVNIQKEIDRLNEVAKNLNESLIDLQELGKYEQYIKGGSGYIPEAPRDGQAYVRKDGEWVLLSTFL

SEQ ID NO: 6278 - protein, 1241 aa, Artificial Sequence
  SARS-CoV-2/Iceland/192/2020__EPI_ISL_417819 spike protein (1-1211)(I909C_Y1047C) Foldon construct
MFVFFVLLPLVSSQCVNLTTRTQLPPAYTNSFTRGVYYPDKVFRSSVLHSTQDLFLPFFSNVTWFHAIHVSGTNGTKRFDNPVLPFNDGVYFASTEKSNIIRGWIFGTTLDSKTQSLLIVNNATNVVIKVCEFQFCNDPFLGVYYHKNNKSWMESEFRVYSSANNCTFEYVSQPFLMDLEGKQGNFKNLREFVFKNIDGYFKIYSKHTPINLVRDLPQGFSALEPLVDLPIGINITRFQTLLALHRSYLTPGDSSSGWTAGAAAYYVGYLQPRTFLLKYNENGTITDAVDCALDPLSETKCTLKSFTVEKGIYQTSNFRVQPTESIVRFPNITNLCPFGEVFNATRFASVYAWNRKRISNCVADYSVLYNSASFSTFKCYGVSPTKLNDLCFTNVYADSFVIRGDEVRQIAPGQTGKIADYNYKLPDDFTGCVIAWNSNNLDSKVGGNYNYLYRLFRKSNLKPFERDISTEIYQAGSTPCNGVEGFNCYFPLQSYGFQPTNGVGYQPYRVVVLSFELLHAPATVCGPKKSTNLVKNKCVNFNFNGLTGTGVLTESNKKFLPFQQFGRDIADTTDAVRDPQTLEILDITPCSFGGVSVITPGTNTSNQVAVLYQGVNCTEVPVAIHADQLTPTWRVYSTGSNVFQTRAGCLIGAEHVNNSYECDIPIGAGICASYQTQTNSPRRARSVASQSIIAYTMSLGAENSVAYSNNSIAIPTNFTISVTTEILPVSMTKTSVDCTMYICGDSTECSNLLLQYGSFCTQLNRALTGIAVEQDKNTQEVFAQVKQIYKTPPIKDFGGFNFSQILPDPSKPSKRSFIEDLLFNKVTLADAGFIKQYGDCLGDIAARDLICAQKFNGLTVLPPLLTDEMIAQYTSALLAGTITSGWTFGAGAALQIPFAMQMAYRFNGCGVTQNVLYENQKLIANQFNSAIGKIQDSLSSTASALGKLQDVVNQNAQALNTLVKQLSSNFGAISSVLNDILSRLDKVEAEVQIDRLITGRLQSLQTYVTQQLIRAAEIRASANLAATKMSECVLGQSKRVDFCGKGCHLMSFPQSAPHGVVFLHVTYVPAQEKNFTTAPAICHDGKAHFPREGVFVSNGTHWFVTQRNFYEPQIITTDNTFVSGNCDVVIGIVNNTVYDPLQPELDSFKEELDKYFKNHTSPDVDLGDISGINASVVNIQKEIDRLNEVAKNLNESLIDLQELGKYEQYIKGGSGYIPEAPRDGQAYVRKDGEWVLLSTFL

SEQ ID NO: 6279 - protein, 1241 aa, Artificial Sequence
  SARS-CoV-2/Belgium/ULG-6939/2020__EPI_ISL_417020 spike protein (1-1211)(I909C_Y1047C) Foldon construct
MFVFLVLLPLVSSQCVNLTTRTQLPPAYTNSFTRGVYYPDKVFRSSVLHSTQDLFLPFFSNVTWFHAIHVSGTNGTKRFDNPVLPFNDGVYFASTEKSNIIRGWIFGTTLDSKTQSLLIVNNATNVVIKVCEFQFCNDPFLGVYYHKNNKSWMESEFRVYSSANNCTFEYVSQPFLMDLEGKQGNFKNLREFVFKNIDGYFKIYSKHTPINLVRDLPQGFSALEPLVDLPIGINITRFQTLLALHRSYLTPGDSSSGWTAGAAAYYVGYLQPRTFLLKYNENGTITDAVDCALDPLSETKCTLKSFTVEKGIYQTSNFRVQPTESIVRFPNITNLCPFGEVFNATRFASVYAWNRKRISNCVADYSVLYNSASFSTFKCYGVSPTKLNDLCFTNVYADSFVIRGDEVRQIAPGQTGKIADYNYKLPDDFTGCVIAWNSNNLDSKVGGNYNYLYRLFRKSNLKPFERDISTEIYQAGSTPCNGVEGFNCYFPLQSYGFQPTNGVGYQPYRVVVLSFELLHAPATVCGPKKSTNLVKNKCVNFNFNGLTGTGVLTESNKKFLPFQQFGRDIADTTDAVRDPQTLEILDITPCSFGGVSVITPGTNTSNQVAVLYQGVNCTEVPVAIHADQLTPTWRVYSTGSNVFQTRAGCLIGAEHVNNSYECDIPIGAGICASYQTQTNSPRRARSVASQSIIAYTMSLGAENSVVYSNNSIAIPTNFTISVTTEILPVSMTKTSVDCTMYICGDSTECSNLLLQYGSFCTQLNRALTGIAVEQDKNTQEVFAQVKQIYKTPPIKDFGGFNFSQILPDPSKPSKRSFIEDLLFNKVTLADAGFIKQYGDCLGDIAARDLICAQKFNGLTVLPPLLTDEMIAQYTSALLAGTITSGWTFGAGAALQIPFAMQMAYRFNGCGVTQNVLYENQKLIANQFNSAIGKIQDSLSSTASALGKLQDVVNQNAQALNTLVKQLSSNFGAISSVLNDILSRLDKVEAEVQIDRLITGRLQSLQTYVTQQLIRAAEIRASANLAATKMSECVLGQSKRVDFCGKGCHLMSFPQSAPHGVVFLHVTYVPAQEKNFTTAPAICHDGKAHFPREGVFVSNGTHWFVTQRNFYEPQIITTDNTFVSGNCDVVIGIVNNTVYDPLQPELDSFKEELDKYFKNHTSPDVDLGDISGINASVVNIQKEIDRLNEVAKNLNESLIDLQELGKYEQYIKGGSGYIPEAPRDGQAYVRKDGEWVLLSTFL

SEQ ID NO: 6280 - protein, 1241 aa, Artificial Sequence
  SARS-CoV-2/France/HF2496/2020__EPI_ISL_418231 spike protein (1-1211)(I909C_Y1047C) Foldon construct
MFVFLVLLPLVSSQCVNLTTRTQLPPAYTNSFTRGVYYPDKVFRSSVLHSTQDLFLPFFSNVTWFHAIHVSGTNGTKRFDNPVLPFNDGVYFASTEKSNIIRGWIFGTTLDSKTQSLLIVNNATNVVIKVCEFQFCNDPFLGVYYHKNNKSWMESEFRVYSSANNCTFEYVSQPFLMDLEGKQGNFKNLREFVFKNIDGYFKIYSKHTPINLVRDLPQGFSALEPLVDLPIGINITRFQTLLALHRSYLTPGDSSSGWTAGAAAYYVGYLQPRTFLLKYNENGTITDAVDCALDPLSETKCTLKSFTVEKGIYQTSNFRVQPTESIVRFPNITNLCPFGEVFNATRFASVYAWNRKRISNCVADYSVLYNSASFSTFKCYGVSPTKLNDLCFTNVYADSFVIRGDEVRQIAPGQTGKIADYNYKLPDDFTGCVIAWNSNNLDSKVGGNYNYLYRLFRKSNLKPFERDISTEIYQAGSTPCNGVEGFNCYFPLQSYGFQPTNGVGYQPYRVVVLSFELLHAPATVCGPKKSTNLVKNKCVNFNFNGLTGTGVLTESNKKFLPFQQFGRDIADTTDAVRDPQTLEILDITPCSFGGVSVITPGTNTSNQVAVLYQGVNCTEVPVAIHADQLTPTWRVYSTGSNVFQTRAGCLIGAEHVNNSYECDIPIGAGICASYQTQTNSPRRARSVASQSIIAYTMSLGAENSVAYSNNSIAIPTNFTISVTTEILPVSMTKTSVDCTMYICGDSTECSNLLLQYGSFCTQLNRALTGIAVEQDKNTQEVFAQVKQIYKTPPIKDFGGFNFSQILPDPSKPSKRSFIEDLLFNKVTLADAGFIKQYGDCLGDIVARDLICAQKFNGLTVLPPLLTDEMIAQYTSALLAGTITSGWTFGAGAALQIPFAMQMAYRFNGCGVTQNVLYENQKLIANQFNSAIGKIQDSLSSTASALGKLQDVVNQNAQALNTLVKQLSSNFGAISSVLNDILSRLDKVEAEVQIDRLITGRLQSLQTYVTQQLIRAAEIRASANLAATKMSECVLGQSKRVDFCGKGCHLMSFPQSAPHGVVFLHVTYVPAQEKNFTTAPAICHDGKAHFPREGVFVSNGTHWFVTQRNFYEPQIITTDNTFVSGNCDVVIGIVNNTVYDPLQPELDSFKEELDKYFKNHTSPDVDLGDISGINASVVNIQKEIDRLNEVAKNLNESLIDLQELGKYEQYIKGGSGYIPEAPRDGQAYVRKDGEWVLLSTFL

SEQ ID NO: 6281 - protein, 1241 aa, Artificial Sequence
  SARS-CoV-2/USA/WA-UW291/2020__EPI_ISL_418076 spike protein (1-1211)(I909C_Y1047C) Foldon construct
MFVFLVLLPLVSSQCVNLTTRTQLPPAYTNSFTRGVYYPDKVFRSSVLHSTQDLFLPFFSNVTWFHAIHVSGTNGTKRFDNPVLPFNDGVYFASTEKSNIIRGWIFGTTLDSKTQSLLIVNNATNVVIKVCEFQFCNDPFLGVYYHKNNKSWMESEFRVYSSANNCTFEYVSQPFLMDLEGKQGNFKNLREFVFKNIDGYFKIYSKHTPINLVRDLPQGFSALEPLVDLPIGINITRFQTLLALHRSYLTPGDSSSGWTAGAAAYYVGYLQPRTFLLKYNENGTITDAVDCALDPLSETKCTLKSFTVEKGIYQTSNFRVQPTESIVRFPNITNLCPFGEVFNATRFASVYAWNRKRISNCVADYSVLYNSASFSTFKCYGVSPTKLNDLCFTNVYADSFVIRGDEVRQIAPGQTGKIADYNYKLPDDFTGCVIAWNSNNLDSKVGGNYNYLYRLFRKSNLKPFERDISTEIYQAGSTPCNGVEGFNCYFPLQSYGFQPTNGVGYQPYRVVVLSFELLHAPATVCGPKKSTNLVKNKCVNFNFNGLTGTGVLTESNKKFLPFQQFGRDIADTTDAVRDPQTLEILDITPCSFGGVSVITPGTNTSNQVAVLYQGVNCTEVPVAIHADQLTPTWRVYSTGSNVFQTRAGCLIGAEHVNNSYECDIPIGAGICASYQTQTNSPRRARSVASQSIIAYTMSLGAENSVAYSNNSIAIPTNFTISVTTEILPVSMTKTSVDCTMYICGDSTECSNLLLQYGSFCTQLNRALTGIAVEQDKNTQEVFAQVKQIYKTPPIKDFGGFNFSQILPDPSKPSKRSFIEDLLFNKVTLADAGFIKQYGDCLGDIAARDLICAQKFNGLTVLPPLLTDEMIAQYTSALLAGTITSGWTFGAGAALQIPFAMQMAYRFNGCGVTQNVLYENQKLIANQFNSAIGKIQYSLSSTASALGKLQDVVNQNAQALNTLVKQLSSNFGAISSVLNDILSRLDKVEAEVQIDRLITGRLQSLQTYVTQQLIRAAEIRASANLAATKMSECVLGQSKRVDFCGKGCHLMSFPQSAPHGVVFLHVTYVPAQEKNFTTAPAICHDGKAHFPREGVFVSNGTHWFVTQRNFYEPQIITTDNTFVSGNCDVVIGIVNNTVYDPLQPELDSFKEELDKYFKNHTSPDVDLGDISGINASVVNIQKEIDRLNEVAKNLNESLIDLQELGKYEQYIKGGSGYIPEAPRDGQAYVRKDGEWVLLSTFL

SEQ ID NO: 6282 - protein, 1241 aa, Artificial Sequence; identical to SEQ ID NO: 6245
  SARS-CoV-2/Portugal/PT0034/2020__EPI_ISL_418019 spike protein (1-1211)(I909C_Y1047C) Foldon construct

SEQ ID NO: 6283 - protein, 1241 aa, Artificial Sequence
  SARS-CoV-2/Iceland/202/2020__EPI_ISL_417750 spike protein (1-1211)(I909C_Y1047C) Foldon construct
MFVFLVLLPLVSSQCVNLTTRTQLPPAYTNSFTRGVYYPDKVFRSSVLHSTQDLFLPFFSNVTWFHAIHVSGTNGTKRFDNPVLPFNDGVYFASTEKSNIIRGWIFGTTLDSKTQSLLIVNNATNVVIKVCEFQFCNDPFLGVYYHKNNKSWMESEFRVYSSANNCTFEYVSQPFLMDLEGKQGNFKNLREFVFKNIDGYFKIYSKHTPINLVRDLPQGFSALEPLVDLPIGINITRFQTLLALHRSYLTPGDSSSGWTAGAAAYYVGYLQPRTFLLKYNENGTITDAVDCALDPLSETKCTLKSFTVEKGIYQTSNFRVQPTESIVRFPNITNLCPFGEVFNATRFASVYAWNRKRISNCVADYSVLYNSASFSTFKCYGVSPTKLNDLCFTNVYADSFVIRGDEVRQIAPGQTGKIADYNYKLPDDFTGCVIAWNSNNLDSKVGGNYNYLYRLFRKSNLKPFERDISTEIYQAGSTPCNGVEGFNCYFPLQSYGFQPTNGVGYQPYRVVVLSFELLHAPATVCGPKKSTNLVKNKCVNFNFNGLTGTGVLTESNKKFLPFQQFGRDIADTTDAVRDPQTLEILDITPCSFGGVSVITPGTNTSNQVAVLYQDVNCTEVPVAIHADQLTPTWRVYSTGSNVFQTRAGCLIGAEHVNNSYECDIPIGAGICASYQTQTNSPRRARSVASQSIIAYTMSLGAENSVAYSNNSIAIPTNFTISVTTEILPVSMTKTSVDCTMYICGDSTECSNLLLQYGSFCTQLNRALTGIAVEQDKNTQEVFAQVKQIYKTPPIKDFGGFNFSQILPDPSKPSKRSFIEDLLFNKVTLADAGFIKQYGDCLGDIAARDLICAQKFNGLTVLPPLLTDEMIAQYTSALLAGTITSGWTFGAGAALQIPFAMQMAYRFNGCGVTQNVLYENQKLIANQFNSAIGKIQDSLSSTASALGKLQDVVNQNAQALNTLVKQLSSNFGAISSVLNDILSRLDKVEAEVQIDRLITGRLQSLQTYVTQQLIRAAEIRASANLAATKMSECVLGQSKRVDFCGKGCHLMSFPQSAPHGVVFLHVTYVPAQEKNFTTAPAICHDGKAHFPREGVFVSNGTHWFVTQRNFYEPQIITTDNTFVSGNCDVVIGIVNNTVYDPLQPELDSFKEELDKYFKNHTSPDVDLGDIPGINASVVNIQKEIDRLNEVAKNLNESLIDLQELGKYEQYIKGGSGYIPEAPRDGQAYVRKDGEWVLLSTFL

SEQ ID NO: 6284 - protein, 1241 aa, Artificial Sequence
  SARS-CoV-2/USA/WA-UW261/2020__EPI_ISL_418046 spike protein (1-1211)(I909C_Y1047C) Foldon construct
MFVFLVLLPLVSSQCVNLTTRTQLPPAYTNSFTRGVYYPDKVFRSSVLHSTQDLFLPFFSNVTWFHAIHVSGTNGTKRFDNPVLPFNDGVYFASTEKSNIIRGWIFGTTLDSKTQSLLIVNNATNVVIKVCEFQFCNDPFLGVYYHKNNKSWMESEFRVYSSANNCTFEYVSQPFLMDLEGKQGNFKNLREFVFKNIDGYFKIYSKHTPINLVRDLPQGFSALEPLVDLPIGINITRFQTLLALHRSYLTPGDSSSGWTAGAAAYYVGYLQPRTFLLKYNENGTITDAVDCALDPLSETKCTLKSFTVEKGIYQTSNFRVQPTESIVRFPNITNLCPFGEVFNATRFTSVYAWNRKRISNCVADYSVLYNSASFSTFKCYGVSPTKLNDLCFTNVYADSFVIRGDEVRQIAPGQTGKIADYNYKLPDDFTGCVIAWNSNNLDSKVGGNYNYLYRLFRKSNLKPFERDISTEIYQAGSTPCNGVEGFNCYFPLQSYGFQPTNGVGYQPYRVVVLSFELLHAPATVCGPKKSTNLVKNKCVNFNFNGLTGTGVLTESNKKFLPFQQFGRDIADTTDAVRDPQTLEILDITPCSFGGVSVITPGTNTSNQVAVLYQDVNCTEVPVAIHADQLTPTWRVYSTGSNVFQTRAGCLIGAEHVNNSYECDIPIGAGICASYQTQTNSPRRARSVASQSIIAYTMSLGAENSVAYSNNSIAIPTNFTISVTTEILPVSMTKTSVDCTMYICGDSTECSNLLLQYGSFCTQLNRALTGIAVEQDKNTQEVFAQVKQIYKTPPIKDFGGFNFSQILPDPSKPSKRSFIEDLLFNKVTLADAGFIKQYGDCLGDIAARDLICAQKFNGLTVLPPLLTDEMIAQYTSALLAGTITSGWTFGAGAALQIPFAMQMAYRFNGCGVTQNVLYENQKLIANQFNSAIGKIQDSLSSTASALGKLQDVVNQNAQALNTLVKQLSSNFGAISSVLNDILSRLDKVEAEVQIDRLITGRLQSLQTYVTQQLIRAAEIRASANLAATKMSECVLGQSKRVDFCGKGCHLMSFPQSAPHGVVFLHVTYVPAQEKNFTTAPAICHDGKAHFPREGVFVSNGTHWFVTQRNFYEPQIITTDNTFVSGNCDVVIGIVNNTVYDPLQPELDSFKEELDKYFKNHTSPDVDLGDISGINASVVNIQKEIDRLNEVAKNLNESLIDLQELGKYEQYIKGGSGYIPEAPRDGQAYVRKDGEWVLLSTFL

SEQ ID NO: 6285 - protein, 1241 aa, Artificial Sequence
  SARS-CoV-2/Portugal/PT0035/2020__EPI_ISL_418020 spike protein (1-1211)(I909C_Y1047C) Foldon construct
MFVFLVLLPLVSSQCVNLTTRTQLPPAYTNSFTRGVYYPDKVFRSSVLHSTQDLFLPFFSNVTWFHAIHVSGTNGTKRFDNPVLPFNDGVYFASTEKSNIIRGWIFGTTLDSKTQSLLIVNNATNVVIKVCEFQFCNDPFLGVYYHKNNKSWMESEFRVYSSANNCTFEYVSQPFLMDLEGKQGNFKNLREFVFKNIDGYFKIYSKHTPINLVRDLPQGFSALEPLVDLPIGINITRFQTLLALHRSYLTPGDSSSGWTAGAAAYYVGYLQPRTFLLKYNENGTITDAVDCALDPLSETKCTLKSFTVEKGIYQTSNFRVQPTESIVRFPNITNLCPFGEVFNATRFASVYAWNRKRISNCVADYSVLYNSASFSTFKCYGVSPTKLNDLCFTNVYADSFVIRGDEVRQIAPGQTGKIADYNYKLPDDFTGCVIAWNSNNLDSKVGGNYNYLYRLFRKSNLKPFERDISTEIYQAGSTPCNGVEGFNCYFPLQSYGFQPTNGVGYQPYRVVVLSFELLHAPATVCGPKKSTNLVKNKCVNFNFNGLTGTGVLTESNKKFLPFQQFGRDIADTTDAVRDPQTLEILDITPCSFGGVSVITPGTNTSNQVAVLYQDVNCTEVPVAIHADQLTPTWRVYSTGSNVFQTRAGCLIGAEHVNNSYECDIPIGAGICASYQTQTNSPRRARSVASQSIIAYTMSLGAENSVAYSNNSIAIPTNFTISVTTEILPVSMTKTSVDCTMYICGDSTECSNLLLQYGSFCTQLNRALTGIAVEQDKNTQEVFAQVKQIYKTPPIKDFGGFNFSQILPDPSKPSKRSFIEDLLFNKVTLADAGFIKQYGDCLGDISARDLICAQKFNGLTVLPPLLTDEMIAQYTSALLAGTITSGWTFGAGAALQIPFAMQMAYRFNGCGVTQNVLYENQKLIANQFNSAIGKIQDSLSSTASALGKLQDVVNQNAQALNTLVKQLSSNFGAISSVLNDILSRLDKVEAEVQIDRLITGRLQSLQTYVTQQLIRAAEIRASANLAATKMSECVLGQSKRVDFCGKGCHLMSFPQSAPHGVVFLHVTYVPAQEKNFTTAPAICHDGKAHFPREGVFVSNGTHWFVTQRNFYEPQIITTDNTFVSGNCDVVIGIVNNTVYDPLQPELDSFKEELDKYFKNHTSPDVDLGDISGINASVVNIQKEIDRLNEVAKNLNESLIDLQELGKYEQYIKGGSGYIPEAPRDGQAYVRKDGEWVLLSTFL

SEQ ID NO: 6286 - protein, 1241 aa, Artificial Sequence
  SARS-CoV-2/USA/NY-NYUMC7/2020__EPI_ISL_418192 spike protein (1-1211)(I909C_Y1047C) Foldon construct
MFVFLVLLPLVSSQCVNLTTRTQLPPAYTNSFTRGVYYPDKVFRSSVLHSTQDLFLPFFSNVTWFHAIHVSGTNGTKRFDNPVLPFNDGVYFASTEKSNIIRGWIFGTTLDSKTQSLLIVNNATNVVIKVCEFQFCNDPFLGVYHHKNNKSWMESEFRVYSSANNCTFEYVSQPFLMDLEGKQGNFKNLREFVFKNIDGYFKIYSKHTPINLVRDLPQGFSALEPLVDLPIGINITRFQTLLALHRSYLTPGDSSSGWTAGAAAYYVGYLQPRTFLLKYNENGTITDAVDCALDPLSETKCTLKSFTVEKGIYQTSNFRVQPTESIVRFPNITNLCPFGEVFNATRFASVYAWNRKRISNCVADYSVLYNSASFSTFKCYGVSPTKLNDLCFTNVYADSFVIRGDEVRQIAPGQTGKIADYNYKLPDDFTGCVIAWNSNNLDSKVGGNYNYLYRLFRKSNLKPFERDISTEIYQAGSTPCNGVEGFNCYFPLQSYGFQPTNGVGYQPYRVVVLSFELLHAPATVCGPKKSTNLVKNKCVNFNFNGLTGTGVLTESNKKFLPFQQFGRDIADTTDAVRDPQTLEILDITPCSFGGVSVITPGTNTSNQVAVLYQGVNCTEVPVAIHADQLTPTWRVYSTGSNVFQTRAGCLIGAEHVNNSYECDIPIGAGICASYQTQTNSPRRARSVASQSIIAYTMSLGAENSVAYSNNSIAIPTNFTISVTTEILPVSMTKTSVDCTMYICGDSTECSNLLLQYGSFCTQLNRALTGIAVEQDKNTQEVFAQVKQIYKTPPIKDFGGFNFSQILPDPSKPSKRSFIEDLLFNKVTLADAGFIKQYGDCLGDIAARDLICAQKFNGLTVLPPLLTDEMIAQYTSALLAGTITSGWTFGAGAALQIPFAMQMAYRFNGCGVTQNVLYENQKLIANQFNSAIGKIQDSLSSTASALGKLQDVVNQNAQALNTLVKQLSSNFGAISSVLNDILSRLDKVEAEVQIDRLITGRLQSLQTYVTQQLIRAAEIRASANLAATKMSECVLGQSKRVDFCGKGCHLMSFPQSAPHGVVFLHVTYVPAQEKNFTTAPAICHDGKAHFPREGVFVSNGTHWFVTQRNFYEPQIITTDNTFVSGNCDVVIGIVNNTVYDPLQPELDSFKEELDKYFKNHTSPDVDLGDISGINASVVNIQKEIDRLNEVAKNLNESLIDLQELGKYEQYIKGGSGYIPEAPRDGQAYVRKDGEWVLLSTFL

SEQ ID NO: 6287 - protein, 1241 aa, Artificial Sequence
  SARS-CoV-2/Iceland/189/2020__EPI_ISL_417709 spike protein (1-1211)(I909C_Y1047C) Foldon construct
MFVFLVLLPLVSSQCVNLTTRTQLPPAYTNSFTRGVYYPDKVFRSSVLHSTQDLFLPFFSNVTWFHAIHVSGTNGTKRFDNPVLPFNDGVYFASTEKSNIIRGWIFGTTLDSKTQSLLIVNNATNVVIKVCEFQFCNDPFLGVYYHKNNKSWMESEFRVYSSANNCTFEYVSQPFLMDLEGKQGNFKNLREFVFKNIDGYFKIYSKHTPINLVRDLPQGFSALEPLVDLPIGINITRFQTLLALHRSYLTPGDSSSGWTAGAAAYYVGYLQPRTFLLKYNENGTITDAVDCALDPLSETKCTLKSFTVEKGIYQTSNFRVQPTESIVRFPNITNLCPFGEVFNATRFASVYAWNRKRISNCVADYSVLYNSASFSTFKCYGVSPTKLNDLCFTNVYADSFVIRGDEVRQIAPGQTGKIADYNYKLPDDFTGCVIAWNSNNLDSKVGGNYNYLYRLFRKSNLKPFERDISTEIYQAGSTPCNGVEGFNCYFPLQSYGFQPTNGVGYQPYRVVVLSFELLHAPATVCGPKKSTNLVKNKCVNFNFNGLTGTGVLTESNKKFLPFQQFGRDIADTTDAVRDPQTLEILDITPCSFGGVSVITPGTNTSNQVAVLYQGVNCTEVPVAIHADQLTPTWRVYSTGSNVFQTRAGCLIGAEHVNNSYECDIPIGAGICASYQTQTNSPRRARSVASQSIIAYTMSLGAENSVAYSNNSIAIPTNFTISVTTEILPVSMTKTSVDCTMYICGDSTECSNLLLQYGSFCTQLNRALTGIAVEQDKNTQEVFAQVKQIYKTPPIKDFGGFNFSQILPDPSKPSKRSFIEDLLFNKVTLADAGFTKQYGDCLGDIAARDLICAQKFNGLTVLPPLLTDEMIAQYTSALLAGTITSGWTFGAGAALQIPFAMQMAYRFNGCGVTQNVLYENQKLIANQFNSAIGKIQDSLSSTASALGKLQDVVNQNAQALNTLVKQLSSNFGAISSVLNDILSRLDKVEAEVQIDRLITGRLQSLQTYVTQQLIRAAEIRASANLAATKMSECVLGQSKRVDFCGKGCHLMSFPQSAPHGVVFLHVTYVPAQEKNFTTAPAICHDGKAHFPREGVFVSNGTHWFVTQRNFYEPQIITTDNTFVSGNCDVVIGIVNNTVYDPLQPELDSFKEELDKYFKNHTSPDVDLGDISGINASVVNIQKEIDRLNEVAKNLNESLIDLQELGKYEQYIKGGSGYIPEAPRDGQAYVRKDGEWVLLSTFL

SEQ ID NO: 6288 - protein, 1241 aa, Artificial Sequence
  SARS-CoV-2/Australia/NSW56/2020__EPI_ISL_417408 spike protein (1-1211)(I909C_Y1047C) Foldon construct
MFVFLVLLPLVSSQCVNLTTRTQLPPAYTNSFTRGVYYPDKVFRSSVLHSTQDLFLPFFSNVTWFHAIHVSGTNGTKRFDNPVLPFNDGVYFASTEKSNIIRGWIFGTTLDSKTQSLLIVNNATNVVIKVCEFQFCNDPFLGVYYHKNNKSWMESEFRVYSSANNCTFEYVSQPFLMDLEGKQGNFKNLREFVFKNIDGYFKIYSKHTPINLVRDLPQGFSALEPLVDLPIGINITRFQTLLALHRSYLTPGDSSSGWTAGAAAYYVGYLQPRTFLLKYNENGTITDAVDCALDPLSETKCTLKSFTVEKGIYQTSNFRVQPTESIVRFPNITNLCPFGEVFNATRFASVYAWNRKRISNCVADYSVLYNSASFSTFKCYGVSPTKLNDLCFTNVYADSFVIRGDEVRQIAPGQTGKIADYNYKLPDDFTGCVIAWNSNNLDSKVGGNYNYLYRLFRKSNLKPFERDISTEIYQAGSTPCNGVEGFNCYFPLQSYGFQPTNGVGYQPYRVVVLSFELLHAPATVCGPKKSTNLVKNKCVNFNFNGLTGTGVLTESNKKFLPFQQFGRDIADTTDAVRDPQTLEILDITPCSFGGVSVITPGTNTSNQVAVLYQDVNCTEVPVAIHADQLTPTWRVYSTGSNVFQTRAGCLIGAEHVNNSYECDIPIGAGICASYQTQTNSPRRARSVASQSIIAYTMSLGAENSVAYSNNSIAIPTNFTISVTTEILPVSMTKTSVDCTMYICGDSTECSNLLLQYGSFCTQLNRALTGIAVEQDKNTQEVFAQVKQIYKTPPIKDFGGFNFSQILPDSSKPSKRSFIEDLLFNKVTLADAGFIKQYGDCLGDIAARDLICAQKFNGLTVLPPLLTDEMIAQYTSALLAGTITSGWTFGAGAALQIPFAMQMAYRFNGCGVTQNVLYENQKLIANQFNSAIGKIQDSLSSTASALGKLQDVVNQNAQALNTLVKQLSSNFGAISSVLNDILSRLDKVEAEVQIDRLITGRLQSLQTYVTQQLIRAAEIRASANLAATKMSECVLGQSKRVDFCGKGCHLMSFPQSAPHGVVFLHVTYVPAQEKNFTTAPAICHDGKAHFPREGVFVSNGTHWFVTQRNFYEPQIITTDNTFVSGNCDVVIGIVNNTVYDPLQPELDSFKEELDKYFKNHTSPDVDLGDISGINASVVNIQKEIDRLNEVAKNLNESLIDLQELGKYEQYIKGGSGYIPEAPRDGQAYVRKDGEWVLLSTFL

SEQ ID NO: 6289 - protein, 1241 aa, Artificial Sequence
  SARS-CoV-2/Iceland/280/2020__EPI_ISL_417608 spike protein (1-1211)(I909C_Y1047C) Foldon construct
MFVFLVLLPLVSSQCVNLTTRTQLPPAYTNSFTRGVYYPDKVFRSSVLHSTQDLFLPFFSNVTWFHAIHVSGTNGTKRFDNPVLPFNDGVYFASTEKSNIIRGWIFGTTLDSKTQSLLIVNNATNVVIKVCEFQFCNDPFLGVYYHKNNKSWMESEFRVYSSANNCTFEYVSQPFLMDLEGKQGNFKNLREFVFKNIDGYFKIYSKHTPINLVRDLPQGFSALEPLVDLPIGINITRFQTLLALHRSYLTPGDSSSGWTAGAAAYYVGYLQPRTFLLKYNENGTITDAVDCALDPLSETKCTLKSFTVEKGIYQTSNFRVQPTESIVRFPNITNLCPFGEVFNATRFASVYAWNRKRISNCVADYSVLYNSASFSTFKCYGVSPTKLNDLCFTNVYADSFVIRGDEVRQIAPGQTGKIADYNYKLPDDFTGCVIAWNSNNLDSKVGGNYNYLYRLFRKSNLKPFERDISTEIYQAGSTPCNGVEGFNCYFPLQSYGFQPTNGVGYQPYRVVVLSFELLHAPATVCGPKKSTNLVKNKCVNFNFNGLTGTGVLTESNKKFLPFQQFGRDIADTTDAVRDPQTLEILDITPCSFGGVSVITPGTNTSNQVAVLYQGVNCTEVPVAIHADQLTPTWRVYSTGSNVFQTRAGCLIGAEHVNNSYECDIPIGAGICASYHTQTNSPRRARSVASQSIIAYTMSLGAENSVAYSNNSIAIPTNFTISVTTEILPVSMTKTSVDCTMYICGDSTECSNLLLQYGSFCTQLNRALTGIAVEQDKNTQEVFAQVKQIYKTPPIKDFGGFNFSQILPDPSKPSKRSFIEDLLFNKVTLADAGFIKQYGDCLGDIAARDLICAQKFNGLTVLPPLLTDEMIAQYTSALLAGTITSGWTFGAGAALQIPFAMQMAYRFNGCGVTQNVLYENQKLIANQFNSAIGKIQDSLSSTASALGKLQDVVNQNAQALNTLVKQLSSNFGAISSVLNDILSRLDKVEAEVQIDRLITGRLQSLQTYVTQQLIRAAEIRASANLAATKMSECVLGQSKRVDFCGKGCHLMSFPQSAPHGVVFLHVTYVPAQEKNFTTAPAICHDGKAHFPREGVFVSNGTHWFVTQRNFYEPQIITTDNTFVSGNCDVVIGIVNNTVYDPLQPELDSFKEELDKYFKNHTSPDVDLGDISGINASVVNIQKEIDRLNEVAKNLNESLIDLQELGKYEQYIKGGSGYIPEAPRDGQAYVRKDGEWVLLSTFL

SEQ ID NO: 6290 - protein, 1241 aa, Artificial Sequence; identical to SEQ ID NO: 6245
  SARS-CoV-2/Iceland/247/2020__EPI_ISL_417575 spike protein (1-1211)(I909C_Y1047C) Foldon construct

SEQ ID NO: 6291 - protein, 1241 aa, Artificial Sequence
  SARS-CoV-2/Iceland/238/2020__EPI_ISL_417566 spike protein (1-1211)(I909C_Y1047C) Foldon construct
MFVFLVLLPLVSSQCVNLTTRTQLPPAYTNSFTRGVYYPDKVFRSSVLHSTQDLFLPFFSNVTWFHAIHVSGTNGTKRFDNPVLPFNDGVYFASTEKSNIIRGWIFGTTLDSKTQSLLIVNNATNVVIKVCEFQFCNDPFLGVYYHKNNKSWMESEFRVYSSANNCTFEYVSQPFLMDLEGKQGNFKNLREFVFKNIDGYFKIYSKHTPINLVRDLPQGFSALEPLVDLPIGINITRFQTLLALHRSYLTPGDSSSGWTAGAAAYYVGYLQPRTFLLKYNENGTITDAVDCALDPLSETKCTLKSFTVEKGIYQTSNFRVQPTESIVRFPNITNLCPFGEVFNATRFASVYAWNRKRISNCVADYSVLYNSASFSTFKCYGVSPTKLNDLCFTNVYADSFVIRGDEVRQIAPGQTGKIADYNYKLPDDFTGCVIAWNSNNLDSKVGGNYNYLYRLFRKSNLKPFERDISTEIYQAGSTPCNGVEGFNCYFPLQSYGFQPTNGVGYQPYRVVVLSFELLHAPATVCGPKKSTNLVKNKCVNFNFNGLTGTGVLTESNKKFLPFQQFGRDIADTTDAVRDPQTLEILDITPCSFGGVSVITPGTNTSNQVAVLYQGVNCTEVPVAIHADQLTPTWRVYSTGSNVFQTRAGCLIGAEHVNNSYECDIPIGAGICASYQTQTNSPRRARSVASQSIIAYTMSLGAENSVAYSNNSIAIPTNFTISVTTEILPVSMTKTSVDCTMYICGDSTECSNLLLQYGSFCTQLNRALTGIAVEQDKNTQEVFAQVKQIYKTPPIKDFGGFNFSQILPDPSKPSKRSFIEDLLFNKVTLADVGFIKQYGDCLGDIAARDLICAQKFNGLTVLPPLLTDEMIAQYTSALLAGTITSGWTFGAGAALQIPFAMQMAYRFNGCGVTQNVLYENQKLIANQFNSAIGKIQDSLSSTASALGKLQDVVNQNAQALNTLVKQLSSNFGAISSVLNDILSRLDKVEAEVQIDRLITGRLQSLQTYVTQQLIRAAEIRASANLAATKMSECVLGQSKRVDFCGKGCHLMSFPQSAPHGVVFLHVTYVPAQEKNFTTAPAICHDGKAHFPREGVFVSNGTHWFVTQRNFYEPQIITTDNTFVSGNCDVVIGIVNNTVYDPLQPELDSFKEELDKYFKNHTSPDVDLGDISGINASVVNIQKEIDRLNEVAKNLNESLIDLQELGKYEQYIKGGSGYIPEAPRDGQAYVRKDGEWVLLSTFL

SEQ ID NO: 6292 - protein, 1241 aa, Artificial Sequence
  SARS-CoV-2/Greece/16/2020__EPI_ISL_418265 spike protein (1-1211)(I909C_Y1047C) Foldon construct
MFVFLVLLPLVSSQCVNLTTRTQLPPAYTNSFTRGVYYPDKVFRSSVLHSTQDLFLPFFSNVTWFHAIHVSGTNGTKRFDNPVLPFNDGVYFASTEKSNIIRGWIFGTTLDSKTQSLLIVNNATNVVIKVCEFQFCNDPFLGVYYHKNNKSWMESEFRVYSSANNCTFEYVSQPFLMDLEGKQGNFKNLREFVFKNVDGYFKIYSKHTPINLVRDLPQGFSALEPLVDLPIGINITRFQTLLALHRSYLTPGDSSSGWTAGAAAYYVGYLQPRTFLLKYNENGTITDAVDCALDPLSETKCTLKSFTVEKGIYQTSNFRVQPTESIVRFPNITNLCPFGEVFNATRFASVYAWNRKRISNCVADYSVLYNSASFSTFKCYGVSPTKLNDLCFTNVYADSFVIRGDEVRQIAPGQTGKIADYNYKLPDDFTGCVIAWNSNNLDSKVGGNYNYLYRLFRKSNLKPFERDISTEIYQAGSTPCNGVEGFNCYFPLQSYGFQPTNGVGYQPYRVVVLSFELLHAPATVCGPKKSTNLVKNKCVNFNFNGLTGTGVLTESNKKFLPFQQFGRDIADTTDAVRDPQTLEILDITPCSFGGVSVITPGTNTSNQVAVLYQDVNCTEVPVAIHADQLTPTWRVYSTGSNVFQTRAGCLIGAEHVNNSYECDIPIGAGICASYQTQTNSPRRARSVASQSIIAYTMSLGAENSVAYSNNSIAIPTNFTISVTTEILPVSMTKTSVDCTMYICGDSTECSNLLLQYGSFCTQLNRALTGIAVEQDKNTQEVFAQVKQIYKTPPIKDFGGFNFSQILPDPSKPSKRSFIEDLLFNKVTLADAGFIKQYGDCLGDIAARDLICAQKFNGLTVLPPLLTDEMIAQYTSALLAGTITSGWTFGAGAALQIPFAMQMAYRFNGCGVTQNVLYENQKLIANQFNSAIGKIQDSLSSTASALGKLQDVVNQNAQALNTLVKQLSSNFGAISSVLNDILSRLDKVEAEVQIDRLITGRLQSLQTYVTQQLIRAAEIRASANLAATKMSECVLGQSKRVDFCGKGCHLMSFPQSAPHGVVFLHVTYVPAQEKNFTTAPAICHDGKAHFPREGVFVSNGTHWFVTQRNFYEPQIITTDNTFVSGNCDVVIGIVNNTVYDPLQPELDSFKEELDKYFKNHTSPDVDLGDISGINASVVNIQKEIDRLNEVAKNLNESLIDLQELGKYEQYIKGGSGYIPEAPRDGQAYVRKDGEWVLLSTFL

SEQ ID NO: 6293 - protein, 1241 aa, Artificial Sequence
  SARS-CoV-2/Iceland/319/2020__EPI_ISL_417648 spike protein (1-1211)(I909C_Y1047C) Foldon construct
MFVFLVLLPLVSSQCVNLTTRTQLPPAYTNSFTRGVYYPDKVFRSSVLHSTQDLFLPFFSNVTWFHAIHVSGTNGTKRFDNPVLPFNDGVYFASTEKSNIIRGWIFGTTLDSKTQSLLIVNNATNVVIKVCEFQFCNDPFLGVYYHKNNKSWMESEFRVYSSANNCTFEYVSQPFLIDLEGKQGNFKNLREFVFKNIDGYFKIYSKHTPINLVRDLPQGFSALEPLVDLPIGINITRFQTLLALHRSYLTPGDSSSGWTAGAAAYYVGYLQPRTFLLKYNENGTITDAVDCALDPLSETKCTLKSFTVEKGIYQTSNFRVQPTESIVRFPNITNLCPFGEVFNATRFASVYAWNRKRISNCVADYSVLYNSASFSTFKCYGVSPTKLNDLCFTNVYADSFVIRGDEVRQIAPGQTGKIADYNYKLPDDFTGCVIAWNSNNLDSKVGGNYNYLYRLFRKSNLKPFERDISTEIYQAGSTPCNGVEGFNCYFPLQSYGFQPTNGVGYQPYRVVVLSFELLHAPATVCGPKKSTNLVKNKCVNFNFNGLTGTGVLTESNKKFLPFQQFGRDIADTTDAVRDPQTLEILDITPCSFGGVSVITPGTNTSNQVAVLYQGVNCTEVPVAIHADQLTPTWRVYSTGSNVFQTRAGCLIGAEHVNNSYECDIPIGAGICASYQTQTNSPRRARSVASQSIIAYTMSLGAENSVAYSNNSIAIPTNFTISVTTEILPVSMTKTSVDCTMYICGDSTECSNLLLQYGSFCTQLNRALTGIAVEQDKNTQEVFAQVKQIYKTPPIKDFGGFNFSQILPDPSKPSKRSFIEDLLFNKVTLADAGFIKQYGDCLGDIAARDLICAQKFNGLTVLPPLLTDEMIAQYTSALLAGTITSGWTFGAGAALQIPFAMQMAYRFNGCGVTQNVLYENQKLIANQFNSAIGKIQDSLSSTASALGKLQDVVNQNAQALNTLVKQLSSNFGAISSVLNDILSRLDKVEAEVQIDRLITGRLQSLQTYVTQQLIRAAEIRASANLAATKMSECVLGQSKRVDFCGKGCHLMSFPQSAPHGVVFLHVTYVPAQEKNFTTAPAICHDGKAHFPREGVFVSNGTHWFVTQRNFYEPQIITTDNTFVSGNCDVVIGIVNNTVYDPLQPELDSFKEELDKYFKNHTSPDVDLGDISGINASVVNIQKEIDRLNEVAKNLNESLIDLQELGKYEQYIKGGSGYIPEAPRDGQAYVRKDGEWVLLSTFL

SEQ ID NO: 6294 - protein, 1241 aa, Artificial Sequence
  SARS-CoV-2/Congo/94/2020__EPI_ISL_417947 spike protein (1-1211)(I909C_Y1047C) Foldon construct
MFVFLVLLPLVSSQCVNLTTRTQLPPAYTNSFTRGVYYPDKVFRSSVLHSTQDLFLPFFSNVTWFHAIHVSGTNGTKRFDNPVLPFNDGVYFASTEKSNIIRGWIFGTTLDSKTQSLLIVNNATNVVIKVCEFQFCNDPFLGVYYHKNNKSWMESEFRVYSSANNCTFEYVSQPFLMDLEGKQGNFKNLREFVFKNIDGYFKIYSKHTPINLVRDLPQGFSALEPLVDLPIGINITRFQTLLALHRSYLTPGDSSSGWTAGAAAYYVGYLQPRTFLLKYNENGTITDAVDCALDPLSETKCTLKSFTVEKGIYQTSNFRVQPTESIVRFPNITNLCPFGEVFNATRFASVYAWNRKRISNCVADYSVLYNSASFSTFKCYGVSPTKLNDLCFTNVYADSFVIRGDEVRQIAPGQTGKIADYNYKLPDDFTGCVIAWNSNNLDSKVGGNYNYLYRLFRKSNLKPFERDISTEIYQAGSTPCNGVEGFNCYFPLQSYGFQPTNGVGYQPYRVVVLSFELLHAPATVCGPKKSTNLVKNKCVNFNFNGLTGTGVLTESNKKFLPFQQFGRDIADTTDAVRDPQTLEILDITPCSFGGVSVITPGTNTSNQVAVLYQGVNCTEVPVAIHADQLTPTWRVYSTGSNVFQTRAGCLIGAEHVNNSYECDIPIGAGICASYQTQTNSPRRARSVASQSIIAYTMSLGAENSVAYSNNSIAIPTNFTISVTTEILPVSMTKTSVDCTMYICGDSTECSNLLLQYGSFCTQLNRALTGIAVEQDKNTQEVFAQVKQIYKTPPIKDFGGFNFSQILPDPSKPSKRSFIEDILFNKVTLADAGFIKQYGDCLGDIAARDLICAQKFNGLTVLPPLLTDEMIAQYTSALLAGTITSGWTFGAGAALQIPFAMQMAYRFNGCGVTQNVLYENQKLIANQFNSAIGKIQDSLSSTASALGKLQDVVNQNAQALNTLVKQLSSNFGAISSVLNDILSRLDKVEAEVQIDRLITGRLQSLQTYVTQQLIRAAEIRASANLAATKMSECVLGQSKRVDFCGKGCHLMSFPQSAPHGVVFLHVTYVPAQEKNFTTAPAICHDGKAHFPREGVFVSNGTHWFVTQRNFYEPQIITTDNTFVSGNCDVVIGIVNNTVYDPLQPELDSFKEELDKYFKNHTSPDVDLGDISGINASVVNIQKEIDRLNEVAKNLNESLIDLQELGKYEQYIKGGSGYIPEAPRDGQAYVRKDGEWVLLSTFL

SEQ ID NO: 6295 - protein, 1241 aa, Artificial Sequence
  SARS-CoV-2/Congo/158/2020__EPI_ISL_417950 spike protein (1-1211)(I909C_Y1047C) Foldon construct
MFVFLVLLPLVSSQCVNLTTRTQLPPAYTNSFTRGVYYPDKVFRSSVLHSTQDLFLPFFSNVTWFHAIHVSGTNGTKRFDNPVLPFNDGVYFASTEKSNIIRGWIFGTTLDSKTQSLLIVNNATNVVIKVCEFQFCNDPFLGVYYHKNNKSWMESEFRVYSSANNCTFEYVSQPFLMDLEGKQGNFKNLREFVFKNIDGYFKIYSKHTPINLVRDLPQGFSALEPLVDLPIGINITRFQTLLALHRSYLTPGDSSSGWTAGAAAYYVGYLQPRTFLLKYNENGTITDAVDCALDPLSETKCTLKSFTVEKGIYQTSNFRVQPTESIVRFPNITNLCPFGEVFNATRFASVYAWNRKRISNCVADYSVLYNSASFSTFKCYGVSPTKLNDLCFTNVYADSFVIRGDEVRQIAPGQTGKIADYNYKLPDDFTGCVIAWNSNNLDSKVGGNYNYLYRLFRKSNLKPFERDISTEIYQAGSTPCNGVEGFNCYFPLQSYGFQPTNGVGYQPYRVVVLSFELLHAPATVCGPKKSTNLVKNKCVNFNFNGLTGTGVLTESNKKFLPFQQFGRDIADTTDAVRDPQTLEILDITPCSFGGVSVITPGTNTSNQVAVLYQDVNCTEVPVAIHADQLTPTWRVYSTGSNVFQTRAGCLIGAEHVNNSYECDIPIGAGICASYQTQTNSPRRARSVASQSIIAYTMSLGAENSVAYSNNSIAIPTNFTISVTTEILPVSMTKTSVDCTMYICGDSTECSNLLLQYGSFCTQLNRALTGIAVEQDKNTQEVFAQVKQIYKTPPIKDFGGFNFSQILPDPSKPSKRSFIEDLLFNKVTLADAGFIKQYGDCLGDIAARDLICAQKFNGLTVLPPLLTDEMIAQYTSALLAGTITSGWTFGAGAALQIPFAMQMAYRFNGCGVTQNVLYENQKLIANQFNSAIGKIQDSLSSTASALGKLQDVVNQNAQALNTLVKQLSSNFGAISSVLNDILSRLDKVEAEVQIDRLITGRLQSLQTYVTQQLIRAAEIRASANLAATKMSECVLGQSKRVDFCGKGCHLMSFPQSAPHGVVFLHVTYVPAQEKNFTTAPAICHDGKAHFPREGVFVSNGTHWFVTQRNFYEPQIITTDNTFLSGNCDVVIGIVNNTVYDPLQPELDSFKEELDKYFKNHTSPDVDLGDISGINASVVNIQKEIDRLNEVAKNLNESLIDLQELGKYEQYIKGGSGYIPEAPRDGQAYVRKDGEWVLLSTFL

SEQ ID NO: 6296 - protein, 1241 aa, Artificial Sequence
  SARS-CoV-2/USA/UT-00034/2020__EPI_ISL_417977 spike protein (1-1211)(I909C_Y1047C) Foldon construct
MFVFLVLLPLVSSQCVNLTTRTQLPPAYTNSFTRGVYYPDKVFRSSVLHSTQDLFLPFFSNVTWFHAIHVSGTNGTKRFDNPVLPFNDGVYFASTEKSNIIRGWIFGTTLDSKTQSLLIVNNATNVVIKVCEFQFCNDPFLGVYYYKNNKSWMESEFRVYSSANNCTFEYVSQPFLMDLEGKQGNFKNLREFVFKNIDGYFKIYSKHTPINLVRDLPQGFSALEPLVDLPIGINITRFQTLLALHRSYLTPGDSSSGWTAGAAAYYVGYLQPRTFLLKYNENGTITDAVDCALDPLSETKCTLKSFTVEKGIYQTSNFRVQPTESIVRFPNITNLCPFGEVFNATRFASVYAWNRKRISNCVADYSVLYNSASFSTFKCYGVSPTKLNDLCFTNVYADSFVIRGDEVRQIAPGQTGKIADYNYKLPDDFTGCVIAWNSNNLDSKVGGNYNYLYRLFRKSNLKPFERDISTEIYQAGSTPCNGVEGFNCYFPLQSYGFQPTNGVGYQPYRVVVLSFELLHAPATVCGPKKSTNLVKNKCVNFNFNGLTGTGVLTESNKKFLPFQQFGRDIADTTDAVRDPQTLEILDITPCSFGGVSVITPGTNTSNQVAVLYQGVNCTEVPVAIHADQLTPTWRVYSTGSNVFQTRAGCLIGAEHVNNSYECDIPIGAGICASYQTQTNSPRRARSVASQSIIAYTMSLGAENSVAYSNNSIAIPTNFTISVTTEILPVSMTKTSVDCTMYICGDSTECSNLLLQYGSFCTQLNRALTGIAVEQDKNTQEVFAQVKQIYKTPPIKDFGGFNFSQILPDPSKPSKRSFIEDLLFNKVTLADAGFIKQYGDCLGDIAARDLICAQKFNGLTVLPPLLTDEMIAQYTSALLAGTITSGWTFGAGAALQIPFAMQMAYRFNGCGVTQNVLYENQKLIANQFNSAIGKIQDSLSSTASALGKLQDVVNQNAQALNTLVKQLSSNFGAISSVLNDILSRLDKVEAEVQIDRLITGRLQSLQTYVTQQLIRAAEIRASANLAATKMSECVLGQSKRVDFCGKGCHLMSFPQSAPHGVVFLHVTYVPAQEKNFTTAPAICHDGKAHFPREGVFVSNGTHWFVTQRNFYEPQIITTDNTFVSGNCDVVIGIVNNTVYDPLQPELDSFKEELDKYFKNHTSPDVDLGDISGINASVVNIQKEIDRLNEVAKNLNESLIDLQELGKYEQYIKGGSGYIPEAPRDGQAYVRKDGEWVLLSTFL

SEQ ID NO: 6297 - protein, 1241 aa, Artificial Sequence
  SARS-CoV-2/USA/UT-00033/2020__EPI_ISL_417976 spike protein (1-1211)(I909C_Y1047C) Foldon construct
MFVFLVLLPLVSSQCVNLTTRTQLPPAYTNSFTRGVYYPDKVFRSSVLHSTQDLFLPFFSNVTWFHAIHVSGTNGTKRFDNPVLPFNDGVYFASTEKSNIIRGWIFGTTLDSKTQSLLIVNNATNVVIKVCEFQFCNDPFLGVYYHKNNKSWMESEFRVYSSANNCTFEYVSQPFLMDLEGKQGNFKNLREFVFKNIDGYFKIYSKHTPINLVRDLPQGFSALEPLVDLPIGINITRFQTLLALHRSYLTPGDSSSGLTAGAAAYYVGYLQPRTFLLKYNENGTITDAVDCALDPLSETKCTLKSFTVEKGIYQTSNFRVQPTESIVRFPNITNLCPFGEVFNATRFASVYAWNRKRISNCVADYSVLYNSASFSTFKCYGVSPTKLNDLCFTNVYADSFVIRGDEVRQIAPGQTGKIADYNYKLPDDFTGCVIAWNSNNLDSKVGGNYNYLYRLFRKSNLKPFERDISTEIYQAGSTPCNGVEGFNCYFPLQSYGFQPTNGVGYQPYRVVVLSFELLHAPATVCGPKKSTNLVKNKCVNFNFNGLTGTGVLTESNKKFLPFQQFGRDIADTTDAVRDPQTLEILDITPCSFGGVSVITPGTNTSNQVAVLYQGVNCTEVPVAIHADQLTPTWRVYSTGSNVFQTRAGCLIGAEHVNNSYECDIPIGAGICASYQTQTNSPRRARSVASQSIIAYTMSLGAENSVAYSNNSIAIPTNFTISVTTEILPVSMTKTSVDCTMYICGDSTECSNLLLQYGSFCTQLNRALTGIAVEQDKNTQEVFAQVKQIYKTPPIKDFGGFNFSQILPDPSKPSKRSFIEDLLFNKVTLADAGFIKQYGDCLGDIAARDLICAQKFNGLTVLPPLLTDEMIAQYTSALLAGTITSGWTFGAGAALQIPFAMQMAYRFNGCGVTQNVLYENQKLIANQFNSAIGKIQDSLSSTASALGKLQDVVNQNAQALNTLVKQLSSNFGAISSVLNDILSRLDKVEAEVQIDRLITGRLQSLQTYVTQQLIRAAEIRASANLAATKMSECVLGQSKRVDFCGKGCHLMSFPQSAPHGVVFLHVTYVPAQEKNFTTAPAICHDGKAHFPREGVFVSNGTHWFVTQRNFYEPQIITTDNTFVSGNCDVVIGIVNNTVYDPLQPELDSFKEELDKYFKNHTSPDVDLGDISGINASVVNIQKEIDRLNEVAKNLNESLIDLQELGKYEQYIKGGSGYIPEAPRDGQAYVRKDGEWVLLSTFL

SEQ ID NO: 6298 - protein, 1241 aa, Artificial Sequence
  SARS-CoV-2/USA/WI-13/2020__EPI_ISL_417516 spike protein (1-1211)(I909C_Y1047C) Foldon construct
MFVFLVLLPLVSSQCVNLTTRTQLPPAYTNSFTRGVYYPDKVFRSSVLHSTQDLFLPFFSNVTWFHAIHVSGTNGTKRFDNPVLPFNDGVYFASTEKSNIIRGWIFGTTLDSKTQSLLIVNNATNVVIKVCEFQFCNDPFLGVYYHKNNKSWMESEFRVYSSANNCTFEYVSQPFLMDLEGKQGNFKNLREFVFKNIDGYFKIYSKHTPINLVRDLPQGFSALEPLVDLPIGINITRFQTLLALHRSYLTPGDSSSGWTAGAAAYYVGYLQPRTFLLKYNENGTITDAVDCALDPLSETKCTLKSFTVEKGIYQTSNFRVLPTESIVRFPNITNLCPFGEVFNATRFASVYAWNRKRISNCVADYSVLYNSASFSTFKCYGVSPTKLNDLCFTNVYADSFVIRGDEVRQIAPGQTGKIADYNYKLPDDFTGCVIAWNSNNLDSKVGGNYNYLYRLFRKSNLKPFERDISTEIYQAGSTPCNGVEGFNCYFPLQSYGFQPTNGVGYQPYRVVVLSFELLHAPATVCGPKKSTNLVKNKCVNFNFNGLTGTGVLTESNKKFLPFQQFGRDIADTTDAVRDPQTLEILDITPCSFGGVSVITPGTNTSNQVAVLYQGVNCTEVPVAIHADQLTPTWRVYSTGSNVFQTRAGCLIGAEHVNNSYECDIPIGAGICASYQTQTNSPRRARSVASQSIIAYTMSLGAENSVAYSNNSIAIPTNFTISVTTEILPVSMTKTSVDCTMYICGDSTECSNLLLQYGSFCTQLNRALTGIAVEQDKNTQEVFAQVKQIYKTPPIKDFGGFNFSQILPDPSKPSKRSFIEDLLFNKVTLADAGFIKQYGDCLGDIAARDLICAQKFNGLTVLPPLLTDEMIAQYTSALLAGTITSGWTFGAGAALQIPFAMQMAYRFNGCGVTQNVLYENQKLIANQFNSAIGKIQDSLSSTASALGKLQDVVNQNAQALNTLVKQLSSNFGAISSVLNDILSRLDKVEAEVQIDRLITGRLQSLQTYVTQQLIRAAEIRASANLAATKMSECVLGQSKRVDFCGKGCHLMSFPQSAPHGVVFLHVTYVPAQEKNFTTAPAICHDGKAHFPREGVFVSNGTHWFVTQRNFYEPQIITTDNTFVSGNCDVVIGIVNNTVYDPLQPELDSFKEELDKYFKNHTSPDVDLGDISGINASVVNIQKEIDRLNEVAKNLNESLIDLQELGKYEQYIKGGSGYIPEAPRDGQAYVRKDGEWVLLSTFL

SEQ ID NO: 6299 - protein, 1240 aa, Artificial Sequence
  SARS-CoV-2/India/1-27/2020__EPI_ISL_413522 spike protein (1-1210)(I908C_Y1046C) Foldon construct
MFVFLVLLPLVSSQCVNLTTRTQLPPAYTNSFTRGVYYPDKVFRSSVLHSTQDLFLPFFSNVTWFHAIHVSGTNGTKRFDNPVLPFNDGVYFASTEKSNIIRGWIFGTTLDSKTQSLLIVNNATNVVIKVCEFQFCNDPFLGVYHKNNKSWMESEFRVYSSANNCTFEYVSQPFLMDLEGKQGNFKNLREFVFKNIDGYFKIYSKHTPINLVRDLPQGFSALEPLVDLPIGINITRFQTLLALHRSYLTPGDSSSGWTAGAAAYYVGYLQPRTFLLKYNENGTITDAVDCALDPLSETKCTLKSFTVEKGIYQTSNFRVQPTESIVRFPNITNLCPFGEVFNATRFASVYAWNRKRISNCVADYSVLYNSASFSTFKCYGVSPTKLNDLCFTNVYADSFVIRGDEVIQIAPGQTGKIADYNYKLPDDFTGCVIAWNSNNLDSKVGGNYNYLYRLFRKSNLKPFERDISTEIYQAGSTPCNGVEGFNCYFPLQSYGFQPTNGVGYQPYRVVVLSFELLHAPATVCGPKKSTNLVKNKCVNFNFNGLTGTGVLTESNKKFLPFQQFGRDIADTTDAVRDPQTLEILDITPCSFGGVSVITPGTNTSNQVAVLYQDVNCTEVPVAIHADQLTPTWRVYSTGSNVFQTRAGCLIGAEHVNNSYECDIPIGAGICASYQTQTNSPRRARSVASQSIIAYTMSLGAENSVAYSNNSIAIPTNFTISVTTEILPVSMTKTSVDCTMYICGDSTECSNLLLQYGSFCTQLNRALTGIAVEQDKNTQEVFAQVKQIYKTPPIKDFGGFNFSQILPDPSKPSKRSFIEDLLFNKVTLADAGFIKQYGDCLGDIAARDLICAQKFNGLTVLPPLLTDEMIAQYTSALLAGTITSGWTFGAGAALQIPFAMQMAYRFNGCGVTQNVLYENQKLIANQFNSAIGKIQDSLSSTASALGKLQDVVNQNAQALNTLVKQLSSNFGAISSVLNDILSRLDKVEAEVQIDRLITGRLQSLQTYVTQQLIRAAEIRASANLAATKMSECVLGQSKRVDFCGKGCHLMSFPQSAPHGVVFLHVTYVPAQEKNFTTAPAICHDGKAHFPREGVFVSNGTHWFVTQRNFYEPQIITTDNTFVSGNCDVVIGIVNNTVYDPLQPELDSFKEELDKYFKNHTSPDVDLGDISGINASVVNIQKEIDRLNEVAKNLNESLIDLQELGKYEQYIKGGSGYIPEAPRDGQAYVRKDGEWVLLSTFL

SEQ ID NO: 6300 - protein, 1235 aa, Artificial Sequence
  SARS-CoV-2/pangolin/Guangxi/P4L/2017__EPI_ISL_410538 spike protein (1-1205)(I903C_Y1041C) Foldon construct
MFVFLFVLPLVSSQCVNLTTRTGIPPGYTNSSTRGVYYPDKVFRSSILHLTQDLFLPFFSNVTWFNTINYQGGFKKFDNPVLPFNDGVYFASTEKSNIIRGWIFGTTLDARTQSLLIVNNATNVVIKVCEFQFCTDPFLGVYYHNNNKTWVENEFRVYSSANNCTFEYISQPFLMDLEGKQGNFKNLREFVFKNVDGYFKIYSKHTPIDLVRDLPRGFAALEPLVDLPIGINITRFQTLLALHRSYLTPGNLESGWTTGAAAYYVGYLQQRTFLLSYNQNGTITDAVDCSLDPLSETKCTLKSLTVEKGIYQTSNFRVQPTISIVRFPNITNLCPFGEVFNASKFASVYAWNRKRISNCVADYSVLYNSTSFSTFKCYGVSPTKLNDLCFTNVYADSFVVKGDEVRQIAPGQTGVIADYNYKLPDDFTGCVIAWNSVKQDALTGGNYGYLYRLFRKSKLKPFERDISTEIYQAGSTPCNGQVGLNCYYPLERYGFHPTTGVNYQPFRVVVLSFELLNGPATVCGPKLSTTLVKDKCVNFNFNGLTGTGVLTTSKKQFLPFQQFGRDISDTTDAVRDPQTLEILDITPCSFGGVSVITPGTNTSNQVAVLYQDVNCTEVPMAIHAEQLTPAWRVYSAGANVFQTRAGCLVGAEHVNNSYECDIPVGAGICASYHSMSSLRSVNQRSIIAYTMSLGAENSVAYSNNSIAIPTNFTISVTTEILPVSMTKTSVDCTMYICGDSIECSNLLLQYGSFCTQLNRALTGIAVEQDKNTQEVFAQVKQIYKTPPIKDFGGFNFSQILPDPSKPSKRSFIEDLLFNKVTLADAGFIKQYGDCLGDIAARDLICAQKFNGLTVLPPLLTDEMIAQYTSALLAGTITSGWTFGAGAALQIPFAMQMAYRFNGCGVTQNVLYENQKLIANQFNSAIGKIQDSLSSTASALGKLQDVVNQNAQALNTLVKQLSSNFGAISSVLNDILSRLDKVEAEVQIDRLITGRLQSLQTYVTQQLIRAAEIRASANLAATKMSECVLGQSKRVDFCGKGCHLMSFPQSAPHGVVFLHVTYVPAQEKNFTTAPAICHEGKAHFPREGVFVSNGTHWFITQRNFYEPQIITTDNTFVSGSCDVVIGIVNNTVYDPLQPELDSFKEELDKYFKNHTSPDVDLGDISGINASVVNIQKEIDRLNEVAKNLNESPIDLQELGKYEQYIKGGSGYIPEAPRDGQAYVRKDGEWVLLSTFL

SEQ ID NO: 6301 - protein, 1235 aa, Artificial Sequence
  SARS-CoV-2/pangolin/Guangxi/P5L/2017__EPI_ISL_410540 spike protein (1-1205)(I903C_Y1041C) Foldon construct
MFVFLFVLPLVSSQCVNLTTRTGIPPGYTNSSTRGVYYPDKVFRSSILHLTQDLFLPFFSNVTWFNTINYQGGFKKFDNPVLPFNDGVYFASTEKSNIIRGWIFGTTLDARTQSLLIVNNATNVVIKVCEFQFCTDPFLGVYYHNNNKTWVENEFRVYSSANNCTFEYISQPFLMDLEGKQGNFKNLREFVFKNVDGYFKIYSKHTPIDLVRDLPRGFAALEPLVDLPIGINITRFQTLLALHRSYLTPGKLESGWTTGAAAYYVGYLQQRTFLLSYNQNGTITDAVDCSLDPLSETKCTLKSLTVEKGIYQTSNFRVQPTISIVRFPNITNLCPFGEVFNASKFASVYAWNRKRISNCVADYSVLYNSTSFSTFKCYGVSPTKLNDLCFTNVYADSFVVKGDEVRQIAPGQTGVIADYNYKLPDDFTGCVIAWNSVKQDALTGGNYGYLYRLFRKSKLKPFERDISTEIYQAGSTPCNGQVGLNCYYPLERYGFHPTTGVNYQPFRVVVLSFELLNGPATVCGPKLSTTLVKDKCVNFNFNGLTGTGVLTTSKKQFLPFQQFGRDISDTTDAVRDPQTLEILDITPCSFGGVSVITPGTNTSNQVAVLYQDVNCTEVPMAIHAEQLTPAWRVYSAGANVFQTRAGCLVGAEHVNNSYECDIPVGAGICASYHSMSSFRSVNQRSIIAYTMSLGAENSVAYSNNSIAIPTNFTISVTTEILPVSMTKTSVDCTMYICGDSIECSNLLLQYGSFCTQLNRALTGIAVEQDKNTQEVFAQVKQIYKTPPIKDFGGFNFSQILPDPSKPSKRSFIEDLLFNKVTLADAGFIKQYGDCLGDIAARDLICAQKFNGLTVLPPLLTDEMIAQYTSALLAGTITSGWTFGAGAALQIPFAMQMAYRFNGCGVTQNVLYENQKLIANQFNSAIGKIQDSLSSTASALGKLQDVVNQNAQALNTLVKQLSSNFGAISSVLNDILSRLDKVEAEVQIDRLITGRLQSLQTYVTQQLIRAAEIRASANLAATKMSECVLGQSKRVDFCGKGCHLMSFPQSAPHGVVFLHVTYVPAQEKNFTTAPAICHEGKAHFPREGVFVSNGTHWFITQRNFYEPQIITTDNTFVSGSCDVVIGIVNNTVYDPLQPELDSFKEELDKYFKNHTSPDVDLGDISGINASVVNIQKEIDRLNEVAKNLNESLIDLQELGKYEQYIKGGSGYIPEAPRDGQAYVRKDGEWVLLSTFL

SEQ ID NO: 6302 - protein, 1235 aa, Artificial Sequence
  SARS-CoV-2/pangolin/Guangxi/P5E/2017__EPI_ISL_410541 spike protein (1-1205)(I903C_Y1041C) Foldon construct
MFVFLFVLPLVSSQCVNLTTRTGIPPGYTNSSTRGVYYPDKVFRSSILHLTQDLFLPFFSNVTWFNTITYQGGSKKFDNPVLPFNDGVYFASTEKSNIIRGWIFGTTLDARTQSLLIVNNATNVVIKVCEFQFCTDPFLGVYYHNNNKTWVENEFRVYSSANNCTFEYISQPFLMDLEGKQGNFKNLREFVFKNVDGYFKIYSKHTPIDLVRDLPRGFAALEPLVDLPIGINITRFQTLLALHRSYLTPGKLESGWTTGAAAYYVGYLQQRTFLLSYNQNGTITDAVDCSLDPLSETKCTLKSLTVEKGIYQTSNFRVQPTISIVRFPNITNLCPFGEVFNASKFASVYAWNRKRISNCVADYSVLYNSTSFSTFKCYGVSPTKLNDLCFTNVYADSFVVKGDEVRQIAPGQTGVIADYNYKLPDDFTGCVIAWNSVKQDALTGDNYGYLYRLFRKSKLKPFERDISTEIYQAGSTPCNGQVGLNCYYPLERYGFHPTTGVNYQPFRVVVLSFELLNGPATVCGPKLSTTLVKDKCVNFNFNGLTGTGVLTTSKKQFLPFQQFGRDISDTTDAVRDPQTLEILDITPCSFGGVSVITPGTNTSNQVAVLYQDVNCTEVPMAIHAEQLTPAWRVYSAGANVFQTRAGCLVGAEHVNNSYECDIPVGAGICASYHSMSSFRSVNQRSIIAYTMSLGAENSVAYSNNSIAIPTNFTISVTTEILPVSMTKTSVDCTMYICGDSIECSNLLLQYGSFCTQLNRALTGIAVEQDKNTQEVFAQVKQIYKTPPIKDFGGFNFSQILPDPSKPSKRSFIEDLLFNKVTLADAGFIKQYGDCLGDIAARDLICAQKFNGLTVLPPLLTDEMIAQYTSALLAGTITSGWTFGAGAALQIPFAMQMAYRFNGCGVTQNVLYENQKLIANQFNSAIGKIQDSLSSTASALGKLQDVVNQNAQALNTLVKQLSSNFGAISSVLNDILSRLDKVEAEVQIDRLITGRLQSLQTYVTQQLIRAAEIRASANLAATKMSECVLGQSKRVDFCGKGCHLMSFPQSAPHGVVFLHVTYVPAQEKNFTTAPAICHEGKAHFPREGVFVSNGTHWFITQRNFYEPQIITTDNTFVSGSCDVVIGIVNNTVYDPLQPELDSFKEELDKYFKNHTSPDVDLGDISGINASVVNIQKEIDRLNEVAKNLNESLIDLQELGKYEQYIKGGSGYIPEAPRDGQAYVRKDGEWVLLSTFL

SEQ ID NO: 6303 - protein, 1233 aa, Artificial Sequence
  SARS-CoV-2/pangolin/Guangxi/P1E/2017__EPI_ISL_410539 spike protein (1-1203)(I901C_Y1039C) Foldon construct
MFVFLFVLPLVSSQCVNLTTRTGIQPGYTNSSTRGVYYPDKVFRSSILHLTQDLFLPFFSNVTWFNTINYQGGFKKFDNPVLPFNDGVYFASTEKSNIIRGWIFGTTLDARTQSLLIVNNATNVVIKVCEFQFCTDPFLGVYYHNNNKTWVENEFRVYSSANNCTFEYISQPFLMDLEGKQGNFKNLREFVFKNVDGYFKIYSKHTPIDLVRDLPRGFAALEPLVDLPIGINITRFQTLLALHRSYLTPGKLESGWTTGAAAYYVGYLQQRTFLLSYNQNGTITDAVDCSLDPLSETKCTLKSLTVEKGIYQTSNFRVQPTISIVRFPNITNLCPFGEVFNASKFASVYAWNRKRISNCVADYSVLYNSTSFSTFKCYGVSPTKLNDLCFTNVYADSFVVKGDEVRQIAPGQTGVIADYNYKLPDDFTGCVIAWNSVKQDALTGGNYLYRLFRKSKLKPFERDISTEIYQAGSTPCNGQVGLNCYYPLERYGFHPTTGVNYQPFRVVVLSFELLNGPATVCGPKLSTTLVKDKCVNFNFNGLTGTGVLTTSKKQFLPFQQFGRDISDTTDAVRDPQTLEILDITPCSFGGVSVITPGTNTSNQVAVLYQDVNCTEVPMAIHAEQLTPAWRVYSAGANVFQTRAGCLVGAEHVNNSYECDIPVGAGICASYHSMSSLRSVNQRSIIAYTMSLGAENSVAYSNNSIAIPTNFTISVTTEILPVSMTKTSVDCTMYICGDSIECSNLLLQYGSFCTQLNRALTGIAVEQDKNTQEVFAQVKQIYKTPPIKDFGGFNFSQILPDPSKPSKRSFIEDLLFNKVTLADAGFIKQYGDCLGDIAARDLICAQKFNGLTVLPPLLTDEMIAQYTSALLAGTITSGWTFGAGAALQIPFAMQMAYRFNGCGVTQNVLYENQKLIANQFNSAIGKIQDSLSSTASALGKLQDVVNQNAQALNTLVKQLSSNFGAISSVLNDILSRLDKVEAEVQIDRLITGRLQSLQTYVTQQLIRAAEIRASANLAATKMSECVLGQSKRVDFCGKGCHLMSFPQSAPHGVVFLHVTYVPAQEKNFTTAPAICHEGKAHFPREGVFVSNGTHWFITQRNFYEPQIITTDNTFVSGSCDVVIGIVNNTVYDPLQPELDSFKEELDKYFKNHTSPDVDLGDISGINASVVNIQKEIDRLNEVAKNLNESLIDLQELGKYEQYIKGGSGYIPEAPRDGQAYVRKDGEWVLLSTFL

SEQ ID NO: 6304 - protein, 1241 aa, Artificial Sequence
  SARS-CoV-2/Wuhan/WIV05/2019__EPI_ISL_402128 spike protein (1-1211)(Q965C_S1003C) Foldon construct
MFVFLVLLPLVSSQCVNLTTRTQLPPAYTNSFTRGVYYPDKVFRSSVLHSTQDLFLPFFSNVTWFHAIHVSGTNGTKRFDNPVLPFNDGVYFASTEKSNIIRGWIFGTTLDSKTQSLLIVNNATNVVIKVCEFQFCNDPFLGVYYHKNNKSWMESEFRVYSSANNCTFEYVSQPFLMDLEGKQGNFKNLREFVFKNIDGYFKIYSKHTPINLVRDLPQGFSALEPLVDLPIGINITRFQTLLALHRSYLTPGDSSSGWTAGAAAYYVGYLQPRTFLLKYNENGTITDAVDCALDPLSETKCTLKSFTVEKGIYQTSNFRVQPTESIVRFPNITNLCPFGEVFNATRFASVYAWNRKRISNCVADYSVLYNSASFSTFKCYGVSPTKLNDLCFTNVYADSFVIRGDEVRQIAPGQTGKIADYNYKLPDDFTGCVIAWNSNNLDSKVGGNYNYLYRLFRKSNLKPFERDISTEIYQAGSTPCNGVEGFNCYFPLQSYGFQPTNGVGYQPYRVVVLSFELLHAPATVCGPKKSTNLVKNKCVNFNFNGLTGTGVLTESNKKFLPFQQFGRDIADTTDAVRDPQTLEILDITPCSFGGVSVITPGTNTSNQVAVLYQDVNCTEVPVAIHADQLTPTWRVYSTGSNVFQTRAGCLIGAEHVNNSYECDIPIGAGICASYQTQTNSPRRARSVASQSIIAYTMSLGAENSVAYSNNSIAIPTNFTISVTTEILPVSMTKTSVDCTMYICGDSTECSNLLLQYGSFCTQLNRALTGIAVEQDKNTQEVFAQVKQIYKTPPIKDFGGFNFSQILPDPSKPSKRSFIEDLLFNKVTLADAGFIKQYGDCLGDIAARDLICAQKFNGLTVLPPLLTDEMIAQYTSALLAGTITSGWTFGAGAALQIPFAMQMAYRFNGIGVTQNVLYENQKLIANQFNSAIGKIQDSLSSTASALGKLQDVVNQNAQALNTLVKCLSSNFGAISSVLNDILSRLDKVEAEVQIDRLITGRLQCLQTYVTQQLIRAAEIRASANLAATKMSECVLGQSKRVDFCGKGYHLMSFPQSAPHGVVFLHVTYVPAQEKNFTTAPAICHDGKAHFPREGVFVSNGTHWFVTQRNFYEPQIITTDNTFVSGNCDVVIGIVNNTVYDPLQPELDSFKEELDKYFKNHTSPDVDLGDISGINASVVNIQKEIDRLNEVAKNLNESLIDLQELGKYEQYIKGGSGYIPEAPRDGQAYVRKDGEWVLLSTFL

SEQ ID NO: 6305 - protein, 1237 aa, Artificial Sequence
  SARS-CoV-2/bat/Yunnan/RaTG13/2013__EPI_ISL_402131 spike protein (1-1207)(Q961C_S999C) Foldon construct
MFVFLVLLPLVSSQCVNLTTRTQLPPAYTNSSTRGVYYPDKVFRSSVLHLTQDLFLPFFSNVTWFHAIHVSGTNGIKRFDNPVLPFNDGVYFASTEKSNIIRGWIFGTTLDSKTQSLLIVNNATNVVIKVCEFQFCNDPFLGVYYHKNNKSWMESEFRVYSSANNCTFEYVSQPFLMDLEGKQGNFKNLREFVFKNIDGYFKIYSKHTPINLVRDLPPGFSALEPLVDLPIGINITRFQTLLALHRSYLTPGDSSSGWTAGAAAYYVGYLQPRTFLLKYNENGTITDAVDCALDPLSETKCTLKSFTVEKGIYQTSNFRVQPTDSIVRFPNITNLCPFGEVFNATTFASVYAWNRKRISNCVADYSVLYNSTSFSTFKCYGVSPTKLNDLCFTNVYADSFVITGDEVRQIAPGQTGKIADYNYKLPDDFTGCVIAWNSKHIDAKEGGNFNYLYRLFRKANLKPFERDISTEIYQAGSKPCNGQTGLNCYYPLYRYGFYPTDGVGHQPYRVVVLSFELLNAPATVCGPKKSTNLVKNKCVNFNFNGLTGTGVLTESNKKFLPFQQFGRDIADTTDAVRDPQTLEILDITPCSFGGVSVITPGTNASNQVAVLYQDVNCTEVPVAIHADQLTPTWRVYSTGSNVFQTRAGCLIGAEHVNNSYECDIPIGAGICASYQTQTNSRSVASQSIIAYTMSLGAENSVAYSNNSIAIPTNFTISVTTEILPVSMTKTSVDCTMYICGDSTECSNLLLQYGSFCTQLNRALTGIAVEQDKNTQEVFAQVKQIYKTPPIKDFGGFNFSQILPDPSKPSKRSFIEDLLFNKVTLADAGFIKQYGDCLGDIAARDLICAQKFNGLTVLPPLLTDEMIAQYTSALLAGTITSGWTFGAGAALQIPFAMQMAYRFNGIGVTQNVLYENQKLIANQFNSAIGKIQDSLSSTASALGKLQDVVNQNAQALNTLVKCLSSNFGAISSVLNDILSRLDKVEAEVQIDRLITGRLQCLQTYVTQQLIRAAEIRASANLAATKMSECVLGQSKRVDFCGKGYHLMSFPQSAPHGVVFLHVTYVPAQEKNFTTAPAICHDGKAHFPREGVFVSNGTHWFVTQRNFYEPQIITTDNTFVSGSCDVVIGIVNNTVYDPLQPELDSFKEELDKYFKNHTSPDVDLGDISGINASVVNIQKEIDRLNEVAKNLNESLIDLQELGKYEQYIKGGSGYIPEAPRDGQAYVRKDGEWVLLSTFL

SEQ ID NO: 6306 - protein, 1241 aa, Artificial Sequence
  SARS-CoV-2/Wuhan/HBCDC-HB-01/2019__EPI_ISL_402132 spike protein (1-1211)(Q965C_S1003C) Foldon construct
MFVFLVLLPLVSSQCVNLTTRTQLPPAYTNSITRGVYYPDKVFRSSVLHSTQDLFLPFFSNVTWFHAIHVSGTNGTKRFDNPVLPFNDGVYFASTEKSNIIRGWIFGTTLDSKTQSLLIVNNATNVVIKVCEFQFCNDPFLGVYYHKNNKSWMESEFRVYSSANNCTFEYVSQPFLMDLEGKQGNFKNLREFVFKNIDGYFKIYSKHTPINLVRDLPQGFSALEPLVDLPIGINITRFQTLLALHRSYLTPGDSSSGWTAGAAAYYVGYLQPRTFLLKYNENGTITDAVDCALDPLSETKCTLKSFTVEKGIYQTSNFRVQPTESIVRFPNITNLCPFGEVFNATRFASVYAWNRKRISNCVADYSVLYNSASFSTFKCYGVSPTKLNDLCFTNVYADSFVIRGDEVRQIAPGQTGKIADYNYKLPDDFTGCVIAWNSNNLDSKVGGNYNYLYRLFRKSNLKPFERDISTEIYQAGSTPCNGVEGFNCYFPLQSYGFQPTNGVGYQPYRVVVLSFELLHAPATVCGPKKSTNLVKNKCVNFNFNGLTGTGVLTESNKKFLPFQQFGRDIADTTDAVRDPQTLEILDITPCSFGGVSVITPGTNTSNQVAVLYQDVNCTEVPVAIHADQLTPTWRVYSTGSNVFQTRAGCLIGAEHVNNSYECDIPIGAGICASYQTQTNSPRRARSVASQSIIAYTMSLGAENSVAYSNNSIAIPTNFTISVTTEILPVSMTKTSVDCTMYICGDSTECSNLLLQYGSFCTQLNRALTGIAVEQDKNTQEVFAQVKQIYKTPPIKDFGGFNFSQILPDPSKPSKRSFIEDLLFNKVTLADAGFIKQYGDCLGDIAARDLICAQKFNGLTVLPPLLTDEMIAQYTSALLAGTITSGWTFGAGAALQIPFAMQMAYRFNGIGVTQNVLYENQKLIANQFNSAIGKIQDSLSSTASALGKLQDVVNQNAQALNTLVKCLSSNFGAISSVLNDILSRLDKVEAEVQIDRLITGRLQCLQTYVTQQLIRAAEIRASANLAATKMSECVLGQSKRVDFCGKGYHLMSFPQSAPHGVVFLHVTYVPAQEKNFTTAPAICHDGKAHFPREGVFVSNGTHWFVTQRNFYEPQIITTDNTFVSGNCDVVIGIVNNTVYDPLQPELDSFKEELDKYFKNHTSPDVDLGDISGINASVVNIQKEIDRLNEVAKNLNESLIDLQELGKYEQYIKGGSGYIPEAPRDGQAYVRKDGEWVLLSTFL

SEQ ID NO: 6307 - protein, 1241 aa, Artificial Sequence
  SARS-CoV-2/Guangdong/20SF028/2020__EPI_ISL_403936 spike protein (1-1211)(Q965C_S1003C) Foldon construct
MFVFLVLLPLVSSQCVNLTTRTQLPPAYTNSFTRGVYYPDKVFRSSVLYSTQDLFLPFFSNVTWFHAIHVSGTNGTKRFDNPVLPFNDGVYFASTEKSNIIRGWIFGTTLDSKTQSLLIVNNATNVVIKVCEFQFCNDPFLGVYYHKNNKSWMESEFRVYSSANNCTFEYVSQPFLMDLEGKQGNFKNLREFVFKNIDGYFKIYSKHTPINLVRDLPQGFSALEPLVDLPIGINITRFQTLLALHRSYLTPGDSSSGWTAGAAAYYVGYLQPRTFLLKYNENGTITDAVDCALDPLSETKCTLKSFTVEKGIYQTSNFRVQPTESIVRFPNITNLCPFGEVFNATRFASVYAWNRKRISNCVADYSVLYNSASFSTFKCYGVSPTKLNDLCFTNVYADSFVIRGDEVRQIAPGQTGKIADYNYKLPDDFTGCVIAWNSNNLDSKVGGNYNYLYRLFRKSNLKPFERDISTEIYQAGSTPCNGVEGFNCYFPLQSYGFQPTNGVGYQPYRVVVLSFELLHAPATVCGPKKSTNLVKNKCVNFNFNGLTGTGVLTESNKKFLPFQQFGRDIADTTDAVRDPQTLEILDITPCSFGGVSVITPGTNTSNQVAVLYQDVNCTEVPVAIHADQLTPTWRVYSTGSNVFQTRAGCLIGAEHVNNSYECDIPIGAGICASYQTQTNSPRRARSVASQSIIAYTMSLGAENSVAYSNNSIAIPTNFTISVTTEILPVSMTKTSVDCTMYICGDSTECSNLLLQYGSFCTQLNRALTGIAVEQDKNTQEVFAQVKQIYKTPPIKDFGGFNFSQILPDPSKPSKRSFIEDLLFNKVTLADAGFIKQYGDCLGDIAARDLICAQKFNGLTVLPPLLTDEMIAQYTSALLAGTITSGWTFGAGAALQIPFAMQMAYRFNGIGVTQNVLYENQKLIANQFNSAIGKIQDSLSSTASALGKLQDVVNQNAQALNTLVKCLSSNFGAISSVLNDILSRLDKVEAEVQIDRLITGRLQCLQTYVTQQLIRAAEIRASANLAATKMSECVLGQSKRVDFCGKGYHLMSFPQSAPHGVVFLHVTYVPAQEKNFTTAPAICHDGKAHFPREGVFVSNGTHWFVTQRNFYEPQIITTDNTFVSGNCDVVIGIVNNTVYDPLQPELDSFKEELDKYFKNHTSPDVDLGDISGINASVVNIQKEIDRLNEVAKNLNESLIDLQELGKYEQYIKGGSGYIPEAPRDGQAYVRKDGEWVLLSTFL

SEQ ID NO: 6308 - protein, 1241 aa, Artificial Sequence
  SARS-CoV-2/Shenzhen/SZTH-001/2020__EPI_ISL_406592 spike protein (1-1211)(Q965C_S1003C) Foldon construct
MFVFLVLLPLVSSQCVNLTTRTQLPPAYTNSFTRGVYYPDKVFRSSVLHSTQDLFLPFFSNVTWFHAIHVSGTNGTKRFDNPVLPFNDGVYFASTEKSNIIRGWIFGTTLDSKTQSLLIVNNATNVVIKVCEFQFCNDPFLGVYYHKNNKSWMESEFRVYSSANNCTFEYVSQPFLMDLEGKQGNFKNLREFVFKNIDGYFKIYSKHTPINLVRDLPQGFSALEPLVDLPIGINITRFQTLLALHRSYLTPGDSSSGWTAGAAAYYVGYLQPRTFLLKYNENGTITDAVDCALDPLSETKCTLKSFTVEKGIYQTSNFRVQPTESIVRFPNITNLCPFGEVFNATRFASVYAWNRKRISNCVADYSVLYNSASFSTFKCYGVSPTKLNDLCFTNVYADSFVIRGDEVRQIAPGQTGKIADYNYKLPDDFTGCVIAWNSNNLDSKVGGNYNYLYRLFRKSNLKPFERDISTEIYQAGSTPCNGVEGFNCYFPLQSYGFQPTNGVGYQPYRVVVLSFELLHAPATVCGPKKSTNLVKNKCVNFNFNGLTGTGVLTESNKKFLPFQQFGRDIADTTDAVRDPQTLEILDITPCSFGGVSVITPGTNTSNQVAVLYQDVNCTEVPVAIHADQLTPTWRVYSTGSNVFQTRAGCLIGAEHVNNSYECDIPIGAGICASYQTQTNSPRRARSVASQSIIAYTMSLGAENSVAYSNNSIAIPTNFTISVTTEILPVSMTKTSVDCTMYICGDSTECSNLLLQYGSFCTQLNRALTGIAVEQDKNTQEVFAQVKQIYKTPPIKDFGGFNFSQILPDPSKPSKRSFIEDLLFNKVTLADAGFIKQYGDCLGDIAARDLICAQKFNGLTVLPPLLTDEMIAQYTSALLAGTITSGWTFGAGAALQIPFAMQMAYRFNGIGVTQNVLYENQKLIANQFNSAIGKIQDSLSSTASALGKLQDVVNQNAQALNTLVKCLSSNFGAISSVLNDILSRLDKVEAEVQIDRLITGRLQCLQTYVTQQLIRAAEIRASANLAATKMSECVLGQSKRVDFCGKGYHLMSFPQSAPHGVVFLHVTYVPAQEKNFTTAPAICHDGKAHFPREGVFVSNGTHWFVTQRNFYEPQIITTDNTFVSGNCDVLIGIVNNTVYDPLQPELDSFKEELDKYFKNHTSPDVDLGDISGINASVVNIQKEIDRLNEVAKNLNESLIDLQELGKYEQYIKGGSGYIPEAPRDGQAYVRKDGEWVLLSTFL

SEQ ID NO: 6309 - protein, 1241 aa, Artificial Sequence
  SARS-CoV-2/Shenzhen/SZTH-004/2020__EPI_ISL_406595 spike protein (1-1211)(Q965C_S1003C) Foldon construct
MFVFLVLLPLVSSQCVNLTTRTQLPPAYTNSFTRGVYYPDKVFRSSVLHSTQDLFLPFFSNVTWFHAIHVSGTNGTKRFDNPVLPFNDGVYFASTEKSNIIRGWIFGTTLDSKTQSLLIVNNATNVVIKVCEFQFCNDPFLGVYYHKNNKSWMESEFRVYSSANNCTFEYVSQPFLMDLEGKQGNFKNLREFVFKNIDGYFKIYSKHTPINLVRDLPQGFSALEPLVDLPIGINITRFQTLLALHRSYLTPGDSSSGWTAGAAAYYVGYLQPRTFLLKYNENGTITDAVDCALDPLSETKCTLKSFTVEKGIYQTSNFRVQPTESIVRFPNITNLCPFGEVFNATRFASVYAWDRKRISNCVAYYSVLYNSASFSTFKCYGVSPTKLNDLCFTNVYADSFVIRGDEVRQIAPGQTGKIADYNYKLPDDFTGCVIAWNSNNLDSKVGGNYNYLYRLFRKSNLKPFERDISTEIYQAGSTPCNGVEGFNCYFPLQSYGFQPTNGVGYQPYRVVVLSFELLHAPATVCGPKKSTNLVKNKCVNFNFNGLTGTGVLTESNKKFLPFQQFGRDIADTTDAVRDPQTLEILDITPCSFGGVSVITPGTNTSNQVAVLYQDVNCTEVPVAIHADQLTPTWRVYSTGSNVFQTRAGCLIGAEHVNNSYECDIPIGAGICASYQTQTNSPRRARSVASQSIIAYTMSLGAENSVAYSNNSIAIPTNFTISVTTEILPVSMTKTSVDCTMYICGDSTECSNLLLQYGSFCTQLNRALTGIAVEQDKNTQEVFAQVKQIYKTPPIKDFGGFNFSQILPDPSKPSKRSFIEDLLFNKVTLADAGFIKQYGDCLGDIAARDLICAQKFNGLTVLPPLLTDEMIAQYTSALLAGTITSGWTFGAGAALQIPFAMQMAYRFNGIGVTQNVLYENQKLIANQFNSAIGKIQDSLSSTASALGKLQDVVNQNAQALNTLVKCLSSNFGAISSVLNDILSRLDKVEAEVQIDRLITGRLQCLQTYVTQQLIRAAEIRASANLAATKMSECVLGQSKRVDFCGKGYHLMSFPQSAPHGVVFLHVTYVPAQEKNFTTAPAICHDGKAHFPREGVFVSNGTHWFVTQRNFYEPQIITTDNTFVSGNCDVVIGIVNNTVYDPLQPELDSFKEELDKYFKNHTSPDVDLGDISGINASVVNIQKEIDRLNEVAKNLNESLIDLQELGKYEQYIKGGSGYIPEAPRDGQAYVRKDGEWVLLSTFL

SEQ ID NO: 6310 - protein, 1241 aa, Artificial Sequence
  SARS-CoV-2/France/IDF0372/2020__EPI_ISL_406596 spike protein (1-1211)(Q965C_S1003C) Foldon construct
MFVFLVLLPLVSSQCVNLTTRTQLPPAYTNSFTRGVYYPDKVFRSSVLHSTQDLFLPFFSNVTWFHAIHVSGTNGTKRFDNPVLPFNDGVYFASTEKSNIIRGWIFGTTLDSKTQSLLIVNNATNVVIKVCEFQFCNDPFLGVYYHKNNKSWMESEFRVYSSANNCTFEYVSQPFLMDLEGKQGNFKNLREFVFKNIDGYFKIYSKHTPINLVRDLPQGFSALEPLVDLPIGINITRFQTLLALHRSYLTPGDSSSGWTAGAAAYYVGYLQPRTFLLKYNENGTITDAVDCALDPLSETKCTLKSFTVEKGIYQTSNFRVQPTESIVRFPNITNLCPFGEVFNATRFASVYAWNRKRISNCVADYSFLYNSASFSTFKCYGVSPTKLNDLCFTNVYADSFVIRGDEVRQIAPGQTGKIADYNYKLPDDFTGCVIAWNSNNLDSKVGGNYNYLYRLFRKSNLKPFERDISTEIYQAGSTPCNGVEGFNCYFPLQSYGFQPTNGVGYQPYRVVVLSFELLHAPATVCGPKKSTNLVKNKCVNFNFNGLTGTGVLTESNKKFLPFQQFGRDIADTTDAVRDPQTLEILDITPCSFGGVSVITPGTNTSNQVAVLYQDVNCTEVPVAIHADQLTPTWRVYSTGSNVFQTRAGCLIGAEHVNNSYECDIPIGAGICASYQTQTNSPRRARSVASQSIIAYTMSLGAENSVAYSNNSIAIPTNFTISVTTEILPVSMTKTSVDCTMYICGDSTECSNLLLQYGSFCTQLNRALTGIAVEQDKNTQEVFAQVKQIYKTPPIKDFGGFNFSQILPDPSKPSKRSFIEDLLFNKVTLADAGFIKQYGDCLGDIAARDLICAQKFNGLTVLPPLLTDEMIAQYTSALLAGTITSGWTFGAGAALQIPFAMQMAYRFNGIGVTQNVLYENQKLIANQFNSAIGKIQDSLSSTASALGKLQDVVNQNAQALNTLVKCLSSNFGAISSVLNDILSRLDKVEAEVQIDRLITGRLQCLQTYVTQQLIRAAEIRASANLAATKMSECVLGQSKRVDFCGKGYHLMSFPQSAPHGVVFLHVTYVPAQEKNFTTAPAICHDGKAHFPREGVFVSNGTHWFVTQRNFYEPQIITTDNTFVSGNCDVVIGIVNNTVYDPLQPELDSFKEELDKYFKNHTSPDVDLGDISGINASVVNIQKEIDRLNEVAKNLNESLIDLQELGKYEQYIKGGSGYIPEAPRDGQAYVRKDGEWVLLSTFL

SEQ ID NO: 6311 - protein, 1241 aa, Artificial Sequence
  SARS-CoV-2/Australia/VIC01/2020__EPI_ISL_406844 spike protein (1-1211)(Q965C_S1003C) Foldon construct
MFVFLVLLPLVSSQCVNLTTRTQLPPAYTNSFTRGVYYPDKVFRSSVLHSTQDLFLPFFSNVTWFHAIHVSGTNGTKRFDNPVLPFNDGVYFASTEKSNIIRGWIFGTTLDSKTQSLLIVNNATNVVIKVCEFQFCNDPFLGVYYHKNNKSWMESEFRVYSSANNCTFEYVSQPFLMDLEGKQGNFKNLREFVFKNIDGYFKIYSKHTPINLVRDLPQGFSALEPLVDLPIGINITRFQTLLALHRRYLTPGDSSSGWTAGAAAYYVGYLQPRTFLLKYNENGTITDAVDCALDPLSETKCTLKSFTVEKGIYQTSNFRVQPTESIVRFPNITNLCPFGEVFNATRFASVYAWNRKRISNCVADYSVLYNSASFSTFKCYGVSPTKLNDLCFTNVYADSFVIRGDEVRQIAPGQTGKIADYNYKLPDDFTGCVIAWNSNNLDSKVGGNYNYLYRLFRKSNLKPFERDISTEIYQAGSTPCNGVEGFNCYFPLQSYGFQPTNGVGYQPYRVVVLSFELLHAPATVCGPKKSTNLVKNKCVNFNFNGLTGTGVLTESNKKFLPFQQFGRDIADTTDAVRDPQTLEILDITPCSFGGVSVITPGTNTSNQVAVLYQDVNCTEVPVAIHADQLTPTWRVYSTGSNVFQTRAGCLIGAEHVNNSYECDIPIGAGICASYQTQTNSPRRARSVASQSIIAYTMSLGAENSVAYSNNSIAIPTNFTISVTTEILPVSMTKTSVDCTMYICGDSTECSNLLLQYGSFCTQLNRALTGIAVEQDKNTQEVFAQVKQIYKTPPIKDFGGFNFSQILPDPSKPSKRSFIEDLLFNKVTLADAGFIKQYGDCLGDIAARDLICAQKFNGLTVLPPLLTDEMIAQYTSALLAGTITSGWTFGAGAALQIPFAMQMAYRFNGIGVTQNVLYENQKLIANQFNSAIGKIQDSLSSTASALGKLQDVVNQNAQALNTLVKCLSSNFGAISSVLNDILSRLDKVEAEVQIDRLITGRLQCLQTYVTQQLIRAAEIRASANLAATKMSECVLGQSKRVDFCGKGYHLMSFPQSAPHGVVFLHVTYVPAQEKNFTTAPAICHDGKAHFPREGVFVSNGTHWFVTQRNFYEPQIITTDNTFVSGNCDVVIGIVNNTVYDPLQPELDSFKEELDKYFKNHTSPDVDLGDISGINASVVNIQKEIDRLNEVAKNLNESLIDLQELGKYEQYIKGGSGYIPEAPRDGQAYVRKDGEWVLLSTFL

SEQ ID NO: 6312 - protein, 1241 aa, Artificial Sequence
  SARS-CoV-2/Germany/BavPat1/2020__EPI_ISL_406862 spike protein (1-1211)(Q965C_S1003C) Foldon construct
MFVFLVLLPLVSSQCVNLTTRTQLPPAYTNSFTRGVYYPDKVFRSSVLHSTQDLFLPFFSNVTWFHAIHVSGTNGTKRFDNPVLPFNDGVYFASTEKSNIIRGWIFGTTLDSKTQSLLIVNNATNVVIKVCEFQFCNDPFLGVYYHKNNKSWMESEFRVYSSANNCTFEYVSQPFLMDLEGKQGNFKNLREFVFKNIDGYFKIYSKHTPINLVRDLPQGFSALEPLVDLPIGINITRFQTLLALHRSYLTPGDSSSGWTAGAAAYYVGYLQPRTFLLKYNENGTITDAVDCALDPLSETKCTLKSFTVEKGIYQTSNFRVQPTESIVRFPNITNLCPFGEVFNATRFASVYAWNRKRISNCVADYSVLYNSASFSTFKCYGVSPTKLNDLCFTNVYADSFVIRGDEVRQIAPGQTGKIADYNYKLPDDFTGCVIAWNSNNLDSKVGGNYNYLYRLFRKSNLKPFERDISTEIYQAGSTPCNGVEGFNCYFPLQSYGFQPTNGVGYQPYRVVVLSFELLHAPATVCGPKKSTNLVKNKCVNFNFNGLTGTGVLTESNKKFLPFQQFGRDIADTTDAVRDPQTLEILDITPCSFGGVSVITPGTNTSNQVAVLYQGVNCTEVPVAIHADQLTPTWRVYSTGSNVFQTRAGCLIGAEHVNNSYECDIPIGAGICASYQTQTNSPRRARSVASQSIIAYTMSLGAENSVAYSNNSIAIPTNFTISVTTEILPVSMTKTSVDCTMYICGDSTECSNLLLQYGSFCTQLNRALTGIAVEQDKNTQEVFAQVKQIYKTPPIKDFGGFNFSQILPDPSKPSKRSFIEDLLFNKVTLADAGFIKQYGDCLGDIAARDLICAQKFNGLTVLPPLLTDEMIAQYTSALLAGTITSGWTFGAGAALQIPFAMQMAYRFNGIGVTQNVLYENQKLIANQFNSAIGKIQDSLSSTASALGKLQDVVNQNAQALNTLVKCLSSNFGAISSVLNDILSRLDKVEAEVQIDRLITGRLQCLQTYVTQQLIRAAEIRASANLAATKMSECVLGQSKRVDFCGKGYHLMSFPQSAPHGVVFLHVTYVPAQEKNFTTAPAICHDGKAHFPREGVFVSNGTHWFVTQRNFYEPQIITTDNTFVSGNCDVVIGIVNNTVYDPLQPELDSFKEELDKYFKNHTSPDVDLGDISGINASVVNIQKEIDRLNEVAKNLNESLIDLQELGKYEQYIKGGSGYIPEAPRDGQAYVRKDGEWVLLSTFL

SEQ ID NO: 6313 - protein, 1241 aa, Artificial Sequence
  SARS-CoV-2/Wuhan/HBCDC-HB-02/2020__EPI_ISL_412978 spike protein (1-1211)(Q965C_S1003C) Foldon construct
MFVFLVLLPLVSSQCVNLTTRTQLPPAYTNSFTRGVYYPDKVFRSSVLHSTQDLFLPFFSNVTWFHAIHVSGTNGTKRFDNPVLPFNDGVYFASTEKSNIIRGWIFGTTLDSKTQSLLIVNNATNVVIKVCEFQFCNDPFLGVYYHKNNKSWMESEFRVYSSANNCTFEYVSQPFLMDLEGKQGNFKNLREFVFKNIDGYFKIYSKHTPINLVRDLPQGFSALEPLVDLPIGINITRFQTLLALHRSYLTPGDSSSGWTAGAAAYYVGYLQPRTFLLKYNENGTITDAVDCALDPLSETKCTLKSFTVEKGIYQTSNFRVQPTESIVRFPNITNLCPFGEVFNATRFASVYAWNRKRISNCVADYSVLYNSASFSTFKCYGVSPTKLNDLCFTNVYADSFVIRGDEVRQIAPGQTGKIADYNYKLPDDFTGCVIAWNSNNLDSKVGGNYNYLYRLFRKSNLKPFERDISTEIYQAGSTPCNGVEGFNCYFPLQSYGFQPTNGVGYQPYRVVVLSFELLHAPATVCGPKKSTNLVKNKCVNFNFNGLTGTGVLTESNKKFLPFQQFGRDIADTTDAVRDPQTLEILDITPCSFGGVSVITPGTNTSNQVAVLYQDVNCTEVPVAIHADQLTPTWRVYSTGSNVFQTRAGCLIGAEHVNNSYECDIPIGAGICASYQTQTNSPRRARSVASQSIIAYTMSLGAENSVAYSNNSIAIPTNFTISVTTEILPVSMTKTSVDCTMYICGDSTECSNFLLQYGSFCTQLNRALTGIAVEQDKNTQEVFAQVKQIYKTPPIKDFGGFNFSQILPDPSKPSKRSFIEDLLFNKVTLADAGFIKQYGDCLGDIAARDLICAQKFNGLTVLPPLLTDEMIAQYTSALLAGTITSGWTFGAGAALQIPFAMQMAYRFNGIGVTQNVLYENQKLIANQFNSAIGKIQDSLSSTASALGKLQDVVNQNAQALNTLVKCLSSNFGAISSVLNDILSRLDKVEAEVQIDRLITGRLQCLQTYVTQQLIRAAEIRASANLAATKMSECVLGQSKRVDFCGKGYHLMSFPQSAPHGVVFLHVTYVPAQEKNFTTAPAICHDGKAHFPREGVFVSNGTHWFVTQRNFYEPQIITTDNTFVSGNCDVVIGIVNNTVYDPLQPELDSFKEELDKYFKNHTSPDVDLGDISGINASVVNIQKEIDRLNEVAKNLNESLIDLQELGKYEQYIKGGSGYIPEAPRDGQAYVRKDGEWVLLSTFL

SEQ ID NO: 6314 - protein, 1241 aa, Artificial Sequence
  SARS-CoV-2/Australia/QLD02/2020__EPI_ISL_407896 spike protein (1-1211)(Q965C_S1003C) Foldon construct
MFVFLVLLPLVSSQCVNLTTRTQLPPAYTNSFTRGVYYPDKVFRSSVLHSTQDLFLPFFSNVTWFHAIHVSGTNGTKRFDNPVLPFNDGVYFASTEKSNIIRGWIFGTTLDSKTQSLLIVNNATNVVIKVCEFQFCNDPFLGVYYHKNNKSWMESEFRVYSSANNCTFEYVSQPFLMDLEGKQGNFKNLREFVFKNIDGYFKIYSKHTPINLVRDLPQGFSALEPLVDLPIGINITRFQTLLALHRSYLTPGDSSSGWTAGAAAYYVGYLQPRTFLLKYNENGTITDAVDCALDPLSETKCTLKSFTVEKGIYQTSNFRVQPTESIVRFPNITNLCPFGEVFNATRFASVYAWNRKRISNCVADYSVLYNSASFSTFKCYGVSPTKLNDLCFTNVYADSFVIRGDEVRQIAPGQTGKIADYNYKLPDDFTGCVIAWNSNNLDSKVGGNYNYLYRLFRKSNLKPFERDISTEIYQAGSTPCNGVEGFNCYFPLQSYGFQPTNGVGYQPYRVVVLSFELLHAPATVCGPKKSTNLVKNKCVNFNFNGLTGTGVLTESNKKFLPFQQFGRDIADTTDAVRDPQTLEILDITPCSFGGVSVITPGTNTSNQVAVLYQDVNCTEVPVAIHADQLTPTWRVYSTGSNVFQTRAGCLIGAEHVNNSYECDIPIGAGICASYQTQTNSPRRARSVASQSIIAYTMSLGAENSVAYSNNSIAIPTNFTISVTTEILPVSMTKTSVDCTMYICGDSTECSNLLLQYGSFCTQLNRALTGIAVEQDKNTQEVFAQVKQIYKTPPIKDFGGFNFSQILPDPSKPSKRSFIEDLLFNKVTLADAGFIKQYGDCLGDIAARDLICAQKFNGLTVLPPLLTDEMIAQYTSALLAGTITSGWTFGAGAALQIPFAMQMAYRFNGIGVTQNVLYENQKLIANQFNSAIGKIQDSLSSTASALGKLQDVVNQNAQALNTLVKCLSSNFGAISSVLNDILSRLDKVEAEVQIDRLITGRLQCLQTYVTQQLIRAAEIRASANLAATKMSECVLGQSKRVDFCGKGYHLMSFPQSAPHGVVFLHVTYVPAQEKNFTTAPAICHDGKAHFPREGVFVSNGTHWFVTQRNFYEPQIITTDNTFVSGNCDVVIGIVNNTVYDPLQLELDSFKEELDKYFKNHTSPDVDLGDISGINASVVNIQKEIDRLNEVAKNLNESLIDLQELGKYEQYIKGGSGYIPEAPRDGQAYVRKDGEWVLLSTFL

SEQ ID NO: 6315 - protein, 1241 aa, Artificial Sequence
  SARS-CoV-2/India/1-31/2020__EPI_ISL_413523 spike protein (1-1211)(Q965C_S1003C) Foldon construct
MFVFLVLLPLVSSQCVNLTTRTQLPPAYTNSFTRGVYYPDKVFRSSVLHSTQDLFLPFFSNVTWFHAIHVSGTNGTKRFDNPVLPFNDGVYFASTEKSNIIRGWIFGTTLDSKTQSLLIVNNATNVVIKVCEFQFCNDPFLGVYYHKNNKSWMESEFRVYSSANNCTFEYVSQPFLMDLEGKQGNFKNLREFVFKNIDGYFKIYSKHTPINLVRDLPQGFSALEPLVDLPIGINITRFQTLLALHRSYLTPGDSSSGWTAGAAAYYVGYLQPRTFLLKYNENGTITDAVDCALDPLSETKCTLKSFTVEKGIYQTSNFRVQPTESIVRFPNITNLCPFGEVFNATRFASVYAWNRKRISNCVADYSVLYNSASFSTFKCYGVSPTKLNDLCFTNVYADSFVIRGDEVRQIAPGQTGKIADYNYKLPDDFTGCVIAWNSNNLDSKVGGNYNYLYRLFRKSNLKPFERDISTEIYQAGSTPCNGVEGFNCYFPLQSYGFQPTNGVGYQPYRVVVLSFELLHAPATVCGPKKSTNLVKNKCVNFNFNGLTGTGVLTESNKKFLPFQQFGRDIADTTDAVRDPQTLEILDITPCSFGGVSVITPGTNTSNQVAVLYQDVNCTEVPVAIHADQLTPTWRVYSTGSNVFQTRAGCLIGAEHVNNSYECDIPIGAGICASYQTQTNSPRRARSVASQSIIAYTMSLGAENSVAYSNNSIAIPTNFTISVTTEILPVSMTKTSVDCTMYICGDSTECSNLLLQYGSFCTQLNRALTGIAVEQDKNTQEVFAQVKQIYKTPPIKDFGGFNFSQILPDPSKPSKRSFIEDLLFNKVTLADAGFIKQYGDCLGDIAARDLICAQKFNGLTVLPPLLTDEMIAQYTSALLAGTITSGWTFGAGAALQIPFAMQMAYRFNGIGVTQNVLYENQKLIANQFNSVIGKIQDSLSSTASALGKLQDVVNQNAQALNTLVKCLSSNFGAISSVLNDILSRLDKVEAEVQIDRLITGRLQCLQTYVTQQLIRAAEIRASANLAATKMSECVLGQSKRVDFCGKGYHLMSFPQSAPHGVVFLHVTYVPAQEKNFTTAPAICHDGKAHFPREGVFVSNGTHWFVTQRNFYEPQIITTDNTFVSGNCDVVIGIVNNTVYDPLQPELDSFKEELDKYFKNHTSPDVDLGDISGINASVVNIQKEIDRLNEVAKNLNESLIDLQELGKYEQYIKGGSGYIPEAPRDGQAYVRKDGEWVLLSTFL

SEQ ID NO: 6316 - protein, 1241 aa, Artificial Sequence
  SARS-CoV-2/Guangdong/GD2020087-P0008/2020__EPI_ISL_413863 spike protein (1-1211)(Q965C_S1003C) Foldon construct
MFVFLVLLPLVSSQCVNLTTRTQLPPAYTNSFTRGVYYPDKVFRSSVLHSTQDLFLPFFSNVTWFHAIHVSGTNGTKRFDNPVLPFNDGVYFASTEKSNIIRGWIFGTTLDSKTQSLLIVNNATNVVIKVCEFQFCNDPFLGVYYHKNNKSWMESEFRVYSSANNCTFEYVSQPFLMDLEGKQGNFKNLREFVFKNIDGYFKIYSKHTPINLVRDLPQGFSALEPLVDLPIGINITRFQTLLALHRSYLTPGDSSSGWTAGAAAYYVGYLQPRTFLLKYNENGTITDAVDCALDPLSETKCTLKSFTVEKGIYQTSNFRVQPTESIVRFPNITNLCPFGEVFNATRFASVYAWNRKRISNCVADYSVLYNSASFSTFKCYGVSPTKLNDLCFTNVYADSFVIRGDEVREIAPGQTGKIADYNYKLPDDFTGCVIAWNSNNLDSKVGGNYNYLYRLFRKSNLKPFERDISTEIYQAGSTPCNGVEGFNCYFPLQSYGFQPTNGVGYQPYRVVVLSFELLHAPATVCGPKKSTNLVKNKCVNFNFNGLTGTGVLTESNKKFLPFQQFGRDIADTTDAVRDPQTLEILDITPCSFGGVSVITPGTNTSNQVAVLYQDVNCTEVPVAIHADQLTPTWRVYSTGSNVFQTRAGCLIGAEHVNNSYECDIPIGAGICASYQTQTNSPRRARSVASQSIIAYTMSLGAENSVAYSNNSIAIPTNFTISVTTEILPVSMTKTSVDCTMYICGDSTECSNLLLQYGSFCTQLNRALTGIAVEQDKNTQEVFAQVKQIYKTPPIKDFGGFNFSQILPDPSKPSKRSFIEDLLFNKVTLADAGFIKQYGDCLGDIAARDLICAQKFNGLTVLPPLLTDEMIAQYTSALLAGTITSGWTFGAGAALQIPFAMQMAYRFNGIGVTQNVLYENQKLIANQFNSAIGKIQDSLSSTASALGKLQDVVNQNAQALNTLVKCLSSNFGAISSVLNDILSRLDKVEAEVQIDRLITGRLQCLQTYVTQQLIRAAEIRASANLAATKMSECVLGQSKRVDFCGKGYHLMSFPQSAPHGVVFLHVTYVPAQEKNFTTAPAICHDGKAHFPREGVFVSNGTHWFVTQRNFYEPQIITTDNTFVSGNCDVVIGIVNNTVYDPLQPELDSFKEELDKYFKNHTSPDVDLGDISGINASVVNIQKEIDRLNEVAKNLNESLIDLQELGKYEQYIKGGSGYIPEAPRDGQAYVRKDGEWVLLSTFL

SEQ ID NO: 6317 - protein, 1241 aa, Artificial Sequence
  SARS-CoV-2/Sweden/01/2020__EPI_ISL_411951 spike protein (1-1211)(Q965C_S1003C) Foldon construct
MFVFLVLLPLVSSQCVNLTTRTQLPPAYTNSFTRGVYYPDKVFRSSVLHSTQDLFLPFFSNVTWFHAIHVSGTNGTKRFDNPVLPFNDGVYFASTEKSNIIRGWIFGTTLDSKTQSLLIVNNATNVVIKVCEFQFCNDPFLGVYYHKNNKSWMESEFRVYSSANNCTFEYVSQPFLMDLEGKQGNFKNLREFVFKNIDGYFKIYSKHTPINLVRDLPQGFSALEPLVDLPIGINITRFQTLLALHRSYLTPGDSSSGWTAGAAAYYVGYLQPRTFLLKYNENGTITDAVDCALDPLSETKCTLKSFTVEKGIYQTSNFRVQPTESIVRFPNITNLCPFGEVFNATRFASVYAWNRKRISNCVADYSVLYNSASFSTFKCYGVSPTKLNDLCFTNVYADSFVIRGDEVRQIAPGQTGKIADYNYKLPDDFTGCVIAWNSNNLDSKVGGNYNYLYRLFRKSNLKPFERDISTEIYQAGSTPCNGVEGFNCYFPLQSYGFQPTNGVGYQPYRVVVLSFELLHAPATVCGPKKSTNLVKNKCVNFNFNGLTGTGVLTESNKKFLPFQQFGRDIADTTDAVRDPQTLEILDITPCSFGGVSVITPGTNTSNQVAVLYQDVNCTEVPVAIHADQLTPTWRVYSTGSNVFQTRAGCLIGAEHVNNSYECDIPIGAGICASYQTQTNSPRRARSVASQSIIAYTMSLGAENSVAYSNNSIAIPTNFTISVTTEILPVSMTKTSVDCTMYICGDSTECSNLLLQYGSFCTQLNRALTGIAVEQDKNTQEVFAQVKQIYKTPPIKDCGGFNFSQILPDPSKPSKRSFIEDLLFNKVTLADAGFIKQYGDCLGDIAARDLICAQKFNGLTVLPPLLTDEMIAQYTSALLAGTITSGWTFGAGAALQIPFAMQMAYRFNGIGVTQNVLYENQKLIANQFNSAIGKIQDSLSSTASALGKLQDVVNQNAQALNTLVKCLSSNFGAISSVLNDILSRLDKVEAEVQIDRLITGRLQCLQTYVTQQLIRAAEIRASANLAATKMSECVLGQSKRVDFCGKGYHLMSFPQSAPHGVVFLHVTYVPAQEKNFTTAPAICHDGKAHFPREGVFVSNGTHWFVTQRNFYEPQIITTDNTFVSGNCDVVIGIVNNTVYDPLQPELDSFKEELDKYFKNHTSPDVDLGDISGINASVVNIQKEIDRLNEVAKNLNESLIDLQELGKYEQYIKGGSGYIPEAPRDGQAYVRKDGEWVLLSTFL

SEQ ID NO: 6318 - protein, 1241 aa, Artificial Sequence
  SARS-CoV-2/Tianmen/HBCDC-HB-07/2020__EPI_ISL_412983 spike protein (1-1211)(Q965C_S1003C) Foldon construct
MFVFLVLLPLVSSQCVNLTTRTQLPPAYTNSFTRGVYYPDKVFRSSVLHSTQDLFLPFFSNVTWFHAIHVSGTNGTKRFDNPVLPFNDGVYFASTEKSNIIRGWIFGTTLDSKTQSLLIVNNATNVVIKVCEFQFCNDPFLGVYYHKNNKSWMESEFRVYSSANNCTFEYVSQPFLMDLEGKQGNFKNLREFVFKNIDGYFKIYSKHTPINLVRDLPQGFSALEPLVDLPIGINITRFQTLLALHRSYLTPGDSSSGWTAGAAAYYVGYLQPRTFLLKYNENGTITDAVDCALDPLSETKCTLKSFTVEKGIYQTSNFRVQPTESIVRFPNITNLCPFGEVFNATRFASVYAWNRKRISNCVADYSVLYNSASFSTFKCYGVSPTKLNDLCFTNVYADSFVIRGDEVRQIAPGQTGKIADYNYKLPDDFTGCVIAWNSNNLDSKVGGNYNYLYRLFRKSNLKPFERDISTEIYQAGSTPCNGVEGFNCYFPLQSYGFQPTNGVGYQPYRVVVLSFELLHAPATVCGPKKSTNLVKNKCVNFNFNGLTGTGVLTESNKKFLPFQQFGRDIADTTDAVRDPQTLEILDITPCSFGGVSVITPGTNTSNQVAVLYQDLNCTEVPVAIHADQLTPTWRVYSTGSNVFQTRAGCLIGAEHVNNSYECDIPIGAGICASYQTQTNSPRRARSVASQSIIAYTMSLGAENSVAYSNNSIAIPTNFTISVTTEILPVSMTKTSVDCTMYICGDSTECSNLLLQYGSFCTQLNRALTGIAVEQDKNTQEVFAQVKQIYKTPPIKDFGGFNFSQILPDPSKPSKRSFIEDLLFNKVTLADAGFIKQYGDCLGDIAARDLICAQKFNGLTVLPPLLTDEMIAQYTSALLAGTITSGWTFGAGAALQIPFAMQMAYRFNGIGVTQNVLYENQKLIANQFNSAIGKIQDSLSSTASALGKLQDVVNQNAQALNTLVKCLSSNFGAISSVLNDILSRLDKVEAEVQIDRLITGRLQCLQTYVTQQLIRAAEIRASANLAATKMSECVLGQSKRVDFCGKGYHLMSFPQSAPHGVVFLHVTYVPAQEKNFTTAPAICHDGKAHFPREGVFVSNGTHWFVTQRNFYEPQIITTDNTFVSGNCDVVIGIVNNTVYDPLQPELDSFKEELDKYFKNHTSPDVDLGDISGINASVVNIQKEIDRLNEVAKNLNESLIDLQELGKYEQYIKGGSGYIPEAPRDGQAYVRKDGEWVLLSTFL

SEQ ID NO: 6319 - protein, 1241 aa, Artificial Sequence
  SARS-CoV-2/Hong Kong/case42_VM20002493/2020__EPI_ISL_414527 spike protein (1-1211)(Q965C_S1003C) Foldon construct
MFVFLVLLPLVSSQCVNLTTRTQLPPAYTNSFTRGVYYPDKVFRSSVLHSTQDLFLPFFSNVTWFHAIHVSGTNGTKRFDNPVLPFNDGVYFASTEKSNIIRGWIFGTTLDSKTQSLLIVNNATNVVIKVCEFQFCNDPFLGVYYHKNNKSWMESEFRVYSSANNCTFEYVSQPFLMDLEGKQGNFKNLREFVFKNIDGYFKIYSKHTPINLVRDLPQGFSALEPLVDLPIGINITRFQTLLALHRSYLTPGDSSSGWTAGAAAYYVGYLQPRTFLLKYNENGTITDAVDCALDPLSETKCTLKSFTVEKGIYQTSNFRVQPTESIVRFPNITNLCPFGEVFNATRFASVYAWNRKRISNCVADYSVLYNSASFSTFKCYGVSPTKLNDLCFTNVYADSFVIRGDEVRQIAPGQTGKIADYNYKLPDDFTGCVIAWNSNNLDSKVGGNYNYLYRLFRKSNLKPFERDISTEIYQAGSTPCNGVEGFNCYFPLQSYGFQPTNGVGYQPYRVVVLSFELLHAPATVCGPKKSTNLVKNKCVNFNFNGLTGTGVLTESNKKFLPFQQFGRDIADTTDAVRDPQTLEILDITPCSFGGVSVITPGTNTSNQVAVLYQDVNCTEVPVAIHADQLTPTWRVYSTGSNVFQTRAGCLIGAEHVNNSYECDIPIGAGICASYQTQTNSPRRARSVASQSIIAYTMSLGAENSVAYSNNSIAIPTNFAISVTTEILPVSMTKTSVDCTMYICGDSTECSNLLLQYGSFCTQLNRALTGIAVEQDKNTQEVFAQVKQIYKTPPIKDFGGFNFSQILPDPSKPSKRSFIEDLLFNKVTLADAGFIKQYGDCLGDIAARDLICAQKFNGLTVLPPLLTDEMIAQYTSALLAGTITSGWTFGAGAALQIPFAMQMAYRFNGIGVTQNVLYENQKLIANQFNSAIGKIQDSLSSTASALGKLQDVVNQNAQALNTLVKCLSSNFGAISSVLNDILSRLDKVEAEVQIDRLITGRLQCLQTYVTQQLIRAAEIRASANLAATKMSECVLGQSKRVDFCGKGYHLMSFPQSAPHGVVFLHVTYVPAQEKNFTTAPAICHDGKAHFPREGVFVSNGTHWFVTQRNFYEPQIITTDNTFVSGNCDVVIGIVNNTVYDPLQPELDSFKEELDKYFKNHTSPDVDLGDISGINASVVNIQKEIDRLNEVAKNLNESLIDLQELGKYEQYIKGGSGYIPEAPRDGQAYVRKDGEWVLLSTFL

SEQ ID NO: 6320 - protein, 1241 aa, Artificial Sequence
  SARS-CoV-2/USA/CruiseA-23/2020__EPI_ISL_414482 spike protein (1-1211)(Q965C_S1003C) Foldon construct
MFVFLVLLPLVSSQCVNLTTRTQLPPAYTNSFTRGVYYPDKVFRSSVLHSTQDLFLPFFSNVTWFHAIHVSGTNGTKRFDNPVLPFNDGVYFASTEKSNIIRGWIFGTTLDSKTQSLLIVNNATNVVIKVCEFQFCNDPFLGVYYHKNNKSWMESEFRVYSSANNCTFEYVSQPFLMDLEVKQGNFKNLREFVFKNIDGYFKIYSKHTPINLVRDLPQGFSALEPLVDLPIGINITRFQTLLALHRSYLTPGDSSSGWTAGAAAYYVGYLQPRTFLLKYNENGTITDAVDCALDPLSETKCTLKSFTVEKGIYQTSNFRVQPTESIVRFPNITNLCPFGEVFNATRFASVYAWNRKRISNCVADYSVLYNSASFSTFKCYGVSPTKLNDLCFTNVYADSFVIRGDEVRQIAPGQTGKIADYNYKLPDDFTGCVIAWNSNNLDSKVGGNYNYLYRLFRKSNLKPFERDISTEIYQAGSTPCNGVEGFNCYFPLQSYGFQPTNGVGYQPYRVVVLSFELLHAPATVCGPKKSTNLVKNKCVNFNFNGLTGTGVLTESNKKFLPFQQFGRDIADTTDAVRDPQTLEILDITPCSFGGVSVITPGTNTSNQVAVLYQDVNCTEVPVAIHADQLTPTWRVYSTGSNVFQTRAGCLIGAEHVNNSYECDIPIGAGICASYQTQTNSPRRARSVASQSIIAYTMSLGAENSVAYSNNSIAIPTNFTISVTTEILPVSMTKTSVDCTMYICGDSTECSNLLLQYGSFCTQLNRALTGIAVEQDKNTQEVFAQVKQIYKTPPIKDFGGFNFSQILPDPSKPSKRSFIEDLLFNKVTLADAGFIKQYGDCLGDIAARDLICAQKFNGLTVLPPLLTDEMIAQYTSALLAGTITSGWTFGAGAALQIPFAMQMAYRFNGIGVTQNVLYENQKLIANQFNSAIGKIQDSLSSTASALGKLQDVVNQNAQALNTLVKCLSSNFGAISSVLNDILSRLDKVEAEVQIDRLITGRLQCLQTYVTQQLIRAAEIRASANLAATKMSECVLGQSKRVDFCGKGYHLMSFPQSAPHGVVFLHVTYVPAQEKNFTTAPAICHDGKAHFPREGVFVSNGTHWFVTQRNFYEPQIITTDNTFVSGNCDVVIGIVNNTVYDPLQPELDSFKEELDKYFKNHTSPDVDLGDISGINASVVNIQKEIDRLNEVAKNLNESLIDLQELGKYEQYIKGGSGYIPEAPRDGQAYVRKDGEWVLLSTFL

SEQ ID NO: 6321 - protein, 1241 aa, Artificial Sequence
  SARS-CoV-2/Hong Kong/case85_VM20002868/2020__EPI_ISL_414519 spike protein (1-1211)(Q965C_S1003C) Foldon construct
MFVFLVLVPLVSSQCVNLTTRTQLPPAYTNSFTRGVYYPDKVFRSSVLHSTQDLFLPFFSNVTWFHAIHVSGTNGTKRFDNPVLPFNDGVYFASTEKSNIIRGWIFGTTLDSKTQSLLIVNNATNVVIKVCEFQFCNDPFLGVYYHKNNKSWMESEFRVYSSANNCTFEYVSQPFLMDLEGKQGNFKNLREFVFKNIDGYFKIYSKHTPINLVRDLPQGFSALEPLVDLPIGINITRFQTLLALHRSYLTPGDSSSGWTAGAAAYYVGYLQPRTFLLKYNENGTITDAVDCALDPLSETKCTLKSFTVEKGIYQTSNFRVQPTESIVRFPNITNLCPFGEVFNATRFASVYAWNRKRISNCVADYSVLYNSASFSTFKCYGVSPTKLNDLCFTNVYADSFVIRGDEVRQIAPGQTGKIADYNYKLPDDFTGCVIAWNSNNLDSKVGGNYNYLYRLFRKSNLKPFERDISTEIYQAGSTPCNGVEGFNCYFPLQSYGFQPTNGVGYQPYRVVVLSFELLHAPATVCGPKKSTNLVKNKCVNFNFNGLTGTGVLTESNKKFLPFQQFGRDIADTTDAVRDPQTLEILDITPCSFGGVSVITPGTNTSNQVAVLYQDVNCTEVPVAIHADQLTPTWRVYSTGSNVFQTRAGCLIGAEHVNNSYECDIPIGAGICASYQTQTNSPRRARSVASQSIIAYTMSLGAENSVAYSNNSIAIPTNFTISVTTEILPVSMTKTSVDCTMYICGDSTECSNLLLQYGSFCTQLNRALTGIAVEQDKNTQEVFAQVKQIYKTPPIKDFGGFNFSQILPDPSKPSKRSFIEDLLFNKVTLADAGFIKQYGDCLGDIAARDLICAQKFNGLTVLPPLLTDEMIAQYTSALLAGTITSGWTFGAGAALQIPFAMQMAYRFNGIGVTQNVLYENQKLIANQFNSAIGKIQDSLSSTASALGKLQDVVNQNAQALNTLVKCLSSNFGAISSVLNDILSRLDKVEAEVQIDRLITGRLQCLQTYVTQQLIRAAEIRASANLAATKMSECVLGQSKRVDFCGKGYHLMSFPQSAPHGVVFLHVTYVPAQEKNFTTAPAICHDGKAHFPREGVFVSNGTHWFVTQRNFYEPQIITTDNTFVSGNCDVVIGIVNNTVYDPLQPELDSFKEELDKYFKNHTSPDVDLGDISGINASVVNIQKEIDRLNEVAKNLNESLIDLQELGKYEQYIKGGSGYIPEAPRDGQAYVRKDGEWVLLSTFL

SEQ ID NO: 6322 - protein, 1241 aa, Artificial Sequence; identical to SEQ ID NO: 6312
  SARS-CoV-2/England/200990660/2020__EPI_ISL_414523 spike protein (1-1211)(Q965C_S1003C) Foldon construct

SEQ ID NO: 6323 - protein, 1241 aa, Artificial Sequence
  SARS-CoV-2/Australia/NSW09/2020__EPI_ISL_413595 spike protein (1-1211)(Q965C_S1003C) Foldon construct
MFVFLVLLPLVSSQCVNLTTRTQLPPAYTNSFTRGVYYPDKVFRSSVLHSTQDLFLPFFSNVTWFHAIHVSGTNGTKRFDNPVLPFNDGVYFASTEKSNIIRGWIFGTTLDSKTQSLLIVNNATNVVIKVCEFQFCNDPFLGVYYHKNNKSWMESEFRVYSSANNCTFEYVSQPFLMDLEGKQGNFKNLREFVFKNIDGYFKIYSKHTPINLVRDLPQGFSALEPLVDLPIGINITRFQTLLALHRSYLTPGDSSSGWTAGAAAYYVGYLQPRTFLLKYNENGTITDAVDCALDPLSETKCTLKSFTVEKGIYQTSNFRVQPTESIVRFPNITNLCPFGEVFNATRFASVYAWNRKRISNCVADYSVLYNSASFSTFKCYGVSPTKLNDLCFTNVYADSFVIRGDEVRQIAPGQTGKIADYNYKLPDDFTGCVIAWNSNNLDSKVGGNYNYLYRLFRKSNLKPFERDISTEIYQAGSTPCNGVEGFNCYFPLQSYGFQPTNGVGYQPYRVVVLSFELLHAPATVCGPKKSTNLVKNKCVNFNFNGLTGTGVLTESNKKFLPFQQFGRDIADTTDAVRDPQTLEILDITPCSFGGVSVITPGTNTSNQVAVLYQDVNCTEVPVAIHADQLTPTWRVYSTGSNVFQTRAGCLIGAEHVNNSYECDIPIGAGICASYQTQTNSPRRARSVASQSIIAYTMSLGAENSVAYSNNSIAIPTNFTISVTTEILPVSMTKTSVDCTMYICGDSTECSNLLLQYGSFCTQLNRALTGIAVEQDKNTQEVFAQVKQIYKTPPIKDFGGFNFSQILPDPSKPSKRSFIEDLLFNKVTLADAGFIKQYGDCLGDIAARDLICAQKFNGLTVLPPLLTDEMIAQYTSALLAGTITSGWTFGAGAALQIPFAMQMAYRFNGIGVTQNVLYENQKLIANQFNSAIGKIQDSLSFTASALGKLQDVVNQNAQALNTLVKCLSSNFGAISSVLNDILSRLDKVEAEVQIDRLITGRLQCLQTYVTQQLIRAAEIRASANLAATKMSECVLGQSKRVDFCGKGYHLMSFPQSAPHGVVFLHVTYVPAQEKNFTTAPAICHDGKAHFPREGVFVSNGTHWFVTQRNFYEPQIITTDNTFVSGNCDVVIGIVNNTVYDPLQPELDSFKEELDKYFKNHTSPDVDLGDISGINASVVNIQKEIDRLNEVAKNLNESLIDLQELGKYEQYIKGGSGYIPEAPRDGQAYVRKDGEWVLLSTFL

SEQ ID NO: 6324 - protein, 1241 aa, Artificial Sequence; identical to SEQ ID NO: 6304
  SARS-CoV-2/Australia/NSW10/2020__EPI_ISL_413596 spike protein (1-1211)(Q965C_S1003C) Foldon construct

SEQ ID NO: 6325 - protein, 1241 aa, Artificial Sequence
  SARS-CoV-2/Switzerland/1000477797/2020__EPI_ISL_413023 spike protein (1-1211)(Q965C_S1003C) Foldon construct
MFVFLVLLPLVSSQCVNLTTRTQLPPAYTNSFTRGVYYPDKVFRSSVLHSTQDLFLPFFSNVTWFHAIHVSGTNGTKRFDNPVLPFNDGVYFASTEKSNIIRGWIFGTTLDSKTQSLLIVNNATNVVIKVCEFQFCNDPFLGVYYHKNNKSWMESEFRVYSSANNCTFEYVSQPFLMDLEGKQGNFKNLREFVFKNIDGYFNIYSKHTPINLVRDLPQGFSALEPLVDLPIGINITRFQTLLALHRSYLTPGDSSSGWTAGAAAYYVGYLQPRTFLLKYNENGTITDAVDCALDPLSETKCTLKSFTVEKGIYQTSNFRVQPTESIVRFPNITNLCPFGEVFNATRFASVYAWNRKRISNCVADYSVLYNSASFSTFKCYGVSPTKLNDLCFTNVYADSFVIRGDEVRQIAPGQTGKIADYNYKLPDDFTGCVIAWNSNNLDSKVGGNYNYLYRLFRKSNLKPFERDISTEIYQAGSTPCNGVEGFNCYFPLQSYGFQPTNGVGYQPYRVVVLSFELLHAPATVCGPKKSTNLVKNKCVNFNFNGLTGTGVLTESNKKFLPFQQFGRDIADTTDAVRDPQTLEILDITPCSFGGVSVITPGTNTSNQVAVLYQGVNCTEVPVAIHADQLTPTWRVYSTGSNVFQTRAGCLIGAEHVNNSYECDIPIGAGICASYQTQTNSPRRARSVASQSIIAYTMSLGAENSVAYSNNSIAIPTNFTISVTTEILPVSMTKTSVDCTMYICGDSTECSNLLLQYGSFCTQLNRALTGIAVEQDKNTQEVFAQVKQIYKTPPIKDFGGFNFSQILPDPSKPSKRSFIEDLLFNKVTLADAGFIKQYGDCLGDIAARDLICAQKFNGLTVLPPLLTDEMIAQYTSALLAGTITSGWTFGAGAALQIPFAMQMAYRFNGIGVTQNVLYENQKLIANQFNSAIGKIQDSLSSTASALGKLQDVVNQNAQALNTLVKCLSSNFGAISSVLNDILSRLDKVEAEVQIDRLITGRLQCLQTYVTQQLIRAAEIRASANLAATKMSECVLGQSKRVDFCGKGYHLMSFPQSAPHGVVFLHVTYVPAQEKNFTTAPAICHDGKAHFPREGVFVSNGTHWFVTQRNFYEPQIITTDNTFVSGNCDVVIGIVNNTVYDPLQPELDSFKEELDKYFKNHTSPDVDLGDISGINASVVNIQKEIDRLNEVAKNLNESLIDLQELGKYEQYIKGGSGYIPEAPRDGQAYVRKDGEWVLLSTFL

SEQ ID NO: 6326 - protein, 1241 aa, Artificial Sequence
  SARS-CoV-2/Belgium/BA-02291/2020__EPI_ISL_415159 spike protein (1-1211)(Q965C_S1003C) Foldon construct
MFVFLVLLPLVSSQCVNLTTRTQLPPAYTNSFTRGVYYPDKVFRSSVLHSTQDLFLPFFSNVTWFHAIHVSGTNGTKRFDNPVLPFNDGVYFASTEKSNIIRGWIFGTTLDSKTQSLLIVNNATNVVIKVCEFQFCNDPFLGVYYHKNNKSWMESEFRVYSSANNCTFEYVSQPFLMDLEGKQGNFKNLREFVFKNIDGYFKIYSKHTPINLVRDLPQGFSALEPLVDLPIGINITRFQTLLALHRSYLTPGDSSSGWTAGAAAYYVGYLQPRTFLLKYNENGTITDAVDCALDPLSETKCTLKSFTVEKGIYQTSNFRVQPTESIVRFPNITNLCPFGEVFNATRFASVYAWNRKRISNCVADYSVLYNSASFSTFKCYGVSPTKLNDLCFTNVYADSFVIRGDEVRQIAPGQTGKIADYNYKLPDDFTGCVIAWNSNNLDSKVGGNYNYLYRLFRRSNLKPFERDISTEIYQAGSTPCNGVEGFNCYFPLQSYGFQPTNGVGYQPYRVVVLSFELLPAPATVCGPKKSTNLVKNKCVNFNFNGLTGTGVLTESNKKFLPFQQFGRDIADTTDAVRDPQTLEILDITPCSFGGVSVITPGTNTSNQVAVLYQGVNCTEVPVAIHADQLTPTWRVYSTGSNVFQTRAGCLIGAEHVNNSYECDIPIGAGICASYQTQTNSPRRARSVASQSIIAYTMSLGAENSVAYSNNSIAIPTNFTISVTTEILPVSMTKTSVDCTMYICGDSTECSNLLLQYGSFCTQLNRALTGIAVEQDKNTQEVFAQVKQIYKTPPIKDFGGFNFSQILPDPSKPSKRSFIEDLLFNKVTLADAGFIKQYGDCLGDIAARDLICAQKFNGLTVLPPLLTDEMIAQYTSALLAGTITSGWTFGAGAALQIPFAMQMAYRFNGIGVTQNVLYENQKLIANQFNSAIGKIQDSLSSAAPALGKLQDVVNQNAQALNTLVKCLSSNFGAISSVLNDILSRLDKVEAEVQIDRLITGRLQCLQTYVTQQLIRAAEIRASANLAATKMSECVLGQSKRVDFCGKGYHLMSFPQSAPHGVVFLHVTYVPAQEKNFTTAPAICHDGKAHFPREGVFVSNGTHWFVTQRNFYEPQIITTDNTFVSGNCDVVIGIVNNTVYDPLQPELDSFKEELDKYFKNHTSPDVDLGDISGINASVVNIQKEIDRLNEVAKNLNESLIDLQELGKYEQYIKGGSGYIPEAPRDGQAYVRKDGEWVLLSTFL

SEQ ID NO: 6327 - protein, 1241 aa, Artificial Sequence
  SARS-CoV-2/USA/WA8-UW5/2020__EPI_ISL_413486 spike protein (1-1211)(Q965C_S1003C) Foldon construct
MFVFLVLLPLVSSQCVNLTTRTQLPPAYTNSFTRGVYYPDKVFRSSVLHSTQDLFLPFFSNVTWFHAIHVSGTNGTKRFDNPVLPFNDGVYFASTEKSNIIRGWIFGTTLDSKTQSLLIVNNATNVVIKVCEFQFCNDPFLGVYYHKNNKSWMESEFRVYSSANNCTFEYVSQPFLMDLEGKQGNFKNLREFVFKNIDGYFKIYSKHTPINLVRDLPQGFSALEPLVDLPIGINITRFQTLLALHRSYLTPGDSSSGWTAGAAAYYVGYLQPRTFLLKYNENGTITDAVDCALDPLSETKCTLKSFTVEKGIYQTSNFRVQPTESIVRFPNITNLCPFGEVFNATRFASVYAWNRKRISNCVADYSVLYNSASFSTFKCYGVSPTKLNDLCFTNVYADSFVIRGDEVRQIAPGQTGKIADYNYKLPDDFTGCVIAWNSNNLDSKVGGNYNYLYRLFRKSNLKPFERDISTEIYQAGSTPCNGVEGFNCYFPLQSYGFQPTNGVGYQPYRVVVLSFELLHAPATVCGPKKSTNLVKNKCVNFNFNGLTGTGVLTESNKKFLPFQQFGRDIADTTDAVRDPQTLEILDITPCSFGGVSVITPGTNTSNQVAVLYQDVNCTEVPVAIHADQLTPTWRVYSTGSNVFQTRAGCLIGAEYVNNSYECDIPIGAGICASYQTQTNSPRRARSVASQSIIAYTMSLGAENSVAYSNNSIAIPTNFTISVTTEILPVSMTKTSVDCTMYICGDSTECSNLLLQYGSFCTQLNRALTGIAVEQDKNTQEVFAQVKQIYKTPPIKDFGGFNFSQILPDPSKPSKRSFIEDLLFNKVTLADAGFIKQYGDCLGDIAARDLICAQKFNGLTVLPPLLTDEMIAQYTSALLAGTITSGWTFGAGAALQIPFAMQMAYRFNGIGVTQNVLYENQKLIANQFNSAIGKIQDSLSSTASALGKLQDVVNQNAQALNTLVKCLSSNFGAISSVLNDILSRLDKVEAEVQIDRLITGRLQCLQTYVTQQLIRAAEIRASANLAATKMSECVLGQSKRVDFCGKGYHLMSFPQSAPHGVVFLHVTYVPAQEKNFTTAPAICHDGKAHFPREGVFVSNGTHWFVTQRNFYEPQIITTDNTFVSGNCDVVIGIVNNTVYDPLQPELDSFKEELDKYFKNHTSPDVDLGDISGINASVVNIQKEIDRLNEVAKNLNESLIDLQELGKYEQYIKGGSGYIPEAPRDGQAYVRKDGEWVLLSTFL

SEQ ID NO: 6328 - protein, 1241 aa, Artificial Sequence
  SARS-CoV-2/England/20102000506/2020__EPI_ISL_415147 spike protein (1-1211)(Q965C_S1003C) Foldon construct
MFVFLVLLPLVSSQCVNLTTRTQLPPAYTNSFTRGVYYPDKVFRSSVLHSTQDLFLPFFSNVTWFHAIHVSGTNGTKRFDNPVLPFNDGVYFASTEKSNIIRGWIFGTTLDSKTQSLLIVNNATNVVIKVCEFQFCNDPFLGVYYHKNNKSWMESEFRVYSSANNCTFEYVSQPFLMDLEGKQGNFKNLREFVFKNIDGYFKIYSKHTPINLVRDLPQGFSALEPLVDLPIGINITRFQTLLALHRSYLTPGDSSSGWTAGAAAYYVGYLQPRTFLLKYNENGTITDAVDCALDPLSETKCTLKSFTVEKGIYQTSNFRVQPTESIVRFPNITNLCPFGEVFNATRFASVYAWNRKRISNCVADYSVLYNSASFSTFKCYGVSPTKLNDLCFTNVYADSFVIRGDEVRQIAPGQTGKIADYNYKLPDDFTGCVIAWNSNNLDSKVGGNYNYLYRLFRKSNLKPFERDISTEIYQAGSTPCNGVEGFNCYFPLQSYGFQPTNGVGYQPYRVVVLSFELLHAPATVCGPKKSTNLVKNKCVNFNFNGLTGTGVLTESNKKFLPFQQFGRDIADTTDAVRDPQTLEILDITPCSFGGVSVITPGTNTSNQVAVLYQGVNCTEVPVAIHADQLTPTWRVYSTGSNVFQTRAGCLIGAEHVNNSYECDIPIGAGICASYQTQTNSPRRARSVASQSIIAYTMSLGAENSVAYSNNSIAIPTNFTISVTTEILPVSMTKTSVDCTMYICGDSTECSNLLLQYGSFCTQLNRALTGIAVEQDKNTQEVFAQVKQIYKTPPIKDFGGFNFSQILPDPSKPSKRSFIEDLLFNKVTLADAGFIKQYGYCLGDIAARDLICAQKFNGLTVLPPLLTDEMIAQYTSALLAGTITSGWTFGAGAALQIPFAMQMAYRFNGIGVTQNVLYENQKLIANQFNSAIGKIQDSLSSTASALGKLQDVVNQNAQALNTLVKCLSSNFGAISSVLNDILSRLDKVEAEVQIDRLITGRLQCLQTYVTQQLIRAAEIRASANLAATKMSECVLGQSKRVDFCGKGYHLMSFPQSAPHGVVFLHVTYVPAQEKNFTTAPAICHDGKAHFPREGVFVSNGTHWFVTQRNFYEPQIITTDNTFVSGNCDVVIGIVNNTVYDPLQPELDSFKEELDKYFKNHTSPDVDLGDISGINASVVNIQKEIDRLNEVAKNLNESLIDLQELGKYEQYIKGGSGYIPEAPRDGQAYVRKDGEWVLLSTFL

SEQ ID NO: 6329 - protein, 1241 aa, Artificial Sequence
  SARS-CoV-2/Belgium/VAG-03013/2020__EPI_ISL_415155 spike protein (1-1211)(Q965C_S1003C) Foldon construct
MFVFLVLLPLVSSQCVNLTTRTQLPPAYTNSFTRGVYYPDKVFRSSVLHSTQDLFLPFFSNVTWFHAIHVSGTNGTKRFDNPVLPFNDGVYFASTEKSNIIRGWIFGTTLDSKTQSLLIVNNATNVVIKVCEFQFCNDPFLGVYYHKNNKSWMESEFRVYSSANNCTFEYVSQPFLMDLEGKQGNFKNLREFVFKNIDGYFKIYSKHTPINLVRDLPQGFSALEPLVDLPIGINITRFQTLLALHRSYLTPGDSSSGWTAGAAAYYVGYLQPRTFLLKYNENGTITDAVDCALDPLSETKCTLKSFTVEKGIYQTSNFRVQPTESIVRFPNITNLCPFGEVFNATRFASVYAWNRKRISNCVADYSVLYNSASFSTFKCYGVSPTKLNDLCFTNVYADSFVIRGDEVRQIAPGQTGKIADYNYKLPDDFTGCVIAWNSNNLDSKVGGNYNYLYRLFRKSNLKPFERDISTEIYQAGSTPCNGVEGFNCYFPLQSYGFQPTNGVGYQPYRVVVLSFELLHAPATVCGPKKSTNLVKNKCVNFNFNGLTGTGVLTESNKKFLPFQQFGRDIADTTDAVRDPQTLEILDITPCSFGGVSVITPGTNTSNQVAVLYQGVNCTEVPVAIHADQLTPTWRVYSTGSNVFQTRAGCLIGAEHVNNSYECDIPIGAGICASYQTQTNSPRRARSVASQSIIAYTMSLGAENSVAYSNNSIAIPTNFTISVTTEILPVSMTKTSVDCTMYICGDSTECSNLLLQYGSFCTQLNRALTGIAVEQDKNTQEVFAQVKQIYKTPPIKDFGGFNFSQILPDPSKPSKRSFIEDLLFNKVTLADAGFIKQYGDCLGDIAARDLICAQKFNGLTVLPPLLTDEMIAQYTSALLAGTITSGWTFGAGAALQIPFAMQMAYRFNGIGVTQNVLYENQKLIANQFNSAIGKIQDSLSSTATALGKLQDVVNQNAQALNTLVKCLSSNFGAISSVLNDILSRLDKVEAEVQIDRLITGRLQCLQTYVTQQLIRAAEIRASANLAATKMSECVLGQSKRVDFCGKGYHLMSFPQSAPHGVVFLHVTYVPAQEKNFTTAPAICHDGKAHFPREGVFVSNGTHWFVTQRNFYEPQIITTDNTFVSGNCDVVIGIVNNTVYDPLQPELDSFKEELDKYFKNHTSPDVDLGDISGINASVVNIQKEIDRLNEVAKNLNESLIDLQELGKYEQYIKGGSGYIPEAPRDGQAYVRKDGEWVLLSTFL

SEQ ID NO: 6330 - protein, 1241 aa, Artificial Sequence
  SARS-CoV-2/Belgium/BC-03016/2020__EPI_ISL_415157 spike protein (1-1211)(Q965C_S1003C) Foldon construct
MFVFLVLLPLVSSQCVNLTTRTQLPPAYTNSFTRGVYYPDKVFRSSVLHSTQDLFLPFFSNVTWFHAIHVSGTNGTKRFDNPVLPFNDGVYFASTEKSNIIRGWIFGTTLDSKTQSLLIVNNATNVVIKVCEFQFCNDPFLGVYYHKNNKSWMESEFRVYSSANNCTFEYVSQPFLMDLEGKQGNFKNLREFVFKNIDGYFKIYSKHTPINLVRDLPQGFSALEPLVDLPIGINITRFQTLLALHRSYLTPGDSSSGWTAGAAAYYVGYLQPRTFLLKYNENGTITDAVDCALDPLSETKCTLKSFTVEKGIYQTSNFRVQPTESIVRFPNITNLCPFGEVFNATRFASVYAWNRKRISNCVADYSVLYNSASFSTFKCYGVSPTKLNDLCFTNVYADSFVIRGDEVRQIAPGQTGKIADYNYKLPDDFTGCVIAWNSNNLDSKVGGNYNYLYRLFRKSNLKPFERDISTEIYQAGSTPCNGVEGFNCYFPLQSYGFQPTNGVGYQPYRVVVLSFELLHAPATVCGPKKSTNLVKNKCVNFNFNGLTGTGVLTESNKKFLPFQQFGRDIADTTDAVRDPQTLEILDITPCSFGGVSVITPGTNTSNQVAVLYQGVNCTEVPVAIHADQLTPTWRVYSTGSNVFQTRAGCLIGAEHVNNSYECDIPIGAGICASYQTQTNSPRRARSVASQSIIAYTMSLGAENSVAYSNNSIAIPTNFTISVTTEILPVSMTKTSVDCTMYICGDSTECSNLLLQYGSFCTQLNRALTGIAVEQDKNTQEVFAQVKQIYKTPPIKDFGGFNFSQILPDPSKPSKRSFIEDLLFNKVTLADAGFIKQYGDCLGDIAARDLICAQKFNGLTVLPPLLTDEMIAQYTSALLAGTITSGWTFGAGAALQIPFAMQMAYRFNGIGVTQNVLYENQKLIANQFNSAIGKIQDSLSSTAPALGKLQDVVNQNAQALNTLVKCLSSNFGAISSVLNDILSRLDKVEAEVQIDRLITGRLQCLQTYVTQQLIRAAEIRASANLAATKMSECVLGQSKRVDFCGKGYHLMSFPQSAPHGVVFLHVTYVPAQEKNFTTAPAICHDGKAHFPREGVFVSNGTHWFVTQRNFYEPQIITTDNTFVSGNCDVVIGIVNNTVYDPLQPELDSFKEELDKYFKNHTSPDVDLGDISGINASVVNIQKEIDRLNEVAKNLNESLIDLQELGKYEQYIKGGSGYIPEAPRDGQAYVRKDGEWVLLSTFL

SEQ ID NO: 6331 - protein, 1241 aa, Artificial Sequence
  SARS-CoV-2/Germany/BavPat3/2020__EPI_ISL_414521 spike protein (1-1211)(Q965C_S1003C) Foldon construct
MFVFLVLLPLVSSQCVNLTTRTQLPPAYTNSFTRGVYYPDKVFRSSVLHSTQDLFLPFFSNVTWFHAIHVSGTNGTKRFDNPVLPFNDGVYFASTEKSNIIRGWIFGTTLDSKTQSLLIVNNATNVVIKVCEFQFCNDPFLGVYYHKNNKSWMESEFRVYSSANNCTFEYVSQPFLMDLEGKQGNFKNLREFVFKNIDGYFKIYSKHTPINLVRDLPQGFSALEPLVDLPIGINITRFQTLLALHRSYLTPGDSSSGWTAGAAAYYVGYLQPRTFLLKYNENGTITDAVDCALDPLSETKCTLKSFTVEKGIYQTSNFRVQPTESIVRFPNITNLCPFGEVFNATRFASVYAWNRKRISNCVADYSVLYNSASFSTFKCYGVSPTKLNDLCFTNVYADSFVIRGDEVRQIAPGQTGKIADYNYKLPDDFTGCVIAWNSNNLDSKVGGNYNYLYRLFRKSNLKPFERDISTEIYQAGSTPCNGVEGFNCYFPLQSYGFQPTNGVGYQPYRVVVLSFELLHAPATVCGPKKSTNLVKNKCVNFNFNGLTGTGVLTESNKKFLPFQQFGRDIADTTDAVRDPQTLEILDITPCSFGGVSVITPGTNTSNQVAVLYQDVNCTEVPVAIHADQLTPTWRVYSTGSNVFQTRAGCLIGAEHVNNSYECDIPIGAGICASYQTQTNSPRRARSVASQSIIAYTMSLGAENSVAYSNNSIAIPTNFTISVTTEILPVSMTKTSVDCTMYICGDSTECSNLLLQYGSFCTQLNRALTGIAVEQDKNTQQVFAQVKQIYKTPPIKDFGGFNFSQILPDPSKPSKRSFIEDLLFNKVTLADAGFIKQYGDCLGDIAARDLICAQKFNGLTVLPPLLTDEMIAQYTSALLAGTITSGWTFGAGAALQIPFAMQMAYRFNGIGVTQNVLYENQKLIANQFNSAIGKIQDSLSSTASALGKLQDVVNQNAQALNTLVKCLSSNFGAISSVLNDILSRLDKVEAEVQIDRLITGRLQCLQTYVTQQLIRAAEIRASANLAATKMSECVLGQSKRVDFCGKGYHLMSFPQSAPHGVVFLHVTYVPAQEKNFTTAPAICHDGKAHFPREGVFVSNGTHWFVTQRNFYEPQIITTDNTFVSGNCDVVIGIVNNTVYDPLQPELDSFKEELDKYFKNHTSPDVDLGDISGINASVVNIQKEIDRLNEVAKNLNESLIDLQELGKYEQYIKGGSGYIPEAPRDGQAYVRKDGEWVLLSTFL

SEQ ID NO: 6332 - protein, 1241 aa, Artificial Sequence
  SARS-CoV-2/France/HF1805/2020__EPI_ISL_414628 spike protein (1-1211)(Q965C_S1003C) Foldon construct
MFVFLVLLPLVSSQCVNLTTRTQLPPAYTNSFTRGVYYPDKVFRSSVLHSTQDLFLPFFSNVTWFHAIHVSGTNGTKRFDNPVLPFNDGVYFASTEKSNIIRGWIFGTTLDSKTQSLLIVNNATNVVIKVCEFQFCNDPFLGVYYHKNNKSWMESEFRVYSSANNCTFEYVSQPFLMDLEGKQGNFKNLREFVFKNIDGYFKIYSKHTPINLVRDLPQGFSALEPLVDLPIGINITRFQTLLALHRSYLTPGDSSSGWTAGAAAYYVGYLQPRTFLLKYNENGTITDAVDCALDPLSETKCTLKSFTVEKGIYQTSNFRVQPTESIVRFPNITNLCPFGEVFNATRFASVYAWNRKRISNCVADYSVLYNSASFSTFKCYGVSPTKLNDLCFTNVYADSFVIRGDEVRQIAPGQTGKIADYNYKLPDDFTGCVIAWNSNNLDSKVGGNYNYLYRLFRKSNLKPFERDISTEIYQAGSTPCNGVEGFNCYFPLQSYGFQPTNGVGYQPYRVVVLSFELLHAPATVCGPKKSTNLVKNKCVNFNFNGLTGTGVLTESNKKFLPFQQFGRDIADTTDAVRDPQTLEILDITPCSFGGVSVITPGTNTSNQVAVLYQGVNCTEVPVAIHADQLTPTWRVYSTGSNVFQTRAGCLIGAEHVNNSYECDIPIGAGICASYQTQTNSPRRARSVASQSIIAYTMSLGAENSVAYSNNSIAIPTNFTISVTTEILPVSMTKTSVDCTMYICGDSTECSNLLLQYGSFCTQLNRALTGIAVEQDKNTQEVFAQVKQIYKTPPIKDFGGFNFSQILPDPSKPSKRSFIEDLLFNKVTLADAGFIKQYGDCLGDIAARDLICAQKFNGLTVLPPLLTDEMIAQYTSALLAGTITSGWTFGAGAALQIPFAMQMAYRFNGIGVTQNVLYENQKLIANQFNSAIGKIQDSLSSTASALGKLQDVVNQNAQALNTLVKCLSSNFGAISSVLNDILSRLDKVEAEVQIDRLITGRLQCLQTYVTQQLIRAAEIRASANLAATKMSECVLGQSKRVDFCGKGYHLMSFPQSAPHGVVFLHVTYVPAQEKNFTTAPAICHDGKAHFPREGVFVSNGTHWFVTQRNFYEPQIITTDNTFVSGNCDVVIGVVNNTVYDPLQPELDSFKEELDKYFKNHTSPDVDLGDISGINASVVNIQKEIDRLNEVAKNLNESLIDLQELGKYEQYIKGGSGYIPEAPRDGQAYVRKDGEWVLLSTFL

SEQ ID NO: 6333 - protein, 1241 aa, Artificial Sequence
  SARS-CoV-2/Netherlands/ZuidHolland_9/2020__EPI_ISL_414445 spike protein (1-1211)(Q965C_S1003C) Foldon construct
MFVFLVLLPLVSSQCVNLTTRTQLPPAYTNSFTRGVYYPDKVFRSSVLHSTQDLFLPFFSNVTWFHAIHVSGTNGTKRFDNPVLPFNDGVYFASTEKSNIIRGWIFGTTLDSKTQSLLIVNNATNVVIKVCEFQFCNDPFLGVYYHKNNKSWMESEFRVYSSANNCTFEYVSQPFLMDLEGKQGNFKNLREFVFKNIDGYFKIYSKHTPINLVRDLPQGFSALEPLVDLPIGINITRFQTLLALHRSYLTPGDSSSGWTAGAAAYYVGYLQPRTFLLKYNENGTITDAVDCALDPLSETKCTLKSFTVEKGIYQTSNFRVQPTESIVRFPNITNLCPFGEVFNATRFASVYAWNRKRISNCVADYSVLYNSASFSTFKCYGVSPTKLNDLCFTNVYADSFVIRGDEVRQIAPGQTGKIADYNYKLPDDFTGCVIAWNSNNLDSKVGGNYNYLYRLFRKSNLKPFERDISTEIYQAGSTPCNGVEGFNCYFPLQSYGFQPTNGVGYQPYRVVVLSFELLHAPATVCGPKKSTNLVKNKCVNFNFNGLTGTGVLTESNKKFLPFQQFGRDIADTTDAVRDPQTLEILDITPCSFGGVSVITPGTNTSNQVAVLYQGVNCTEVPVAIHADQLTPTWRVYSTGSNVFQTRAGCLIGAEHVNNSYECDIPIGAGICASYQTQTNSPRRARSVASQSIIAYTMSLGAENSVAYSNNSIAIPTNFTISVTTEILPVSMTKTSVDCTMYICGDSTECSNLLLQYGSFCTQLNRALTGIAVEQDKNTQEVFAQVKQIYKTPPIKDFGGFNFSQILPDPSKPSKRSFIEDLLFNKVTLADAGFIKQYGDCLGDIAARDLICVQKFNGLTVLPPLLTDEMIAQYTSALLAGTITSGWTFGAGAALQIPFAMQMAYRFNGIGVTQNVLYENQKLIANQFNSAIGKIQDSLSSTASALGKLQDVVNQNAQALNTLVKCLSSNFGAISSVLNDILSRLDKVEAEVQIDRLITGRLQCLQTYVTQQLIRAAEIRASANLAATKMSECVLGQSKRVDFCGKGYHLMSFPQSAPHGVVFLHVTYVPAQEKNFTTAPAICHDGKAHFPREGVFVSNGTHWFVTQRNFYEPQIITTDNTFVSGNCDVVIGIVNNTVYDPLQPELDSFKEELDKYFKNHTSPDVDLGDISGINASVVNIQKEIDRLNEVAKNLNESLIDLQELGKYEQYIKGGSGYIPEAPRDGQAYVRKDGEWVLLSTFL

SEQ ID NO: 6334 - protein, 1241 aa, Artificial Sequence
  SARS-CoV-2/Finland/FIN03032020A/2020__EPI_ISL_413602 spike protein (1-1211)(Q965C_S1003C) Foldon construct
MFVFLVLLPLVSSQCVNLTTRTQLPPAYTNSFTRGVYYPDKVFRSSVLHSTQDLFLPFFSNVTWFHAIHVSGTNGTKRFDNPVLPFNDGVYFASTEKSNIIRGWIFGTTLDSKTQSLLIVNNATNVVIKVCEFQFCNDPFLGVYYHKNNKSWMESEFRVYSSANNCTFEYVSQPFLMDLEGKQGNFKNLREFVFKNIDGYFKIYSKHTPINLVRDLPQGFSALEPLVDLPIGINITRFQTLLALHRSYLTPGDSSSGWTAGAAAYYVGYLQPRTFLLKYNENGTITDAVDCALDPLSETKCTLKSFTVEKGIYQTSNFRVQPTESIVRFPNITNLCPFGEVFNATRFASVYAWNRKRISNCVADYSVLYNSASFSTFKCYGVSPTKLNDLCFTNVYADSFVIRGDEVRQIAPGQTGKIADYNYKLPDDFTGCVISWNSNNLDSKVGGNYNYLYRLFRKSNLKPFERDISTEIYQAGSTPCNGVEGFNCYFPLQSYGFQPTNGVGYQPYRVVVLSFELLHAPATVCGPKKSTNLVKNKCVNFNFNGLTGTGVLTESNKKFLPFQQFGRDIADTTDAVRDPQTLEILDITPCSFGGVSVITPGTNTSNQVAVLYQGVNCTEVPVAIHADQLTPTWRVYSTGSNVFQTRAGCLIGAEHVNNSYECDIPIGAGICASYQTQTNSPRRARSVASQSIIAYTMSLGAENSVAYSNNSIAIPTNFTISVTTEILPVSMTKTSVDCTMYICGDSTECSNLLLQYGSFCTQLNRALTGIAVEQDKNTQEVFAQVKQIYKTPPIKDFGGFNFSQILPDPSKPSKRSFIEDLLFNKVTLADAGFIKQYGDCLGDIAARDLICAQKFNGLTVLPPLLTDEMIAQYTSALLAGTITSGWTFGAGAALQIPFAMQMAYRFNGIGVTQNVLYENQKLIANQFNSAIGKIQDSLSSTASALGKLQDVVNQNAQALNTLVKCLSSNFGAISSVLNDILSRLDKVEAEVQIDRLITGRLQCLQTYVTQQLIRAAEIRASANLAATKMSECVLGQSKRVDFCGKGYHLMSFPQSAPHGVVFLHVTYVPAQEKNFTTAPAICHDGKAHFPREGVFVSNGTHWFVTQRNFYEPQIITTDNTFVSGNCDVVIGIVNNTVYDPLQPELDSFKEELDKYFKNHTSPDVDLGDISGINASVVNIQKEIDRLNEVAKNLNESLIDLQELGKYEQYIKGGSGYIPEAPRDGQAYVRKDGEWVLLSTFL

SEQ ID NO: 6335 - protein, 1241 aa, Artificial Sequence
  SARS-CoV-2/France/GE1977/2020__EPI_ISL_414632 spike protein (1-1211)(Q965C_S1003C) Foldon construct
MFVFLVLLPLVSSQCVNLTTRTQLPPAYTNSFTRGVYYPDKVFRSSVLHSTQDLFLPFFSNVTWFHAIHVSGTNGTKRFDNPVLPFNDGVYFASTEKSNIIRGWIFGTTLDSKTQSLLIVNNATNVVIKVCEFQFCNDPFLGVYYHKNNKSWMESEFRVYSSANNCTFEYVSQPFLMDLEGKQGNFKNLREFVFKNIDGYFKIYSKHTPINLVRDLPQGFSALEPLVDLPIGINITRFQTLLALHRSYLTPGDSSSGWTAGAAAYYVGYLQPRTFLLKYNENGTITDAVDCALDPLSETKCTLKSFTVEKGIYQTSNFRVQPTESIVRFPNITNLCPFGEVFNATRFASVYAWNRKRISNCVADYSVLYNSASFSTFKCYGVSPTKLNDLCFTNVYADSFVIRGDEVRQIAPGQTGKIADYNYKLPDDFTGCVIAWNSNNLDSKVGGNYNYLYRLFRKSNLKPFERDISTEIYQAGSTPCNGVEGFNCYFPLQSYGFQPTNGVGYQPYRVVVLSFELLHAPATVCGPKKSTNLVKNKCVNFNFNGLTGTGVLTESNKKFLPFQQFGRDIADTTDAVRDPQTLEILDITPCSFGGVSVITPGTNTSNQVAVLYQGVNCTEVPVAIHADQLTPTWRVYSTGSNVFQTRAGCLIGAEHVNNSYECDIPIGAGICASYQTQTNSPRRARSVASQSIIAYTMSLGAENSVAYSNNSIAIPTNFTISVTTEILPVSMTKTSVDCTMYICGDSTECSNLLLQYGSFCTQLNRALTGIAVEQDKNTQEVFAQVKQIYKTPPIKDFGGFNFSQILPDPSKPSKRSFIEDLLFNKVTLADAGFIKQYGDCLGDIAARDLICAQKFNGLTVLPPLLTDEMIAQYTSALLAGTITSGWTFGAGAALQIPFAMQMAYRFNGIGVTQNVLYENQKLIANQFNSAIGKIQDSLFSTASALGKLQDVVNQNAQALNTLVKCLSSNFGAISSVLNDILSRLDKVEAEVQIDRLITGRLQCLQTYVTQQLIRAAEIRASANLAATKMSECVLGQSKRVDFCGKGYHLMSFPQSAPHGVVFLHVTYVPAQEKNFTTAPAICHDGKAHFPREGVFVSNGTHWFVTQRNFYEPQIITTDNTFVSGNCDVVIGIVNNTVYDPLQPELDSFKEELDKYFKNHTSPDVDLGDISGINASVVNIQKEIDRLNEVAKNLNESLIDLQELGKYEQYIKGGSGYIPEAPRDGQAYVRKDGEWVLLSTFL

SEQ ID NO: 6336 - protein, 1241 aa, Artificial Sequence
  SARS-CoV-2/Finland/FIN-313/2020__EPI_ISL_414641 spike protein (1-1211)(Q965C_S1003C) Foldon construct
MFVFLVLLPLVSSQCVNLTTRTQLPPAYTNSFTRGVYYPDKVFRSSVLHSTQDLFLPFFSNVTWFHAIHVSGTNGTKRFDNPVLPFNDGVYFASTEKSNIIRGWIFGTTLDSKTQSLLIVNNATNVVIKVCEFQFCNDPFLGVYYHKNNKSWMESEFRVYSSANNCTFEYVSQPFLMDLEGKQGNFKNLREFVFKNIDGYFKIYSKHTPINLVRDLPQGFSALEPLVDLPIGINITRFKTLLALHRSYLTPGDSSSGWTAGAAAYYVGYLQPRTFLLKYNENGTITDAVDCALDPLSETKCTLKSFTVEKGIYQTSNFRVQPTESIVRFPNITNLCPFGEVFNATRFASVYAWNRKRISNCVADYSVLYNSASFSTFKCYGVSPTKLNDLCFTNVYADSFVIRGDEVRQIAPGQTGKIADYNYKLPDDFTGCVIAWNSNNLDSKVGGNYNYLYRLFRKSNLKPFERDISTEIYQAGSTPCNGVEGFNCYFPLQSYGFQPTNGVGYQPYRVVVLSFELLHAPATVCGPKKSTNLVKNKCVNFNFNGLTGTGVLTESNKKFLPFQQFGRDIADTTDAVRDPQTLEILDITPCSFGGVSVITPGTNTSNQVAVLYQGVNCTEVPVAIHADQLTPTWRVYSTGSNVFQTRAGCLIGAEHVNNSYECDIPIGAGICASYQTQTNSPRRARSVASQSIIAYTMSLGAENSVAYSNNSIAIPTNFTISVTTEILPVSMTKTSVDCTMYICGDSTECSNLLLQYGSFCTQLNRALTGIAVEQDKNTQEVFAQVKQIYKTPPIKDFGGFNFSQILPDPSKPSKRSFIEDLLFNKVTLADAGFIKQYGDCLGDIAARDLICAQKFNGLTVLPPLLTDEMIAQYTSALLAGTITSGWTFGAGAALQIPFAMQMAYRFNGIGVTQNVLYENQKLIANQFNSAIGKIQDSLSSTASALGKLQDVVNQNAQALNTLVKCLSSNFGAISSVLNDILSRLDKVEAEVQIDRLITGRLQCLQTYVTQQLIRAAEIRASANLAATKMSECVLGQSKRVDFCGKGYHLMSFPQSAPHGVVFLHVTYVPAQEKNFTTAPAICHDGKAHFPREGVFVSNGTHWFVTQRNFYEPQIITTDNTFVSGNCDVVIGIVNNTVYDPLQPELDSFKEELDKYFKNHTSPDVDLGDISGINASVVNIQKEIDRLNEVAKNLNESLIDLQELGKYEQYIKGGSGYIPEAPRDGQAYVRKDGEWVLLSTFL

SEQ ID NO: 6337 - protein, 1241 aa, Artificial Sequence
  SARS-CoV-2/Netherlands/ZuidHolland_2/2020__EPI_ISL_414556 spike protein (1-1211)(Q965C_S1003C) Foldon construct
MFVFLVLLPLVSSQCVNLTTRTQLPPAYTNSFTRGVYYPDKVFRSSVLHSTQDLFLPFFSNVTWFHAIHVSGTNGTKRFDNPVLPFNDGVYFASTEKSNIIRGWIFGTTLDSKTQSLLIVNNATNVVIKVCEFQFCNDPFLGVYYHKNNKSWMESEFRVYSSANNCTFEYVSQPFLMDLEGKQGNFKNLREFVFKNIDGYFKIYSKHTPINLVRDLPQGFSALEPLVDLPIGINITRFQTLLALHRSYLTPGDSSSGWTAGAAAYYVGYLQPRTFLLKYNENGTITDAVDCALDPLSETKCTLKSFTVEKGIYQTSNFRVQPTESIVRFPNITNLCPFGEVFNATRFASVYAWNRKRISNCVADYSVLYNSASFSTFKCYGVSPTKLNDLCFTNVYADSFVIRGDEVRQIAPGQTGKIADYNYKLPDDFTGCVIAWNSNNLDSKVGGNYNYLYRLFRKSNLKPFERDISTEIYQAGSTPCNGVEGFNCYFPLQSYGFQPTNGVGYQPYRVVVLSFELLHAPATVCGPKKSTNLVKNKCVNFNFNGLTGTGVLTESNKKFLPFQQFGRDIADTTDAVRDPQTLEILDITPCSFGGVSVITPGTNTSNQVAVLYQGVNCTEVPVAIHADQLTPTWRVYSTGSNVFQTRAGCLIGAEHVNNSYECDIPIGAGICASYQTQTNSPRRARSVASQSIIAYTMSLGAENSVAYSNNSIAIPTNFTISVTTEILPVSMTKTSVDCTMYICGDSTECSNLLLQYGSFCTQLNRALTGIALEQDKNTQEVFAQVKQIYKTPPIKDFGGFNFSQILPDPSKPSKRSFIEDLLFNKVTLADAGFIKQYGDCLGDIAARDLICAQKFNGLTVLPPLLTDEMIAQYTSALLAGTITSGWTFGAGAALQIPFAMQMAYRFNGIGVTQNVLYENQKLIANQFNSAIGKIQDSLSSTASALGKLQDVVNQNAQALNTLVKCLSSNFGAISSVLNDILSRLDKVEAEVQIDRLITGRLQCLQTYVTQQLIRAAEIRASANLAATKMSECVLGQSKRVDFCGKGYHLMSFPQSAPHGVVFLHVTYVPAQEKNFTTAPAICHDGKAHFPREGVFVSNGTHWFVTQRNFYEPQIITTDNTFVSGNCDVVIGIVNNTVYDPLQPELDSFKEELDKYFKNHTSPDVDLGDISGINASVVNIQKEIDRLNEVAKNLNESLIDLQELGKYEQYIKGGSGYIPEAPRDGQAYVRKDGEWVLLSTFL

SEQ ID NO: 6338 - protein, 1241 aa, Artificial Sequence
  SARS-CoV-2/USA/WA-UW31/2020__EPI_ISL_414618 spike protein (1-1211)(Q965C_S1003C) Foldon construct
MFVFLVLLPLVSSQCVNLTTRTQLPPAYTNSFTRGVYYPDKVFRSSVLHSTQDLFLPFFSNVTWFHAIHVSGTNGTKRFDNPVLPFNDGVYFASTEKSNIIRGWIFGTTLDSKTQSLLIVNNATNVVIKVCEFQFCNDPFLGVYYHKNNKSWMESEFRVYSSANNCTFEYVSQPFLMDLEGKQGNFKNLREFVFKNIDGYFKIYSKHTPINLVRDLPQGFSALEPLVDLPIGINITRFQTLLALHRSYLTPGDSSSGWTAGAAAYYVGYLQPRTFLLKYNENGTITDAVDCALDPLSETKCTLKSFTVEKGIYQTSNFRVQPTESIVRFPNITNLCPFGEVFNATRFASVYAWNRKRISNCVADYSVLYNSASFSTFKCYGVSPTKLNDLCFTNVYADSFVIRGDEVRQIAPGQTGKIADYNYKLPDDFTGCVIAWNSNNLDSKVGGNYNYLYRLFRKSNLKPFERDISTEIYQAGSTPCNGAEGFNCYFPLQSYGFQPTNGVGYQPYRVVVLSFELLHAPATVCGPKKSTNLVKNKCVNFNFNGLTGTGVLTESNKKFLPFQQFGRDIADTTDAVRDPQTLEILDITPCSFGGVSVITPGTNTSNQVAVLYQDVNCTEVPVAIHADQLTPTWRVYSTGSNVFQTRAGCLIGAEHVNNSYECDIPIGAGICASYQTQTNSPRRARSVASQSIIAYTMSLGAENSVAYSNNSIAIPTNFTISVTTEILPVSMTKTSVDCTMYICGDSTECSNLLLQYGSFCTQLNRALTGIAVEQDKNTQEVFAQVKQIYKTPPIKDFGGFNFSQILPDPSKPSKRSFIEDLLFNKVTLADAGFIKQYGDCLGDIAARDLICAQKFNGLTVLPPLLTDEMIAQYTSALLAGTITSGWTFGAGAALQIPFAMQMAYRFNGIGVTQNVLYENQKLIANQFNSAIGKIQDSLSSTASALGKLQDVVNQNAQALNTLVKCLSSNFGAISSVLNDILSRLDKVEAEVQIDRLITGRLQCLQTYVTQQLIRAAEIRASANLAATKMSECVLGQSKRVDFCGKGYHLMSFPQSAPHGVVFLHVTYVPAQEKNFTTAPAICHDGKAHFPREGVFVSNGTHWFVTQRNFYEPQIITTDNTFVSGNCDVVIGIVNNTVYDPLQPELDSFKEELDKYFKNHTSPDVDLGDISGINASVVNIQKEIDRLNEVAKNLNESLIDLQELGKYEQYIKGGSGYIPEAPRDGQAYVRKDGEWVLLSTFL

SEQ ID NO: 6339 - protein, 1241 aa, Artificial Sequence
  SARS-CoV-2/South Korea/SNU01/2020__EPI_ISL_411929 spike protein (1-1211)(Q965C_S1003C) Foldon construct
MFVFLVLLPLVSSQCVNLTTRTQLPPAYTNSFTRGVYYPDKVFRSSVLHSTQDLFLPFFSNVTWFHAIHVSGTNGTKRFDNPVLPFNDGVYFASTEKSNIIRGWIFGTTLDSKTQSLLIVNNATNVVIKVCEFQFCNDPFLGVYYHKNNKSWMESEFRVYSSANNCTFEYVSQPFLMDLEGKQGNFKNLREFVFKNIDGYFKIYSKHTPINLVRDLPQGFWALEPLVDLPIGINITRFQTLLALHRSYLTPGDSSSGWTAGAAAYYVGYLQPRTFLLKYNENGTITDAVDCALDPLSETKCTLKSFTVEKGIYQTSNFRVQPTESIVRFPNITNLCPFGEVFNATRFASVYAWNRKRISNCVADYSVLYNSASFSTFKCYGVSPTKLNDLCFTNVYADSFVIRGDEVRQIAPGQTGKIADYNYKLPDDFTGCVIAWNSNNLDSKVGGNYNYLYRLFRKSNLKPFERDISTEIYQAGSTPCNGVEGFNCYFPLQSYGFQPTNGVGYQPYRVVVLSFELLHAPATVCGPKKSTNLVKNKCVNFNFNGLTGTGVLTESNKKFLPFQQFGRDIADTTDAVRDPQTLEILDITPCSFGGVSVITPGTNTSNQVAVLYQDVNCTEVPVAIHADQLTPTWRVYSTGSNVFQTRAGCLIGAEHVNNSYECDIPIGAGICASYQTQTNSPRRARSVASQSIIAYTMSLGAENSVAYSNNSIAIPTNFTISVTTEILPVSMTKTSVDCTMYICGDSTECSNLLLQYGSFCTQLNRALTGIAVEQDKNTQEVFAQVKQIYKTPPIKDFGGFNFSQILPDPSKPSKRSFIEDLLFNKVTLADAGFIKQYGDCLGDIAARDLICAQKFNGLTVLPPLLTDEMIAQYTSALLAGTITSGWTFGAGAALQIPFAMQMAYRFNGIGVTQNVLYENQKLIANQFNSAIGKIQDSLSSTASALGKLQDVVNQNAQALNTLVKCLSSNFGAISSVLNDILSRLDKVEAEVQIDRLITGRLQCLQTYVTQQLIRAAEIRASANLAATKMSECVLGQSKRVDFCGKGYHLMSFPQSAPHGVVFLHVTYVPAQEKNFTTAPAICHDGKAHFPREGVFVSNGTHWFVTQRNFYEPQIITTDNTFVSGNCDVVIGIVNNTVYDPLQPELDSFKEELDKYFKNHTSPDVDLGDISGINASVVNIQKEIDRLNEVAKNLNESLIDLQELGKYEQYIKGGSGYIPEAPRDGQAYVRKDGEWVLLSTFL

SEQ ID NO: 6340 - protein, 1241 aa, Artificial Sequence
  SARS-CoV-2/China/WF0004/2020__EPI_ISL_413694 spike protein (1-1211)(Q965C_S1003C) Foldon construct
MFVFLVLLPLVSSQCVNLTTRTQLPPAYTNSFTRGVYYPDKVFRSSVLHSTQDLFLPFFSNVTWFHAIHVSGTNGTKRFDNPVLPFNDGVYFASTEKSNIIRGWIFGTTLDSKTQSLLIVNNATNVVIKVCEFQFCNDPFLGVYYHKNNKSWTESEFRVYSSANNCTFEYVSQPFLMDLEGKQGNFKNLREFVFKNIDGYFKIYSKHTPINLVRDLPQGFSALEPLVDLPIGINITRFQTLLALHRSYLTPGDSSSGWTAGAAAYYVGYLQPRTFLLKYNENGTITDAVDCALDPLSETKCTLKSFTVEKGIYQTSNFRVQPTESIVRFPNITNLCPFGEVFNATRFASVYAWNRKRISNCVADYSVLYNSASFSTFKCYGVSPTKLNDLCFTNVYADSFVIRGDEVRQIAPGQTGKIADYNYKLPDDFTGCVIAWNSNNLDSKVGGNYNYLYRLFRKSNLKPFERDISTEIYQAGSTPCNGVEGFNCYFPLQSYGFQPTNGVGYQPYRVVVLSFELLHAPATVCGPKKSTNLVKNKCVNFNFNGLTGTGVLTESNKKFLPFQQFGRDIADTTDAVRDPQTLEILDITPCSFGGVSVITPGTNTSNQVAVLYQDVNCTEVPVAIHADQLTPTWRVYSTGSNVFQTRAGCLIGAEHVNNSYECDIPIGAGICASYQTQTNSPRRARSVASQSIIAYTMSLGAENSVAYSNNSIAIPTNFTISVTTEILPVSMTKTSVDCTMYICGDSTECSNLLLQYGSFCTQLNRALTGIAVEQDKNTQEVFAQVKQIYKTPPIKDFGGFNFSQILPDPSKPSKRSFIEDLLFNKVTLADAGFIKQYGDCLGDIAARDLICAQKFNGLTVLPPLLTDEMIAQYTSALLAGTITSGWTFGAGAALQIPFAMQMAYRFNGIGVTQNVLYENQKLIANQFNSAIGKIQDSLSSTASALGKLQDVVNQNAQALNTLVKCLSSNFGAISSVLNDILSRLDKVEAEVQIDRLITGRLQCLQTYVTQQLIRAAEIRASANLAATKMSECVLGQSKRFDFCGKGYHLMSFPQSAPHGVVFLHVTYVPAQEKNFTTAPAICHDGKAHFPREGVFVSNGTHWFVTQRNFYEPQIITTDNTFVSGNCDVVIGIVNNTVYDPLQPELDSFKEELDKYFKNHTSPDVDLGDISGINASVVNIQKEIDRLNEVAKNLNESLIDLQELGKYEQYIKGGSGYIPEAPRDGQAYVRKDGEWVLLSTFL

SEQ ID NO: 6341 - protein, 1241 aa, Artificial Sequence
  SARS-CoV-2/China/WF0028/2020__EPI_ISL_413791 spike protein (1-1211)(Q965C_S1003C) Foldon construct
MFVFLVLLPLVSSQCVNLTTRTQLPPAYTNSFTRGVYYPDKVFRSSVLHSTQDLFLPFFSNVTWFHAIHVSGTNGTKRFDNPVLPFNDGVYFASTEKSNIIRGWIFGTTLDSKTQSLLIVNNATNVVIKVCEFQFCNDPFLGVYYHKNNKSWMESEFRVYSSANNCTFEYVSQPFLMDLEGKQGNFKNLREFVFKNIDGYFKIYSKHTPINLVRDLPQGFSALEPLVDLPIGINITRFQTLLALHRSYLTPGDSSSGWTAGAAAYYVGYLQPRTFLLKYNENGTITDAVDCALDPLSETKCTLKSFTVEKGIYQTSNFRVQPTESIVRFPNITNLCPFGEVFNATRFASVYAWNRKRISNCVADYSVLYNSASFSTFKCYGVSPTKLNDLCFTNVYADSFVIRGDEVRQIAPGQTGKIADYNYKLPDDFTGCVIAWNSNNLDSKVGGNYNYLYRLFRKSNLKPFERDISTEIYQAGSTPCNGVEGFNCYFPLQSYGFQPTNGVGYQPYRVVVLSFELLHAPATVCGPKKSTNLVKNKCVNFNFNGLTGTGVLTESNKKFLPFQQFGRDIADTTDAVRDPQTLEILDITPCSFGGVSVITPGTNTSNQVAVLYQDVNCTEVPVAIHADQLTPTWRVYSTGSNVFQTRAGCLIGAEHVNNSYECDIPIGAGICASYQTQTNSPRRARSVASQSIIAYTMSLGAENSVAYSNNSIAIPTNFTISVTTEILPVSMTKTSVDCTMYICGDSTECSNLLLQYGSFCTQLNRALTGIAVEQDKNTQEVFAQVKQIYKTPPIKDFGGFNFSQILPDPSKPSKRSFIEDLLFNKVTLADAGFIKQYGDCLGDIAARDLICAQKFNGLTVLPPLLTDEMIAQYTSALLAGTITSGWTFGAGAALQIPFAMQMAYRFNGIGVTQNVLYENQKLIANQFNSAIGKIQDSLSSTASALGKLQDVVNQNAQALNTLVKCLSSNFGAISSVLNDILSRLDKVEAEVQIDRLITGRLQCLQTYVTQQLIRAAEIRASANLAATKMSECVLGQSKRVDFCGKGYHLMSFPQSAPHGVVFLHVTYVPAQEKNFTTAPAICHDGKAHFPREGVFVSNGTHWFVTQRNFYEPQIITTDNTFVSGNCDVVIGIVNNTVYDPLQPELESFKEELDKYFKNHTSPDVDLGDISGINASVVNIQKEIDRLNEVAKNLNESLIDLQELGKYEQYIKGGSGYIPEAPRDGQAYVRKDGEWVLLSTFL

SEQ ID NO: 6342 - protein, 1241 aa, Artificial Sequence
  SARS-CoV-2/2019-nCoV/USA-CruiseA-18/2020__MT159716.1 spike protein (1-1211)(Q965C_S1003C) Foldon construct
MFVFLVLLPLVSSQCVNLTTRTQLPPAYTNSFTRGVYYPDKVFRSSVLHSTQDLFLPFFSNVTWFHAIHVSGTNGTKRFDNPVLPFNDGVYFASTEKSNIIRGWIFGTTLDSKTQSLLIVNNATNVVIKVCEFQFCNDPFLGVYYHKNNKSWMESELRVYSSANNCTFEYVSQPFLMDLEGKQGNFKNLREFVFKNIDGYFKIYSKHTPINLVRDLPQGFSALEPLVDLPIGINITRFQTLLALHRSYLTPGDSSSGWTAGAAAYYVGYLQPRTFLLKYNENGTITDAVDCALDPLSETKCTLKSFTVEKGIYQTSNFRVQPTESIVRFPNITNLCPFGEVFNATRFASVYAWNRKRISNCVADYSVLYNSASFSTFKCYGVSPTKLNDLCFTNVYADSFVIRGDEVRQIAPGQTGKIADYNYKLPDDFTGCVIAWNSNNLDSKVGGNYNYLYRLFRKSNLKPFERDISTEIYQAGSTPCNGVEGFNCYFPLQSYGFQPTNGVGYQPYRVVVLSFELLHAPATVCGPKKSTNLVKNKCVNFNFNGLTGTGVLTESNKKFLPFQQFGRDIADTTDAVRDPQTLEILDITPCSFGGVSVITPGTNTSNQVAVLYQDVNCTEVPVAIHADQLTPTWRVYSTGSNVFQTRAGCLIGAEHVNNSYECDIPIGAGICASYQTQTNSPRRARSVASQSIIAYTMSLGAENSVAYSNNSIAIPTNFTISVTTEILPVSMTKTSVDCTMYICGDSTECSNLLLQYGSFCTQLNRALTGIAVEQDKNTQEVFAQVKQIYKTPPIKDFGGFNFSQILPDPSKPSKRSFIEDLLFNKVTLADAGFIKQYGDCLGDIAARDLICAQKFNGLTVLPPLLTDEMIAQYTSALLAGTITSGWTFGAGAALQIPFAMQMAYRFNGIGVTQNVLYENQKLIANQFNSAIGKIQDSLSSTASALGKLQDVVNQNAQALNTLVKCLSSNFGAISSVLNDILSRLDKVEAEVQIDRLITGRLQCLQTYVTQQLIRAAEIRASANLAATKMSECVLGQSKRVDFCGKGYHLMSFPQSAPHGVVFLHVTYVPAQEKNFTTAPAICHDGKAHFPREGVFVSNGTHWFVTQRNFYEPQIITTDNTFVSGNCDVVIGIVNNTVYDPLQPELDSFKEELDKYFKNHTSPDVDLGDISGINASVVNIQKEIDRLNEVAKNLNESLIDLQELGKYEQYIKGGSGYIPEAPRDGQAYVRKDGEWVLLSTFL

SEQ ID NO: 6343 - protein, 1241 aa, Artificial Sequence
  SARS-CoV-2/SARS-CoV-2/Yunnan-01/human/2020/CHN__MT049951.1 spike protein (1-1211)(Q965C_S1003C) Foldon construct
MFVFLVLLPLVSSQCVNLTTRTQLPPANTNSFTRGVYYPDKVFRSSVLHSTQDLFLPFFSNVTWFHAIHVSGTNGTKRFDNPVLPFNDGVYFASTEKSNIIRGWIFGTTLDSKTQSLLIVNNATNVVIKVCEFQFCNDPFLGVYYHKNNKSWMESEFRVYSSANNCTFEYVSQPFLMDLEGKQGNFKNLREFVFKNIDGYFKIYSKHTPINLVRDLPQGFSALEPLVDLPIGINITRFQTLLALHRSYLTPGDSSSGWTAGAAAYYVGYLQPRTFLLKYNENGTITDAVDCALDPLSETKCTLKSFTVEKGIYQTSNFRVQPTESIVRFPNITNLCPFGEVFNATRFASVYAWNRKRISNCVADYSVLYNSASFSTFKCYGVSPTKLNDLCFTNVYADSFVIRGDEVRQIAPGQTGKIADYNYKLPDDFTGCVIAWNSNNLDSKVGGNYNYLYRLFRKSNLKPFERDISTEIYQAGSTPCNGVEGFNCYFPLQSYGFQPTNGVGYQPYRVVVLSFELLHAPATVCGPKKSTNLVKNKCVNFNFNGLTGTGVLTESNKKFLPFQQFGRDIADTTDAVRDPQTLEILDITPCSFGGVSVITPGTNTSNQVAVLYQDVNCTEVPVAIHADQLTPTWRVYSTGSNVFQTRAGCLIGAEHVNNSYECDIPIGAGICASYQTQTNSPRRARSVASQSIIAYTMSLGAENSVAYSNNSIAIPTNFTISVTTEILPVSMTKTSVDCTMYICGDSTECSNLLLQYGSFCTQLNRALTGIAVEQDKNTQEVFAQVKQIYKTPPIKDFGGFNFSQILPDPSKPSKRSFIEDLLFNKVTLADAGFIKQYGDCLGDIAARDLICAQKFNGLTVLPPLLTDEMIAQYTSALLAGTITSGWTFGAGAALQIPFAMQMAYRFNGIGVTQNVLYENQKLIANQFNSAIGKIQDSLSSTASALGKLQDVVNQNAQALNTLVKCLSSNFGAISSVLNDILSRLDKVEAEVQIDRLITGRLQCLQTYVTQQLIRAAEIRASANLAATKMSECVLGQSKRVDFCGKGYHLMSFPQSAPHGVVFLHVTYVPAQEKNFTTAPAICHDGKAHFPREGVFVSNGTHWFVTQRNFYEPQIITTDNTFVSGNCDVVIGIVNNTVYDPLQPELDSFKEELDKYFKNHTSPDVDLGDISGINASVVNIQKEIDRLNEVAKNLNESLIDLQELGKYEQYIKGGSGYIPEAPRDGQAYVRKDGEWVLLSTFL

SEQ ID NO: 6344 - protein, 1241 aa, Artificial Sequence
  SARS-CoV-2/USA/WA-UW292/2020__EPI_ISL_418077 spike protein (1-1211)(Q965C_S1003C) Foldon construct
MFVFLVLLPLVSSQCVNLTTRTQLPPAYTNSFTRGVYYPDKVFRSSVLHSTQDLFLPFFSNVTWFHAIHVSGTNGTKRFDNPVLPFNDGVYFASTEKSNIIRGWIFGTTLDSKTQSLLIVNNATNVVIKVCEFQFCNDPFLGVYYHKNNKSWMESEFRVYSSANNCTFEYVSQPFLMDLEGKQGNFKNLREFVFKNIDGYFKIYSKHTPINLVRDLPQGFSALEPLVDLPIGINITRFQTLLALHRSYLTPGDSSSGWTAGAAAYYVGYLQPRTFLLKYNENGTITDAVDCALDPLSETKCTLKSFTVEKGIYQTSNFRVQPTESIVRFPNITNLCPFGEVFNATRFASVYAWNRKRISNCVADYSVLYNSASFSTFKCYGVSPTKLNDLCFTNVYADSFVIRGDEVRQIAPGQTGKIADYNYKLPDDFTGCVIAWNSNNLDSKVGGNYNYLYRLFRKSNLKPFERDISTEIYQASSTPCNGVEGFNCYFPLQSYGFQPTNGVGYQPYRVVVLSFELLHAPATVCGPKKSTNLVKNKCVNFNFNGLTGTGVLTESNKKFLPFQQFGRDIADTTDAVRDPQTLEILDITPCSFGGVSVITPGTNTSNQVAVLYQDVNCTEVPVAIHADQLTPTWRVYSTGSNVFQTRAGCLIGAEHVNNSYECDIPIGAGICASYQTQTNSPRRARSVASQSIIAYTMSLGAENSVAYSNNSIAIPTNFTISVTTEILPVSMTKTSVDCTMYICGDSTECSNLLLQYGSFCTQLNRALTGIAVEQDKNTQEVFAQVKQIYKTPPIKDFGGFNFSQILPDPSKPSKRSFIEDLLFNKVTLADAGFIKQYGDCLGDIAARDLICAQKFNGLTVLPPLLTDEMIAQYTSALLAGTITSGWTFGAGAALQIPFAMQMAYRFNGIGVTQNVLYENQKLIANQFNSAIGKIQDSLSSTASALGKLQDVVNQNAQALNTLVKCLSSNFGAISSVLNDILSRLDKVEAEVQIDRLITGRLQCLQTYVTQQLIRAAEIRASANLAATKMSECVLGQSKRVDFCGKGYHLMSFPQSAPHGVVFLHVTYVPAQEKNFTTAPAICHDGKAHFPREGVFVSNGTHWFVTQRNFYEPQIITTDNTFVSGNCDVVIGIVNNTVYDPLQPELDSFKEELDKYFKNHTSPDVDLGDISGINASVVNIQKEIDRLNEVAKNLNESLIDLQELGKYEQYIKGGSGYIPEAPRDGQAYVRKDGEWVLLSTFL

SEQ ID NO: 6345 - protein, 1241 aa, Artificial Sequence
  SARS-CoV-2/Iceland/192/2020__EPI_ISL_417819 spike protein (1-1211)(Q965C_S1003C) Foldon construct
MFVFFVLLPLVSSQCVNLTTRTQLPPAYTNSFTRGVYYPDKVFRSSVLHSTQDLFLPFFSNVTWFHAIHVSGTNGTKRFDNPVLPFNDGVYFASTEKSNIIRGWIFGTTLDSKTQSLLIVNNATNVVIKVCEFQFCNDPFLGVYYHKNNKSWMESEFRVYSSANNCTFEYVSQPFLMDLEGKQGNFKNLREFVFKNIDGYFKIYSKHTPINLVRDLPQGFSALEPLVDLPIGINITRFQTLLALHRSYLTPGDSSSGWTAGAAAYYVGYLQPRTFLLKYNENGTITDAVDCALDPLSETKCTLKSFTVEKGIYQTSNFRVQPTESIVRFPNITNLCPFGEVFNATRFASVYAWNRKRISNCVADYSVLYNSASFSTFKCYGVSPTKLNDLCFTNVYADSFVIRGDEVRQIAPGQTGKIADYNYKLPDDFTGCVIAWNSNNLDSKVGGNYNYLYRLFRKSNLKPFERDISTEIYQAGSTPCNGVEGFNCYFPLQSYGFQPTNGVGYQPYRVVVLSFELLHAPATVCGPKKSTNLVKNKCVNFNFNGLTGTGVLTESNKKFLPFQQFGRDIADTTDAVRDPQTLEILDITPCSFGGVSVITPGTNTSNQVAVLYQGVNCTEVPVAIHADQLTPTWRVYSTGSNVFQTRAGCLIGAEHVNNSYECDIPIGAGICASYQTQTNSPRRARSVASQSIIAYTMSLGAENSVAYSNNSIAIPTNFTISVTTEILPVSMTKTSVDCTMYICGDSTECSNLLLQYGSFCTQLNRALTGIAVEQDKNTQEVFAQVKQIYKTPPIKDFGGFNFSQILPDPSKPSKRSFIEDLLFNKVTLADAGFIKQYGDCLGDIAARDLICAQKFNGLTVLPPLLTDEMIAQYTSALLAGTITSGWTFGAGAALQIPFAMQMAYRFNGIGVTQNVLYENQKLIANQFNSAIGKIQDSLSSTASALGKLQDVVNQNAQALNTLVKCLSSNFGAISSVLNDILSRLDKVEAEVQIDRLITGRLQCLQTYVTQQLIRAAEIRASANLAATKMSECVLGQSKRVDFCGKGYHLMSFPQSAPHGVVFLHVTYVPAQEKNFTTAPAICHDGKAHFPREGVFVSNGTHWFVTQRNFYEPQIITTDNTFVSGNCDVVIGIVNNTVYDPLQPELDSFKEELDKYFKNHTSPDVDLGDISGINASVVNIQKEIDRLNEVAKNLNESLIDLQELGKYEQYIKGGSGYIPEAPRDGQAYVRKDGEWVLLSTFL

SEQ ID NO: 6346 - protein, 1241 aa, Artificial Sequence
  SARS-CoV-2/Belgium/ULG-6939/2020__EPI_ISL_417020 spike protein (1-1211)(Q965C_S1003C) Foldon construct
MFVFLVLLPLVSSQCVNLTTRTQLPPAYTNSFTRGVYYPDKVFRSSVLHSTQDLFLPFFSNVTWFHAIHVSGTNGTKRFDNPVLPFNDGVYFASTEKSNIIRGWIFGTTLDSKTQSLLIVNNATNVVIKVCEFQFCNDPFLGVYYHKNNKSWMESEFRVYSSANNCTFEYVSQPFLMDLEGKQGNFKNLREFVFKNIDGYFKIYSKHTPINLVRDLPQGFSALEPLVDLPIGINITRFQTLLALHRSYLTPGDSSSGWTAGAAAYYVGYLQPRTFLLKYNENGTITDAVDCALDPLSETKCTLKSFTVEKGIYQTSNFRVQPTESIVRFPNITNLCPFGEVFNATRFASVYAWNRKRISNCVADYSVLYNSASFSTFKCYGVSPTKLNDLCFTNVYADSFVIRGDEVRQIAPGQTGKIADYNYKLPDDFTGCVIAWNSNNLDSKVGGNYNYLYRLFRKSNLKPFERDISTEIYQAGSTPCNGVEGFNCYFPLQSYGFQPTNGVGYQPYRVVVLSFELLHAPATVCGPKKSTNLVKNKCVNFNFNGLTGTGVLTESNKKFLPFQQFGRDIADTTDAVRDPQTLEILDITPCSFGGVSVITPGTNTSNQVAVLYQGVNCTEVPVAIHADQLTPTWRVYSTGSNVFQTRAGCLIGAEHVNNSYECDIPIGAGICASYQTQTNSPRRARSVASQSIIAYTMSLGAENSVVYSNNSIAIPTNFTISVTTEILPVSMTKTSVDCTMYICGDSTECSNLLLQYGSFCTQLNRALTGIAVEQDKNTQEVFAQVKQIYKTPPIKDFGGFNFSQILPDPSKPSKRSFIEDLLFNKVTLADAGFIKQYGDCLGDIAARDLICAQKFNGLTVLPPLLTDEMIAQYTSALLAGTITSGWTFGAGAALQIPFAMQMAYRFNGIGVTQNVLYENQKLIANQFNSAIGKIQDSLSSTASALGKLQDVVNQNAQALNTLVKCLSSNFGAISSVLNDILSRLDKVEAEVQIDRLITGRLQCLQTYVTQQLIRAAEIRASANLAATKMSECVLGQSKRVDFCGKGYHLMSFPQSAPHGVVFLHVTYVPAQEKNFTTAPAICHDGKAHFPREGVFVSNGTHWFVTQRNFYEPQIITTDNTFVSGNCDVVIGIVNNTVYDPLQPELDSFKEELDKYFKNHTSPDVDLGDISGINASVVNIQKEIDRLNEVAKNLNESLIDLQELGKYEQYIKGGSGYIPEAPRDGQAYVRKDGEWVLLSTFL

SEQ ID NO: 6347 - protein, 1241 aa, Artificial Sequence
  SARS-CoV-2/France/HF2496/2020__EPI_ISL_418231 spike protein (1-1211)(Q965C_S1003C) Foldon construct
MFVFLVLLPLVSSQCVNLTTRTQLPPAYTNSFTRGVYYPDKVFRSSVLHSTQDLFLPFFSNVTWFHAIHVSGTNGTKRFDNPVLPFNDGVYFASTEKSNIIRGWIFGTTLDSKTQSLLIVNNATNVVIKVCEFQFCNDPFLGVYYHKNNKSWMESEFRVYSSANNCTFEYVSQPFLMDLEGKQGNFKNLREFVFKNIDGYFKIYSKHTPINLVRDLPQGFSALEPLVDLPIGINITRFQTLLALHRSYLTPGDSSSGWTAGAAAYYVGYLQPRTFLLKYNENGTITDAVDCALDPLSETKCTLKSFTVEKGIYQTSNFRVQPTESIVRFPNITNLCPFGEVFNATRFASVYAWNRKRISNCVADYSVLYNSASFSTFKCYGVSPTKLNDLCFTNVYADSFVIRGDEVRQIAPGQTGKIADYNYKLPDDFTGCVIAWNSNNLDSKVGGNYNYLYRLFRKSNLKPFERDISTEIYQAGSTPCNGVEGFNCYFPLQSYGFQPTNGVGYQPYRVVVLSFELLHAPATVCGPKKSTNLVKNKCVNFNFNGLTGTGVLTESNKKFLPFQQFGRDIADTTDAVRDPQTLEILDITPCSFGGVSVITPGTNTSNQVAVLYQGVNCTEVPVAIHADQLTPTWRVYSTGSNVFQTRAGCLIGAEHVNNSYECDIPIGAGICASYQTQTNSPRRARSVASQSIIAYTMSLGAENSVAYSNNSIAIPTNFTISVTTEILPVSMTKTSVDCTMYICGDSTECSNLLLQYGSFCTQLNRALTGIAVEQDKNTQEVFAQVKQIYKTPPIKDFGGFNFSQILPDPSKPSKRSFIEDLLFNKVTLADAGFIKQYGDCLGDIVARDLICAQKFNGLTVLPPLLTDEMIAQYTSALLAGTITSGWTFGAGAALQIPFAMQMAYRFNGIGVTQNVLYENQKLIANQFNSAIGKIQDSLSSTASALGKLQDVVNQNAQALNTLVKCLSSNFGAISSVLNDILSRLDKVEAEVQIDRLITGRLQCLQTYVTQQLIRAAEIRASANLAATKMSECVLGQSKRVDFCGKGYHLMSFPQSAPHGVVFLHVTYVPAQEKNFTTAPAICHDGKAHFPREGVFVSNGTHWFVTQRNFYEPQIITTDNTFVSGNCDVVIGIVNNTVYDPLQPELDSFKEELDKYFKNHTSPDVDLGDISGINASVVNIQKEIDRLNEVAKNLNESLIDLQELGKYEQYIKGGSGYIPEAPRDGQAYVRKDGEWVLLSTFL

SEQ ID NO: 6348 - protein, 1241 aa, Artificial Sequence
  SARS-CoV-2/USA/WA-UW291/2020__EPI_ISL_418076 spike protein (1-1211)(Q965C_S1003C) Foldon construct
MFVFLVLLPLVSSQCVNLTTRTQLPPAYTNSFTRGVYYPDKVFRSSVLHSTQDLFLPFFSNVTWFHAIHVSGTNGTKRFDNPVLPFNDGVYFASTEKSNIIRGWIFGTTLDSKTQSLLIVNNATNVVIKVCEFQFCNDPFLGVYYHKNNKSWMESEFRVYSSANNCTFEYVSQPFLMDLEGKQGNFKNLREFVFKNIDGYFKIYSKHTPINLVRDLPQGFSALEPLVDLPIGINITRFQTLLALHRSYLTPGDSSSGWTAGAAAYYVGYLQPRTFLLKYNENGTITDAVDCALDPLSETKCTLKSFTVEKGIYQTSNFRVQPTESIVRFPNITNLCPFGEVFNATRFASVYAWNRKRISNCVADYSVLYNSASFSTFKCYGVSPTKLNDLCFTNVYADSFVIRGDEVRQIAPGQTGKIADYNYKLPDDFTGCVIAWNSNNLDSKVGGNYNYLYRLFRKSNLKPFERDISTEIYQAGSTPCNGVEGFNCYFPLQSYGFQPTNGVGYQPYRVVVLSFELLHAPATVCGPKKSTNLVKNKCVNFNFNGLTGTGVLTESNKKFLPFQQFGRDIADTTDAVRDPQTLEILDITPCSFGGVSVITPGTNTSNQVAVLYQGVNCTEVPVAIHADQLTPTWRVYSTGSNVFQTRAGCLIGAEHVNNSYECDIPIGAGICASYQTQTNSPRRARSVASQSIIAYTMSLGAENSVAYSNNSIAIPTNFTISVTTEILPVSMTKTSVDCTMYICGDSTECSNLLLQYGSFCTQLNRALTGIAVEQDKNTQEVFAQVKQIYKTPPIKDFGGFNFSQILPDPSKPSKRSFIEDLLFNKVTLADAGFIKQYGDCLGDIAARDLICAQKFNGLTVLPPLLTDEMIAQYTSALLAGTITSGWTFGAGAALQIPFAMQMAYRFNGIGVTQNVLYENQKLIANQFNSAIGKIQYSLSSTASALGKLQDVVNQNAQALNTLVKCLSSNFGAISSVLNDILSRLDKVEAEVQIDRLITGRLQCLQTYVTQQLIRAAEIRASANLAATKMSECVLGQSKRVDFCGKGYHLMSFPQSAPHGVVFLHVTYVPAQEKNFTTAPAICHDGKAHFPREGVFVSNGTHWFVTQRNFYEPQIITTDNTFVSGNCDVVIGIVNNTVYDPLQPELDSFKEELDKYFKNHTSPDVDLGDISGINASVVNIQKEIDRLNEVAKNLNESLIDLQELGKYEQYIKGGSGYIPEAPRDGQAYVRKDGEWVLLSTFL

SEQ ID NO: 6349 - protein, 1241 aa, Artificial Sequence; identical to SEQ ID NO: 6312
  SARS-CoV-2/Portugal/PT0034/2020__EPI_ISL_418019 spike protein (1-1211)(Q965C_S1003C) Foldon construct

SEQ ID NO: 6350 - protein, 1241 aa, Artificial Sequence
  SARS-CoV-2/Iceland/202/2020__EPI_ISL_417750 spike protein (1-1211)(Q965C_S1003C) Foldon construct
MFVFLVLLPLVSSQCVNLTTRTQLPPAYTNSFTRGVYYPDKVFRSSVLHSTQDLFLPFFSNVTWFHAIHVSGTNGTKRFDNPVLPFNDGVYFASTEKSNIIRGWIFGTTLDSKTQSLLIVNNATNVVIKVCEFQFCNDPFLGVYYHKNNKSWMESEFRVYSSANNCTFEYVSQPFLMDLEGKQGNFKNLREFVFKNIDGYFKIYSKHTPINLVRDLPQGFSALEPLVDLPIGINITRFQTLLALHRSYLTPGDSSSGWTAGAAAYYVGYLQPRTFLLKYNENGTITDAVDCALDPLSETKCTLKSFTVEKGIYQTSNFRVQPTESIVRFPNITNLCPFGEVFNATRFASVYAWNRKRISNCVADYSVLYNSASFSTFKCYGVSPTKLNDLCFTNVYADSFVIRGDEVRQIAPGQTGKIADYNYKLPDDFTGCVIAWNSNNLDSKVGGNYNYLYRLFRKSNLKPFERDISTEIYQAGSTPCNGVEGFNCYFPLQSYGFQPTNGVGYQPYRVVVLSFELLHAPATVCGPKKSTNLVKNKCVNFNFNGLTGTGVLTESNKKFLPFQQFGRDIADTTDAVRDPQTLEILDITPCSFGGVSVITPGTNTSNQVAVLYQDVNCTEVPVAIHADQLTPTWRVYSTGSNVFQTRAGCLIGAEHVNNSYECDIPIGAGICASYQTQTNSPRRARSVASQSIIAYTMSLGAENSVAYSNNSIAIPTNFTISVTTEILPVSMTKTSVDCTMYICGDSTECSNLLLQYGSFCTQLNRALTGIAVEQDKNTQEVFAQVKQIYKTPPIKDFGGFNFSQILPDPSKPSKRSFIEDLLFNKVTLADAGFIKQYGDCLGDIAARDLICAQKFNGLTVLPPLLTDEMIAQYTSALLAGTITSGWTFGAGAALQIPFAMQMAYRFNGIGVTQNVLYENQKLIANQFNSAIGKIQDSLSSTASALGKLQDVVNQNAQALNTLVKCLSSNFGAISSVLNDILSRLDKVEAEVQIDRLITGRLQCLQTYVTQQLIRAAEIRASANLAATKMSECVLGQSKRVDFCGKGYHLMSFPQSAPHGVVFLHVTYVPAQEKNFTTAPAICHDGKAHFPREGVFVSNGTHWFVTQRNFYEPQIITTDNTFVSGNCDVVIGIVNNTVYDPLQPELDSFKEELDKYFKNHTSPDVDLGDIPGINASVVNIQKEIDRLNEVAKNLNESLIDLQELGKYEQYIKGGSGYIPEAPRDGQAYVRKDGEWVLLSTFL

SEQ ID NO: 6351 - protein, 1241 aa, Artificial Sequence
  SARS-CoV-2/USA/WA-UW261/2020__EPI_ISL_418046 spike protein (1-1211)(Q965C_S1003C) Foldon construct
MFVFLVLLPLVSSQCVNLTTRTQLPPAYTNSFTRGVYYPDKVFRSSVLHSTQDLFLPFFSNVTWFHAIHVSGTNGTKRFDNPVLPFNDGVYFASTEKSNIIRGWIFGTTLDSKTQSLLIVNNATNVVIKVCEFQFCNDPFLGVYYHKNNKSWMESEFRVYSSANNCTFEYVSQPFLMDLEGKQGNFKNLREFVFKNIDGYFKIYSKHTPINLVRDLPQGFSALEPLVDLPIGINITRFQTLLALHRSYLTPGDSSSGWTAGAAAYYVGYLQPRTFLLKYNENGTITDAVDCALDPLSETKCTLKSFTVEKGIYQTSNFRVQPTESIVRFPNITNLCPFGEVFNATRFTSVYAWNRKRISNCVADYSVLYNSASFSTFKCYGVSPTKLNDLCFTNVYADSFVIRGDEVRQIAPGQTGKIADYNYKLPDDFTGCVIAWNSNNLDSKVGGNYNYLYRLFRKSNLKPFERDISTEIYQAGSTPCNGVEGFNCYFPLQSYGFQPTNGVGYQPYRVVVLSFELLHAPATVCGPKKSTNLVKNKCVNFNFNGLTGTGVLTESNKKFLPFQQFGRDIADTTDAVRDPQTLEILDITPCSFGGVSVITPGTNTSNQVAVLYQDVNCTEVPVAIHADQLTPTWRVYSTGSNVFQTRAGCLIGAEHVNNSYECDIPIGAGICASYQTQTNSPRRARSVASQSIIAYTMSLGAENSVAYSNNSIAIPTNFTISVTTEILPVSMTKTSVDCTMYICGDSTECSNLLLQYGSFCTQLNRALTGIAVEQDKNTQEVFAQVKQIYKTPPIKDFGGFNFSQILPDPSKPSKRSFIEDLLFNKVTLADAGFIKQYGDCLGDIAARDLICAQKFNGLTVLPPLLTDEMIAQYTSALLAGTITSGWTFGAGAALQIPFAMQMAYRFNGIGVTQNVLYENQKLIANQFNSAIGKIQDSLSSTASALGKLQDVVNQNAQALNTLVKCLSSNFGAISSVLNDILSRLDKVEAEVQIDRLITGRLQCLQTYVTQQLIRAAEIRASANLAATKMSECVLGQSKRVDFCGKGYHLMSFPQSAPHGVVFLHVTYVPAQEKNFTTAPAICHDGKAHFPREGVFVSNGTHWFVTQRNFYEPQIITTDNTFVSGNCDVVIGIVNNTVYDPLQPELDSFKEELDKYFKNHTSPDVDLGDISGINASVVNIQKEIDRLNEVAKNLNESLIDLQELGKYEQYIKGGSGYIPEAPRDGQAYVRKDGEWVLLSTFL

SEQ ID NO: 6352 - protein, 1241 aa, Artificial Sequence
  SARS-CoV-2/Portugal/PT0035/2020__EPI_ISL_418020 spike protein (1-1211)(Q965C_S1003C) Foldon construct
MFVFLVLLPLVSSQCVNLTTRTQLPPAYTNSFTRGVYYPDKVFRSSVLHSTQDLFLPFFSNVTWFHAIHVSGTNGTKRFDNPVLPFNDGVYFASTEKSNIIRGWIFGTTLDSKTQSLLIVNNATNVVIKVCEFQFCNDPFLGVYYHKNNKSWMESEFRVYSSANNCTFEYVSQPFLMDLEGKQGNFKNLREFVFKNIDGYFKIYSKHTPINLVRDLPQGFSALEPLVDLPIGINITRFQTLLALHRSYLTPGDSSSGWTAGAAAYYVGYLQPRTFLLKYNENGTITDAVDCALDPLSETKCTLKSFTVEKGIYQTSNFRVQPTESIVRFPNITNLCPFGEVFNATRFASVYAWNRKRISNCVADYSVLYNSASFSTFKCYGVSPTKLNDLCFTNVYADSFVIRGDEVRQIAPGQTGKIADYNYKLPDDFTGCVIAWNSNNLDSKVGGNYNYLYRLFRKSNLKPFERDISTEIYQAGSTPCNGVEGFNCYFPLQSYGFQPTNGVGYQPYRVVVLSFELLHAPATVCGPKKSTNLVKNKCVNFNFNGLTGTGVLTESNKKFLPFQQFGRDIADTTDAVRDPQTLEILDITPCSFGGVSVITPGTNTSNQVAVLYQDVNCTEVPVAIHADQLTPTWRVYSTGSNVFQTRAGCLIGAEHVNNSYECDIPIGAGICASYQTQTNSPRRARSVASQSIIAYTMSLGAENSVAYSNNSIAIPTNFTISVTTEILPVSMTKTSVDCTMYICGDSTECSNLLLQYGSFCTQLNRALTGIAVEQDKNTQEVFAQVKQIYKTPPIKDFGGFNFSQILPDPSKPSKRSFIEDLLFNKVTLADAGFIKQYGDCLGDISARDLICAQKFNGLTVLPPLLTDEMIAQYTSALLAGTITSGWTFGAGAALQIPFAMQMAYRFNGIGVTQNVLYENQKLIANQFNSAIGKIQDSLSSTASALGKLQDVVNQNAQALNTLVKCLSSNFGAISSVLNDILSRLDKVEAEVQIDRLITGRLQCLQTYVTQQLIRAAEIRASANLAATKMSECVLGQSKRVDFCGKGYHLMSFPQSAPHGVVFLHVTYVPAQEKNFTTAPAICHDGKAHFPREGVFVSNGTHWFVTQRNFYEPQIITTDNTFVSGNCDVVIGIVNNTVYDPLQPELDSFKEELDKYFKNHTSPDVDLGDISGINASVVNIQKEIDRLNEVAKNLNESLIDLQELGKYEQYIKGGSGYIPEAPRDGQAYVRKDGEWVLLSTFL

SEQ ID NO: 6353 - protein, 1241 aa, Artificial Sequence
  SARS-CoV-2/USA/NY-NYUMC7/2020__EPI_ISL_418192 spike protein (1-1211)(Q965C_S1003C) Foldon construct
MFVFLVLLPLVSSQCVNLTTRTQLPPAYTNSFTRGVYYPDKVFRSSVLHSTQDLFLPFFSNVTWFHAIHVSGTNGTKRFDNPVLPFNDGVYFASTEKSNIIRGWIFGTTLDSKTQSLLIVNNATNVVIKVCEFQFCNDPFLGVYHHKNNKSWMESEFRVYSSANNCTFEYVSQPFLMDLEGKQGNFKNLREFVFKNIDGYFKIYSKHTPINLVRDLPQGFSALEPLVDLPIGINITRFQTLLALHRSYLTPGDSSSGWTAGAAAYYVGYLQPRTFLLKYNENGTITDAVDCALDPLSETKCTLKSFTVEKGIYQTSNFRVQPTESIVRFPNITNLCPFGEVFNATRFASVYAWNRKRISNCVADYSVLYNSASFSTFKCYGVSPTKLNDLCFTNVYADSFVIRGDEVRQIAPGQTGKIADYNYKLPDDFTGCVIAWNSNNLDSKVGGNYNYLYRLFRKSNLKPFERDISTEIYQAGSTPCNGVEGFNCYFPLQSYGFQPTNGVGYQPYRVVVLSFELLHAPATVCGPKKSTNLVKNKCVNFNFNGLTGTGVLTESNKKFLPFQQFGRDIADTTDAVRDPQTLEILDITPCSFGGVSVITPGTNTSNQVAVLYQGVNCTEVPVAIHADQLTPTWRVYSTGSNVFQTRAGCLIGAEHVNNSYECDIPIGAGICASYQTQTNSPRRARSVASQSIIAYTMSLGAENSVAYSNNSIAIPTNFTISVTTEILPVSMTKTSVDCTMYICGDSTECSNLLLQYGSFCTQLNRALTGIAVEQDKNTQEVFAQVKQIYKTPPIKDFGGFNFSQILPDPSKPSKRSFIEDLLFNKVTLADAGFIKQYGDCLGDIAARDLICAQKFNGLTVLPPLLTDEMIAQYTSALLAGTITSGWTFGAGAALQIPFAMQMAYRFNGIGVTQNVLYENQKLIANQFNSAIGKIQDSLSSTASALGKLQDVVNQNAQALNTLVKCLSSNFGAISSVLNDILSRLDKVEAEVQIDRLITGRLQCLQTYVTQQLIRAAEIRASANLAATKMSECVLGQSKRVDFCGKGYHLMSFPQSAPHGVVFLHVTYVPAQEKNFTTAPAICHDGKAHFPREGVFVSNGTHWFVTQRNFYEPQIITTDNTFVSGNCDVVIGIVNNTVYDPLQPELDSFKEELDKYFKNHTSPDVDLGDISGINASVVNIQKEIDRLNEVAKNLNESLIDLQELGKYEQYIKGGSGYIPEAPRDGQAYVRKDGEWVLLSTFL

SEQ ID NO: 6354 - protein, 1241 aa, Artificial Sequence
  SARS-CoV-2/Iceland/189/2020__EPI_ISL_417709 spike protein (1-1211)(Q965C_S1003C) Foldon construct
MFVFLVLLPLVSSQCVNLTTRTQLPPAYTNSFTRGVYYPDKVFRSSVLHSTQDLFLPFFSNVTWFHAIHVSGTNGTKRFDNPVLPFNDGVYFASTEKSNIIRGWIFGTTLDSKTQSLLIVNNATNVVIKVCEFQFCNDPFLGVYYHKNNKSWMESEFRVYSSANNCTFEYVSQPFLMDLEGKQGNFKNLREFVFKNIDGYFKIYSKHTPINLVRDLPQGFSALEPLVDLPIGINITRFQTLLALHRSYLTPGDSSSGWTAGAAAYYVGYLQPRTFLLKYNENGTITDAVDCALDPLSETKCTLKSFTVEKGIYQTSNFRVQPTESIVRFPNITNLCPFGEVFNATRFASVYAWNRKRISNCVADYSVLYNSASFSTFKCYGVSPTKLNDLCFTNVYADSFVIRGDEVRQIAPGQTGKIADYNYKLPDDFTGCVIAWNSNNLDSKVGGNYNYLYRLFRKSNLKPFERDISTEIYQAGSTPCNGVEGFNCYFPLQSYGFQPTNGVGYQPYRVVVLSFELLHAPATVCGPKKSTNLVKNKCVNFNFNGLTGTGVLTESNKKFLPFQQFGRDIADTTDAVRDPQTLEILDITPCSFGGVSVITPGTNTSNQVAVLYQGVNCTEVPVAIHADQLTPTWRVYSTGSNVFQTRAGCLIGAEHVNNSYECDIPIGAGICASYQTQTNSPRRARSVASQSIIAYTMSLGAENSVAYSNNSIAIPTNFTISVTTEILPVSMTKTSVDCTMYICGDSTECSNLLLQYGSFCTQLNRALTGIAVEQDKNTQEVFAQVKQIYKTPPIKDFGGFNFSQILPDPSKPSKRSFIEDLLFNKVTLADAGFTKQYGDCLGDIAARDLICAQKFNGLTVLPPLLTDEMIAQYTSALLAGTITSGWTFGAGAALQIPFAMQMAYRFNGIGVTQNVLYENQKLIANQFNSAIGKIQDSLSSTASALGKLQDVVNQNAQALNTLVKCLSSNFGAISSVLNDILSRLDKVEAEVQIDRLITGRLQCLQTYVTQQLIRAAEIRASANLAATKMSECVLGQSKRVDFCGKGYHLMSFPQSAPHGVVFLHVTYVPAQEKNFTTAPAICHDGKAHFPREGVFVSNGTHWFVTQRNFYEPQIITTDNTFVSGNCDVVIGIVNNTVYDPLQPELDSFKEELDKYFKNHTSPDVDLGDISGINASVVNIQKEIDRLNEVAKNLNESLIDLQELGKYEQYIKGGSGYIPEAPRDGQAYVRKDGEWVLLSTFL

SEQ ID NO: 6355 - protein, 1241 aa, Artificial Sequence
  SARS-CoV-2/Australia/NSW56/2020__EPI_ISL_417408 spike protein (1-1211)(Q965C_S1003C) Foldon construct
MFVFLVLLPLVSSQCVNLTTRTQLPPAYTNSFTRGVYYPDKVFRSSVLHSTQDLFLPFFSNVTWFHAIHVSGTNGTKRFDNPVLPFNDGVYFASTEKSNIIRGWIFGTTLDSKTQSLLIVNNATNVVIKVCEFQFCNDPFLGVYYHKNNKSWMESEFRVYSSANNCTFEYVSQPFLMDLEGKQGNFKNLREFVFKNIDGYFKIYSKHTPINLVRDLPQGFSALEPLVDLPIGINITRFQTLLALHRSYLTPGDSSSGWTAGAAAYYVGYLQPRTFLLKYNENGTITDAVDCALDPLSETKCTLKSFTVEKGIYQTSNFRVQPTESIVRFPNITNLCPFGEVFNATRFASVYAWNRKRISNCVADYSVLYNSASFSTFKCYGVSPTKLNDLCFTNVYADSFVIRGDEVRQIAPGQTGKIADYNYKLPDDFTGCVIAWNSNNLDSKVGGNYNYLYRLFRKSNLKPFERDISTEIYQAGSTPCNGVEGFNCYFPLQSYGFQPTNGVGYQPYRVVVLSFELLHAPATVCGPKKSTNLVKNKCVNFNFNGLTGTGVLTESNKKFLPFQQFGRDIADTTDAVRDPQTLEILDITPCSFGGVSVITPGTNTSNQVAVLYQDVNCTEVPVAIHADQLTPTWRVYSTGSNVFQTRAGCLIGAEHVNNSYECDIPIGAGICASYQTQTNSPRRARSVASQSIIAYTMSLGAENSVAYSNNSIAIPTNFTISVTTEILPVSMTKTSVDCTMYICGDSTECSNLLLQYGSFCTQLNRALTGIAVEQDKNTQEVFAQVKQIYKTPPIKDFGGFNFSQILPDSSKPSKRSFIEDLLFNKVTLADAGFIKQYGDCLGDIAARDLICAQKFNGLTVLPPLLTDEMIAQYTSALLAGTITSGWTFGAGAALQIPFAMQMAYRFNGIGVTQNVLYENQKLIANQFNSAIGKIQDSLSSTASALGKLQDVVNQNAQALNTLVKCLSSNFGAISSVLNDILSRLDKVEAEVQIDRLITGRLQCLQTYVTQQLIRAAEIRASANLAATKMSECVLGQSKRVDFCGKGYHLMSFPQSAPHGVVFLHVTYVPAQEKNFTTAPAICHDGKAHFPREGVFVSNGTHWFVTQRNFYEPQIITTDNTFVSGNCDVVIGIVNNTVYDPLQPELDSFKEELDKYFKNHTSPDVDLGDISGINASVVNIQKEIDRLNEVAKNLNESLIDLQELGKYEQYIKGGSGYIPEAPRDGQAYVRKDGEWVLLSTFL

SEQ ID NO: 6356 - protein, 1241 aa, Artificial Sequence
  SARS-CoV-2/Iceland/280/2020__EPI_ISL_417608 spike protein (1-1211)(Q965C_S1003C) Foldon construct
MFVFLVLLPLVSSQCVNLTTRTQLPPAYTNSFTRGVYYPDKVFRSSVLHSTQDLFLPFFSNVTWFHAIHVSGTNGTKRFDNPVLPFNDGVYFASTEKSNIIRGWIFGTTLDSKTQSLLIVNNATNVVIKVCEFQFCNDPFLGVYYHKNNKSWMESEFRVYSSANNCTFEYVSQPFLMDLEGKQGNFKNLREFVFKNIDGYFKIYSKHTPINLVRDLPQGFSALEPLVDLPIGINITRFQTLLALHRSYLTPGDSSSGWTAGAAAYYVGYLQPRTFLLKYNENGTITDAVDCALDPLSETKCTLKSFTVEKGIYQTSNFRVQPTESIVRFPNITNLCPFGEVFNATRFASVYAWNRKRISNCVADYSVLYNSASFSTFKCYGVSPTKLNDLCFTNVYADSFVIRGDEVRQIAPGQTGKIADYNYKLPDDFTGCVIAWNSNNLDSKVGGNYNYLYRLFRKSNLKPFERDISTEIYQAGSTPCNGVEGFNCYFPLQSYGFQPTNGVGYQPYRVVVLSFELLHAPATVCGPKKSTNLVKNKCVNFNFNGLTGTGVLTESNKKFLPFQQFGRDIADTTDAVRDPQTLEILDITPCSFGGVSVITPGTNTSNQVAVLYQGVNCTEVPVAIHADQLTPTWRVYSTGSNVFQTRAGCLIGAEHVNNSYECDIPIGAGICASYHTQTNSPRRARSVASQSIIAYTMSLGAENSVAYSNNSIAIPTNFTISVTTEILPVSMTKTSVDCTMYICGDSTECSNLLLQYGSFCTQLNRALTGIAVEQDKNTQEVFAQVKQIYKTPPIKDFGGFNFSQILPDPSKPSKRSFIEDLLFNKVTLADAGFIKQYGDCLGDIAARDLICAQKFNGLTVLPPLLTDEMIAQYTSALLAGTITSGWTFGAGAALQIPFAMQMAYRFNGIGVTQNVLYENQKLIANQFNSAIGKIQDSLSSTASALGKLQDVVNQNAQALNTLVKCLSSNFGAISSVLNDILSRLDKVEAEVQIDRLITGRLQCLQTYVTQQLIRAAEIRASANLAATKMSECVLGQSKRVDFCGKGYHLMSFPQSAPHGVVFLHVTYVPAQEKNFTTAPAICHDGKAHFPREGVFVSNGTHWFVTQRNFYEPQIITTDNTFVSGNCDVVIGIVNNTVYDPLQPELDSFKEELDKYFKNHTSPDVDLGDISGINASVVNIQKEIDRLNEVAKNLNESLIDLQELGKYEQYIKGGSGYIPEAPRDGQAYVRKDGEWVLLSTFL

SEQ ID NO: 6357 - protein, 1241 aa, Artificial Sequence; identical to SEQ ID NO: 6312
  SARS-CoV-2/Iceland/247/2020__EPI_ISL_417575 spike protein (1-1211)(Q965C_S1003C) Foldon construct

SEQ ID NO: 6358 - protein, 1241 aa, Artificial Sequence
  SARS-CoV-2/Iceland/238/2020__EPI_ISL_417566 spike protein (1-1211)(Q965C_S1003C) Foldon construct
MFVFLVLLPLVSSQCVNLTTRTQLPPAYTNSFTRGVYYPDKVFRSSVLHSTQDLFLPFFSNVTWFHAIHVSGTNGTKRFDNPVLPFNDGVYFASTEKSNIIRGWIFGTTLDSKTQSLLIVNNATNVVIKVCEFQFCNDPFLGVYYHKNNKSWMESEFRVYSSANNCTFEYVSQPFLMDLEGKQGNFKNLREFVFKNIDGYFKIYSKHTPINLVRDLPQGFSALEPLVDLPIGINITRFQTLLALHRSYLTPGDSSSGWTAGAAAYYVGYLQPRTFLLKYNENGTITDAVDCALDPLSETKCTLKSFTVEKGIYQTSNFRVQPTESIVRFPNITNLCPFGEVFNATRFASVYAWNRKRISNCVADYSVLYNSASFSTFKCYGVSPTKLNDLCFTNVYADSFVIRGDEVRQIAPGQTGKIADYNYKLPDDFTGCVIAWNSNNLDSKVGGNYNYLYRLFRKSNLKPFERDISTEIYQAGSTPCNGVEGFNCYFPLQSYGFQPTNGVGYQPYRVVVLSFELLHAPATVCGPKKSTNLVKNKCVNFNFNGLTGTGVLTESNKKFLPFQQFGRDIADTTDAVRDPQTLEILDITPCSFGGVSVITPGTNTSNQVAVLYQGVNCTEVPVAIHADQLTPTWRVYSTGSNVFQTRAGCLIGAEHVNNSYECDIPIGAGICASYQTQTNSPRRARSVASQSIIAYTMSLGAENSVAYSNNSIAIPTNFTISVTTEILPVSMTKTSVDCTMYICGDSTECSNLLLQYGSFCTQLNRALTGIAVEQDKNTQEVFAQVKQIYKTPPIKDFGGFNFSQILPDPSKPSKRSFIEDLLFNKVTLADVGFIKQYGDCLGDIAARDLICAQKFNGLTVLPPLLTDEMIAQYTSALLAGTITSGWTFGAGAALQIPFAMQMAYRFNGIGVTQNVLYENQKLIANQFNSAIGKIQDSLSSTASALGKLQDVVNQNAQALNTLVKCLSSNFGAISSVLNDILSRLDKVEAEVQIDRLITGRLQCLQTYVTQQLIRAAEIRASANLAATKMSECVLGQSKRVDFCGKGYHLMSFPQSAPHGVVFLHVTYVPAQEKNFTTAPAICHDGKAHFPREGVFVSNGTHWFVTQRNFYEPQIITTDNTFVSGNCDVVIGIVNNTVYDPLQPELDSFKEELDKYFKNHTSPDVDLGDISGINASVVNIQKEIDRLNEVAKNLNESLIDLQELGKYEQYIKGGSGYIPEAPRDGQAYVRKDGEWVLLSTFL

SEQ ID NO: 6359 - protein, 1241 aa, Artificial Sequence
  SARS-CoV-2/Greece/16/2020__EPI_ISL_418265 spike protein (1-1211)(Q965C_S1003C) Foldon construct
MFVFLVLLPLVSSQCVNLTTRTQLPPAYTNSFTRGVYYPDKVFRSSVLHSTQDLFLPFFSNVTWFHAIHVSGTNGTKRFDNPVLPFNDGVYFASTEKSNIIRGWIFGTTLDSKTQSLLIVNNATNVVIKVCEFQFCNDPFLGVYYHKNNKSWMESEFRVYSSANNCTFEYVSQPFLMDLEGKQGNFKNLREFVFKNVDGYFKIYSKHTPINLVRDLPQGFSALEPLVDLPIGINITRFQTLLALHRSYLTPGDSSSGWTAGAAAYYVGYLQPRTFLLKYNENGTITDAVDCALDPLSETKCTLKSFTVEKGIYQTSNFRVQPTESIVRFPNITNLCPFGEVFNATRFASVYAWNRKRISNCVADYSVLYNSASFSTFKCYGVSPTKLNDLCFTNVYADSFVIRGDEVRQIAPGQTGKIADYNYKLPDDFTGCVIAWNSNNLDSKVGGNYNYLYRLFRKSNLKPFERDISTEIYQAGSTPCNGVEGFNCYFPLQSYGFQPTNGVGYQPYRVVVLSFELLHAPATVCGPKKSTNLVKNKCVNFNFNGLTGTGVLTESNKKFLPFQQFGRDIADTTDAVRDPQTLEILDITPCSFGGVSVITPGTNTSNQVAVLYQDVNCTEVPVAIHADQLTPTWRVYSTGSNVFQTRAGCLIGAEHVNNSYECDIPIGAGICASYQTQTNSPRRARSVASQSIIAYTMSLGAENSVAYSNNSIAIPTNFTISVTTEILPVSMTKTSVDCTMYICGDSTECSNLLLQYGSFCTQLNRALTGIAVEQDKNTQEVFAQVKQIYKTPPIKDFGGFNFSQILPDPSKPSKRSFIEDLLFNKVTLADAGFIKQYGDCLGDIAARDLICAQKFNGLTVLPPLLTDEMIAQYTSALLAGTITSGWTFGAGAALQIPFAMQMAYRFNGIGVTQNVLYENQKLIANQFNSAIGKIQDSLSSTASALGKLQDVVNQNAQALNTLVKCLSSNFGAISSVLNDILSRLDKVEAEVQIDRLITGRLQCLQTYVTQQLIRAAEIRASANLAATKMSECVLGQSKRVDFCGKGYHLMSFPQSAPHGVVFLHVTYVPAQEKNFTTAPAICHDGKAHFPREGVFVSNGTHWFVTQRNFYEPQIITTDNTFVSGNCDVVIGIVNNTVYDPLQPELDSFKEELDKYFKNHTSPDVDLGDISGINASVVNIQKEIDRLNEVAKNLNESLIDLQELGKYEQYIKGGSGYIPEAPRDGQAYVRKDGEWVLLSTFL

SEQ ID NO: 6360 - protein, 1241 aa, Artificial Sequence
  SARS-CoV-2/Iceland/319/2020__EPI_ISL_417648 spike protein (1-1211)(Q965C_S1003C) Foldon construct
MFVFLVLLPLVSSQCVNLTTRTQLPPAYTNSFTRGVYYPDKVFRSSVLHSTQDLFLPFFSNVTWFHAIHVSGTNGTKRFDNPVLPFNDGVYFASTEKSNIIRGWIFGTTLDSKTQSLLIVNNATNVVIKVCEFQFCNDPFLGVYYHKNNKSWMESEFRVYSSANNCTFEYVSQPFLIDLEGKQGNFKNLREFVFKNIDGYFKIYSKHTPINLVRDLPQGFSALEPLVDLPIGINITRFQTLLALHRSYLTPGDSSSGWTAGAAAYYVGYLQPRTFLLKYNENGTITDAVDCALDPLSETKCTLKSFTVEKGIYQTSNFRVQPTESIVRFPNITNLCPFGEVFNATRFASVYAWNRKRISNCVADYSVLYNSASFSTFKCYGVSPTKLNDLCFTNVYADSFVIRGDEVRQIAPGQTGKIADYNYKLPDDFTGCVIAWNSNNLDSKVGGNYNYLYRLFRKSNLKPFERDISTEIYQAGSTPCNGVEGFNCYFPLQSYGFQPTNGVGYQPYRVVVLSFELLHAPATVCGPKKSTNLVKNKCVNFNFNGLTGTGVLTESNKKFLPFQQFGRDIADTTDAVRDPQTLEILDITPCSFGGVSVITPGTNTSNQVAVLYQGVNCTEVPVAIHADQLTPTWRVYSTGSNVFQTRAGCLIGAEHVNNSYECDIPIGAGICASYQTQTNSPRRARSVASQSIIAYTMSLGAENSVAYSNNSIAIPTNFTISVTTEILPVSMTKTSVDCTMYICGDSTECSNLLLQYGSFCTQLNRALTGIAVEQDKNTQEVFAQVKQIYKTPPIKDFGGFNFSQILPDPSKPSKRSFIEDLLFNKVTLADAGFIKQYGDCLGDIAARDLICAQKFNGLTVLPPLLTDEMIAQYTSALLAGTITSGWTFGAGAALQIPFAMQMAYRFNGIGVTQNVLYENQKLIANQFNSAIGKIQDSLSSTASALGKLQDVVNQNAQALNTLVKCLSSNFGAISSVLNDILSRLDKVEAEVQIDRLITGRLQCLQTYVTQQLIRAAEIRASANLAATKMSECVLGQSKRVDFCGKGYHLMSFPQSAPHGVVFLHVTYVPAQEKNFTTAPAICHDGKAHFPREGVFVSNGTHWFVTQRNFYEPQIITTDNTFVSGNCDVVIGIVNNTVYDPLQPELDSFKEELDKYFKNHTSPDVDLGDISGINASVVNIQKEIDRLNEVAKNLNESLIDLQELGKYEQYIKGGSGYIPEAPRDGQAYVRKDGEWVLLSTFL

SEQ ID NO: 6361 - protein, 1241 aa, Artificial Sequence
  SARS-CoV-2/Congo/94/2020__EPI_ISL_417947 spike protein (1-1211)(Q965C_S1003C) Foldon construct
MFVFLVLLPLVSSQCVNLTTRTQLPPAYTNSFTRGVYYPDKVFRSSVLHSTQDLFLPFFSNVTWFHAIHVSGTNGTKRFDNPVLPFNDGVYFASTEKSNIIRGWIFGTTLDSKTQSLLIVNNATNVVIKVCEFQFCNDPFLGVYYHKNNKSWMESEFRVYSSANNCTFEYVSQPFLMDLEGKQGNFKNLREFVFKNIDGYFKIYSKHTPINLVRDLPQGFSALEPLVDLPIGINITRFQTLLALHRSYLTPGDSSSGWTAGAAAYYVGYLQPRTFLLKYNENGTITDAVDCALDPLSETKCTLKSFTVEKGIYQTSNFRVQPTESIVRFPNITNLCPFGEVFNATRFASVYAWNRKRISNCVADYSVLYNSASFSTFKCYGVSPTKLNDLCFTNVYADSFVIRGDEVRQIAPGQTGKIADYNYKLPDDFTGCVIAWNSNNLDSKVGGNYNYLYRLFRKSNLKPFERDISTEIYQAGSTPCNGVEGFNCYFPLQSYGFQPTNGVGYQPYRVVVLSFELLHAPATVCGPKKSTNLVKNKCVNFNFNGLTGTGVLTESNKKFLPFQQFGRDIADTTDAVRDPQTLEILDITPCSFGGVSVITPGTNTSNQVAVLYQGVNCTEVPVAIHADQLTPTWRVYSTGSNVFQTRAGCLIGAEHVNNSYECDIPIGAGICASYQTQTNSPRRARSVASQSIIAYTMSLGAENSVAYSNNSIAIPTNFTISVTTEILPVSMTKTSVDCTMYICGDSTECSNLLLQYGSFCTQLNRALTGIAVEQDKNTQEVFAQVKQIYKTPPIKDFGGFNFSQILPDPSKPSKRSFIEDILFNKVTLADAGFIKQYGDCLGDIAARDLICAQKFNGLTVLPPLLTDEMIAQYTSALLAGTITSGWTFGAGAALQIPFAMQMAYRFNGIGVTQNVLYENQKLIANQFNSAIGKIQDSLSSTASALGKLQDVVNQNAQALNTLVKCLSSNFGAISSVLNDILSRLDKVEAEVQIDRLITGRLQCLQTYVTQQLIRAAEIRASANLAATKMSECVLGQSKRVDFCGKGYHLMSFPQSAPHGVVFLHVTYVPAQEKNFTTAPAICHDGKAHFPREGVFVSNGTHWFVTQRNFYEPQIITTDNTFVSGNCDVVIGIVNNTVYDPLQPELDSFKEELDKYFKNHTSPDVDLGDISGINASVVNIQKEIDRLNEVAKNLNESLIDLQELGKYEQYIKGGSGYIPEAPRDGQAYVRKDGEWVLLSTFL

SEQ ID NO: 6362 - protein, 1241 aa, Artificial Sequence
  SARS-CoV-2/Congo/158/2020__EPI_ISL_417950 spike protein (1-1211)(Q965C_S1003C) Foldon construct
MFVFLVLLPLVSSQCVNLTTRTQLPPAYTNSFTRGVYYPDKVFRSSVLHSTQDLFLPFFSNVTWFHAIHVSGTNGTKRFDNPVLPFNDGVYFASTEKSNIIRGWIFGTTLDSKTQSLLIVNNATNVVIKVCEFQFCNDPFLGVYYHKNNKSWMESEFRVYSSANNCTFEYVSQPFLMDLEGKQGNFKNLREFVFKNIDGYFKIYSKHTPINLVRDLPQGFSALEPLVDLPIGINITRFQTLLALHRSYLTPGDSSSGWTAGAAAYYVGYLQPRTFLLKYNENGTITDAVDCALDPLSETKCTLKSFTVEKGIYQTSNFRVQPTESIVRFPNITNLCPFGEVFNATRFASVYAWNRKRISNCVADYSVLYNSASFSTFKCYGVSPTKLNDLCFTNVYADSFVIRGDEVRQIAPGQTGKIADYNYKLPDDFTGCVIAWNSNNLDSKVGGNYNYLYRLFRKSNLKPFERDISTEIYQAGSTPCNGVEGFNCYFPLQSYGFQPTNGVGYQPYRVVVLSFELLHAPATVCGPKKSTNLVKNKCVNFNFNGLTGTGVLTESNKKFLPFQQFGRDIADTTDAVRDPQTLEILDITPCSFGGVSVITPGTNTSNQVAVLYQDVNCTEVPVAIHADQLTPTWRVYSTGSNVFQTRAGCLIGAEHVNNSYECDIPIGAGICASYQTQTNSPRRARSVASQSIIAYTMSLGAENSVAYSNNSIAIPTNFTISVTTEILPVSMTKTSVDCTMYICGDSTECSNLLLQYGSFCTQLNRALTGIAVEQDKNTQEVFAQVKQIYKTPPIKDFGGFNFSQILPDPSKPSKRSFIEDLLFNKVTLADAGFIKQYGDCLGDIAARDLICAQKFNGLTVLPPLLTDEMIAQYTSALLAGTITSGWTFGAGAALQIPFAMQMAYRFNGIGVTQNVLYENQKLIANQFNSAIGKIQDSLSSTASALGKLQDVVNQNAQALNTLVKCLSSNFGAISSVLNDILSRLDKVEAEVQIDRLITGRLQCLQTYVTQQLIRAAEIRASANLAATKMSECVLGQSKRVDFCGKGYHLMSFPQSAPHGVVFLHVTYVPAQEKNFTTAPAICHDGKAHFPREGVFVSNGTHWFVTQRNFYEPQIITTDNTFLSGNCDVVIGIVNNTVYDPLQPELDSFKEELDKYFKNHTSPDVDLGDISGINASVVNIQKEIDRLNEVAKNLNESLIDLQELGKYEQYIKGGSGYIPEAPRDGQAYVRKDGEWVLLSTFL

SEQ ID NO: 6363 - protein, 1241 aa, Artificial Sequence
  SARS-CoV-2/USA/UT-00034/2020__EPI_ISL_417977 spike protein (1-1211)(Q965C_S1003C) Foldon construct
MFVFLVLLPLVSSQCVNLTTRTQLPPAYTNSFTRGVYYPDKVFRSSVLHSTQDLFLPFFSNVTWFHAIHVSGTNGTKRFDNPVLPFNDGVYFASTEKSNIIRGWIFGTTLDSKTQSLLIVNNATNVVIKVCEFQFCNDPFLGVYYYKNNKSWMESEFRVYSSANNCTFEYVSQPFLMDLEGKQGNFKNLREFVFKNIDGYFKIYSKHTPINLVRDLPQGFSALEPLVDLPIGINITRFQTLLALHRSYLTPGDSSSGWTAGAAAYYVGYLQPRTFLLKYNENGTITDAVDCALDPLSETKCTLKSFTVEKGIYQTSNFRVQPTESIVRFPNITNLCPFGEVFNATRFASVYAWNRKRISNCVADYSVLYNSASFSTFKCYGVSPTKLNDLCFTNVYADSFVIRGDEVRQIAPGQTGKIADYNYKLPDDFTGCVIAWNSNNLDSKVGGNYNYLYRLFRKSNLKPFERDISTEIYQAGSTPCNGVEGFNCYFPLQSYGFQPTNGVGYQPYRVVVLSFELLHAPATVCGPKKSTNLVKNKCVNFNFNGLTGTGVLTESNKKFLPFQQFGRDIADTTDAVRDPQTLEILDITPCSFGGVSVITPGTNTSNQVAVLYQGVNCTEVPVAIHADQLTPTWRVYSTGSNVFQTRAGCLIGAEHVNNSYECDIPIGAGICASYQTQTNSPRRARSVASQSIIAYTMSLGAENSVAYSNNSIAIPTNFTISVTTEILPVSMTKTSVDCTMYICGDSTECSNLLLQYGSFCTQLNRALTGIAVEQDKNTQEVFAQVKQIYKTPPIKDFGGFNFSQILPDPSKPSKRSFIEDLLFNKVTLADAGFIKQYGDCLGDIAARDLICAQKFNGLTVLPPLLTDEMIAQYTSALLAGTITSGWTFGAGAALQIPFAMQMAYRFNGIGVTQNVLYENQKLIANQFNSAIGKIQDSLSSTASALGKLQDVVNQNAQALNTLVKCLSSNFGAISSVLNDILSRLDKVEAEVQIDRLITGRLQCLQTYVTQQLIRAAEIRASANLAATKMSECVLGQSKRVDFCGKGYHLMSFPQSAPHGVVFLHVTYVPAQEKNFTTAPAICHDGKAHFPREGVFVSNGTHWFVTQRNFYEPQIITTDNTFVSGNCDVVIGIVNNTVYDPLQPELDSFKEELDKYFKNHTSPDVDLGDISGINASVVNIQKEIDRLNEVAKNLNESLIDLQELGKYEQYIKGGSGYIPEAPRDGQAYVRKDGEWVLLSTFL

SEQ ID NO: 6364 - protein, 1241 aa, Artificial Sequence
  SARS-CoV-2/USA/UT-00033/2020__EPI_ISL_417976 spike protein (1-1211)(Q965C_S1003C) Foldon construct
MFVFLVLLPLVSSQCVNLTTRTQLPPAYTNSFTRGVYYPDKVFRSSVLHSTQDLFLPFFSNVTWFHAIHVSGTNGTKRFDNPVLPFNDGVYFASTEKSNIIRGWIFGTTLDSKTQSLLIVNNATNVVIKVCEFQFCNDPFLGVYYHKNNKSWMESEFRVYSSANNCTFEYVSQPFLMDLEGKQGNFKNLREFVFKNIDGYFKIYSKHTPINLVRDLPQGFSALEPLVDLPIGINITRFQTLLALHRSYLTPGDSSSGLTAGAAAYYVGYLQPRTFLLKYNENGTITDAVDCALDPLSETKCTLKSFTVEKGIYQTSNFRVQPTESIVRFPNITNLCPFGEVFNATRFASVYAWNRKRISNCVADYSVLYNSASFSTFKCYGVSPTKLNDLCFTNVYADSFVIRGDEVRQIAPGQTGKIADYNYKLPDDFTGCVIAWNSNNLDSKVGGNYNYLYRLFRKSNLKPFERDISTEIYQAGSTPCNGVEGFNCYFPLQSYGFQPTNGVGYQPYRVVVLSFELLHAPATVCGPKKSTNLVKNKCVNFNFNGLTGTGVLTESNKKFLPFQQFGRDIADTTDAVRDPQTLEILDITPCSFGGVSVITPGTNTSNQVAVLYQGVNCTEVPVAIHADQLTPTWRVYSTGSNVFQTRAGCLIGAEHVNNSYECDIPIGAGICASYQTQTNSPRRARSVASQSIIAYTMSLGAENSVAYSNNSIAIPTNFTISVTTEILPVSMTKTSVDCTMYICGDSTECSNLLLQYGSFCTQLNRALTGIAVEQDKNTQEVFAQVKQIYKTPPIKDFGGFNFSQILPDPSKPSKRSFIEDLLFNKVTLADAGFIKQYGDCLGDIAARDLICAQKFNGLTVLPPLLTDEMIAQYTSALLAGTITSGWTFGAGAALQIPFAMQMAYRFNGIGVTQNVLYENQKLIANQFNSAIGKIQDSLSSTASALGKLQDVVNQNAQALNTLVKCLSSNFGAISSVLNDILSRLDKVEAEVQIDRLITGRLQCLQTYVTQQLIRAAEIRASANLAATKMSECVLGQSKRVDFCGKGYHLMSFPQSAPHGVVFLHVTYVPAQEKNFTTAPAICHDGKAHFPREGVFVSNGTHWFVTQRNFYEPQIITTDNTFVSGNCDVVIGIVNNTVYDPLQPELDSFKEELDKYFKNHTSPDVDLGDISGINASVVNIQKEIDRLNEVAKNLNESLIDLQELGKYEQYIKGGSGYIPEAPRDGQAYVRKDGEWVLLSTFL

SEQ ID NO: 6365 - protein, 1241 aa, Artificial Sequence
  SARS-CoV-2/USA/WI-13/2020__EPI_ISL_417516 spike protein (1-1211)(Q965C_S1003C) Foldon construct
MFVFLVLLPLVSSQCVNLTTRTQLPPAYTNSFTRGVYYPDKVFRSSVLHSTQDLFLPFFSNVTWFHAIHVSGTNGTKRFDNPVLPFNDGVYFASTEKSNIIRGWIFGTTLDSKTQSLLIVNNATNVVIKVCEFQFCNDPFLGVYYHKNNKSWMESEFRVYSSANNCTFEYVSQPFLMDLEGKQGNFKNLREFVFKNIDGYFKIYSKHTPINLVRDLPQGFSALEPLVDLPIGINITRFQTLLALHRSYLTPGDSSSGWTAGAAAYYVGYLQPRTFLLKYNENGTITDAVDCALDPLSETKCTLKSFTVEKGIYQTSNFRVLPTESIVRFPNITNLCPFGEVFNATRFASVYAWNRKRISNCVADYSVLYNSASFSTFKCYGVSPTKLNDLCFTNVYADSFVIRGDEVRQIAPGQTGKIADYNYKLPDDFTGCVIAWNSNNLDSKVGGNYNYLYRLFRKSNLKPFERDISTEIYQAGSTPCNGVEGFNCYFPLQSYGFQPTNGVGYQPYRVVVLSFELLHAPATVCGPKKSTNLVKNKCVNFNFNGLTGTGVLTESNKKFLPFQQFGRDIADTTDAVRDPQTLEILDITPCSFGGVSVITPGTNTSNQVAVLYQGVNCTEVPVAIHADQLTPTWRVYSTGSNVFQTRAGCLIGAEHVNNSYECDIPIGAGICASYQTQTNSPRRARSVASQSIIAYTMSLGAENSVAYSNNSIAIPTNFTISVTTEILPVSMTKTSVDCTMYICGDSTECSNLLLQYGSFCTQLNRALTGIAVEQDKNTQEVFAQVKQIYKTPPIKDFGGFNFSQILPDPSKPSKRSFIEDLLFNKVTLADAGFIKQYGDCLGDIAARDLICAQKFNGLTVLPPLLTDEMIAQYTSALLAGTITSGWTFGAGAALQIPFAMQMAYRFNGIGVTQNVLYENQKLIANQFNSAIGKIQDSLSSTASALGKLQDVVNQNAQALNTLVKCLSSNFGAISSVLNDILSRLDKVEAEVQIDRLITGRLQCLQTYVTQQLIRAAEIRASANLAATKMSECVLGQSKRVDFCGKGYHLMSFPQSAPHGVVFLHVTYVPAQEKNFTTAPAICHDGKAHFPREGVFVSNGTHWFVTQRNFYEPQIITTDNTFVSGNCDVVIGIVNNTVYDPLQPELDSFKEELDKYFKNHTSPDVDLGDISGINASVVNIQKEIDRLNEVAKNLNESLIDLQELGKYEQYIKGGSGYIPEAPRDGQAYVRKDGEWVLLSTFL

SEQ ID NO: 6366 - protein, 1240 aa, Artificial Sequence
  SARS-CoV-2/India/1-27/2020__EPI_ISL_413522 spike protein (1-1210)(Q964C_S1002C) Foldon construct
MFVFLVLLPLVSSQCVNLTTRTQLPPAYTNSFTRGVYYPDKVFRSSVLHSTQDLFLPFFSNVTWFHAIHVSGTNGTKRFDNPVLPFNDGVYFASTEKSNIIRGWIFGTTLDSKTQSLLIVNNATNVVIKVCEFQFCNDPFLGVYHKNNKSWMESEFRVYSSANNCTFEYVSQPFLMDLEGKQGNFKNLREFVFKNIDGYFKIYSKHTPINLVRDLPQGFSALEPLVDLPIGINITRFQTLLALHRSYLTPGDSSSGWTAGAAAYYVGYLQPRTFLLKYNENGTITDAVDCALDPLSETKCTLKSFTVEKGIYQTSNFRVQPTESIVRFPNITNLCPFGEVFNATRFASVYAWNRKRISNCVADYSVLYNSASFSTFKCYGVSPTKLNDLCFTNVYADSFVIRGDEVIQIAPGQTGKIADYNYKLPDDFTGCVIAWNSNNLDSKVGGNYNYLYRLFRKSNLKPFERDISTEIYQAGSTPCNGVEGFNCYFPLQSYGFQPTNGVGYQPYRVVVLSFELLHAPATVCGPKKSTNLVKNKCVNFNFNGLTGTGVLTESNKKFLPFQQFGRDIADTTDAVRDPQTLEILDITPCSFGGVSVITPGTNTSNQVAVLYQDVNCTEVPVAIHADQLTPTWRVYSTGSNVFQTRAGCLIGAEHVNNSYECDIPIGAGICASYQTQTNSPRRARSVASQSIIAYTMSLGAENSVAYSNNSIAIPTNFTISVTTEILPVSMTKTSVDCTMYICGDSTECSNLLLQYGSFCTQLNRALTGIAVEQDKNTQEVFAQVKQIYKTPPIKDFGGFNFSQILPDPSKPSKRSFIEDLLFNKVTLADAGFIKQYGDCLGDIAARDLICAQKFNGLTVLPPLLTDEMIAQYTSALLAGTITSGWTFGAGAALQIPFAMQMAYRFNGIGVTQNVLYENQKLIANQFNSAIGKIQDSLSSTASALGKLQDVVNQNAQALNTLVKCLSSNFGAISSVLNDILSRLDKVEAEVQIDRLITGRLQCLQTYVTQQLIRAAEIRASANLAATKMSECVLGQSKRVDFCGKGYHLMSFPQSAPHGVVFLHVTYVPAQEKNFTTAPAICHDGKAHFPREGVFVSNGTHWFVTQRNFYEPQIITTDNTFVSGNCDVVIGIVNNTVYDPLQPELDSFKEELDKYFKNHTSPDVDLGDISGINASVVNIQKEIDRLNEVAKNLNESLIDLQELGKYEQYIKGGSGYIPEAPRDGQAYVRKDGEWVLLSTFL

SEQ ID NO: 6367 - protein, 1235 aa, Artificial Sequence
  SARS-CoV-2/pangolin/Guangxi/P4L/2017__EPI_ISL_410538 spike protein (1-1205)(Q959C_S997C) Foldon construct
MFVFLFVLPLVSSQCVNLTTRTGIPPGYTNSSTRGVYYPDKVFRSSILHLTQDLFLPFFSNVTWFNTINYQGGFKKFDNPVLPFNDGVYFASTEKSNIIRGWIFGTTLDARTQSLLIVNNATNVVIKVCEFQFCTDPFLGVYYHNNNKTWVENEFRVYSSANNCTFEYISQPFLMDLEGKQGNFKNLREFVFKNVDGYFKIYSKHTPIDLVRDLPRGFAALEPLVDLPIGINITRFQTLLALHRSYLTPGNLESGWTTGAAAYYVGYLQQRTFLLSYNQNGTITDAVDCSLDPLSETKCTLKSLTVEKGIYQTSNFRVQPTISIVRFPNITNLCPFGEVFNASKFASVYAWNRKRISNCVADYSVLYNSTSFSTFKCYGVSPTKLNDLCFTNVYADSFVVKGDEVRQIAPGQTGVIADYNYKLPDDFTGCVIAWNSVKQDALTGGNYGYLYRLFRKSKLKPFERDISTEIYQAGSTPCNGQVGLNCYYPLERYGFHPTTGVNYQPFRVVVLSFELLNGPATVCGPKLSTTLVKDKCVNFNFNGLTGTGVLTTSKKQFLPFQQFGRDISDTTDAVRDPQTLEILDITPCSFGGVSVITPGTNTSNQVAVLYQDVNCTEVPMAIHAEQLTPAWRVYSAGANVFQTRAGCLVGAEHVNNSYECDIPVGAGICASYHSMSSLRSVNQRSIIAYTMSLGAENSVAYSNNSIAIPTNFTISVTTEILPVSMTKTSVDCTMYICGDSIECSNLLLQYGSFCTQLNRALTGIAVEQDKNTQEVFAQVKQIYKTPPIKDFGGFNFSQILPDPSKPSKRSFIEDLLFNKVTLADAGFIKQYGDCLGDIAARDLICAQKFNGLTVLPPLLTDEMIAQYTSALLAGTITSGWTFGAGAALQIPFAMQMAYRFNGIGVTQNVLYENQKLIANQFNSAIGKIQDSLSSTASALGKLQDVVNQNAQALNTLVKCLSSNFGAISSVLNDILSRLDKVEAEVQIDRLITGRLQCLQTYVTQQLIRAAEIRASANLAATKMSECVLGQSKRVDFCGKGYHLMSFPQSAPHGVVFLHVTYVPAQEKNFTTAPAICHEGKAHFPREGVFVSNGTHWFITQRNFYEPQIITTDNTFVSGSCDVVIGIVNNTVYDPLQPELDSFKEELDKYFKNHTSPDVDLGDISGINASVVNIQKEIDRLNEVAKNLNESPIDLQELGKYEQYIKGGSGYIPEAPRDGQAYVRKDGEWVLLSTFL

SEQ ID NO: 6368 - protein, 1235 aa, Artificial Sequence
  SARS-CoV-2/pangolin/Guangxi/P5L/2017__EPI_ISL_410540 spike protein (1-1205)(Q959C_S997C) Foldon construct
MFVFLFVLPLVSSQCVNLTTRTGIPPGYTNSSTRGVYYPDKVFRSSILHLTQDLFLPFFSNVTWFNTINYQGGFKKFDNPVLPFNDGVYFASTEKSNIIRGWIFGTTLDARTQSLLIVNNATNVVIKVCEFQFCTDPFLGVYYHNNNKTWVENEFRVYSSANNCTFEYISQPFLMDLEGKQGNFKNLREFVFKNVDGYFKIYSKHTPIDLVRDLPRGFAALEPLVDLPIGINITRFQTLLALHRSYLTPGKLESGWTTGAAAYYVGYLQQRTFLLSYNQNGTITDAVDCSLDPLSETKCTLKSLTVEKGIYQTSNFRVQPTISIVRFPNITNLCPFGEVFNASKFASVYAWNRKRISNCVADYSVLYNSTSFSTFKCYGVSPTKLNDLCFTNVYADSFVVKGDEVRQIAPGQTGVIADYNYKLPDDFTGCVIAWNSVKQDALTGGNYGYLYRLFRKSKLKPFERDISTEIYQAGSTPCNGQVGLNCYYPLERYGFHPTTGVNYQPFRVVVLSFELLNGPATVCGPKLSTTLVKDKCVNFNFNGLTGTGVLTTSKKQFLPFQQFGRDISDTTDAVRDPQTLEILDITPCSFGGVSVITPGTNTSNQVAVLYQDVNCTEVPMAIHAEQLTPAWRVYSAGANVFQTRAGCLVGAEHVNNSYECDIPVGAGICASYHSMSSFRSVNQRSIIAYTMSLGAENSVAYSNNSIAIPTNFTISVTTEILPVSMTKTSVDCTMYICGDSIECSNLLLQYGSFCTQLNRALTGIAVEQDKNTQEVFAQVKQIYKTPPIKDFGGFNFSQILPDPSKPSKRSFIEDLLFNKVTLADAGFIKQYGDCLGDIAARDLICAQKFNGLTVLPPLLTDEMIAQYTSALLAGTITSGWTFGAGAALQIPFAMQMAYRFNGIGVTQNVLYENQKLIANQFNSAIGKIQDSLSSTASALGKLQDVVNQNAQALNTLVKCLSSNFGAISSVLNDILSRLDKVEAEVQIDRLITGRLQCLQTYVTQQLIRAAEIRASANLAATKMSECVLGQSKRVDFCGKGYHLMSFPQSAPHGVVFLHVTYVPAQEKNFTTAPAICHEGKAHFPREGVFVSNGTHWFITQRNFYEPQIITTDNTFVSGSCDVVIGIVNNTVYDPLQPELDSFKEELDKYFKNHTSPDVDLGDISGINASVVNIQKEIDRLNEVAKNLNESLIDLQELGKYEQYIKGGSGYIPEAPRDGQAYVRKDGEWVLLSTFL

SEQ ID NO: 6369 - protein, 1235 aa, Artificial Sequence
  SARS-CoV-2/pangolin/Guangxi/P5E/2017__EPI_ISL_410541 spike protein (1-1205)(Q959C_S997C) Foldon construct
MFVFLFVLPLVSSQCVNLTTRTGIPPGYTNSSTRGVYYPDKVFRSSILHLTQDLFLPFFSNVTWFNTITYQGGSKKFDNPVLPFNDGVYFASTEKSNIIRGWIFGTTLDARTQSLLIVNNATNVVIKVCEFQFCTDPFLGVYYHNNNKTWVENEFRVYSSANNCTFEYISQPFLMDLEGKQGNFKNLREFVFKNVDGYFKIYSKHTPIDLVRDLPRGFAALEPLVDLPIGINITRFQTLLALHRSYLTPGKLESGWTTGAAAYYVGYLQQRTFLLSYNQNGTITDAVDCSLDPLSETKCTLKSLTVEKGIYQTSNFRVQPTISIVRFPNITNLCPFGEVFNASKFASVYAWNRKRISNCVADYSVLYNSTSFSTFKCYGVSPTKLNDLCFTNVYADSFVVKGDEVRQIAPGQTGVIADYNYKLPDDFTGCVIAWNSVKQDALTGDNYGYLYRLFRKSKLKPFERDISTEIYQAGSTPCNGQVGLNCYYPLERYGFHPTTGVNYQPFRVVVLSFELLNGPATVCGPKLSTTLVKDKCVNFNFNGLTGTGVLTTSKKQFLPFQQFGRDISDTTDAVRDPQTLEILDITPCSFGGVSVITPGTNTSNQVAVLYQDVNCTEVPMAIHAEQLTPAWRVYSAGANVFQTRAGCLVGAEHVNNSYECDIPVGAGICASYHSMSSFRSVNQRSIIAYTMSLGAENSVAYSNNSIAIPTNFTISVTTEILPVSMTKTSVDCTMYICGDSIECSNLLLQYGSFCTQLNRALTGIAVEQDKNTQEVFAQVKQIYKTPPIKDFGGFNFSQILPDPSKPSKRSFIEDLLFNKVTLADAGFIKQYGDCLGDIAARDLICAQKFNGLTVLPPLLTDEMIAQYTSALLAGTITSGWTFGAGAALQIPFAMQMAYRFNGIGVTQNVLYENQKLIANQFNSAIGKIQDSLSSTASALGKLQDVVNQNAQALNTLVKCLSSNFGAISSVLNDILSRLDKVEAEVQIDRLITGRLQCLQTYVTQQLIRAAEIRASANLAATKMSECVLGQSKRVDFCGKGYHLMSFPQSAPHGVVFLHVTYVPAQEKNFTTAPAICHEGKAHFPREGVFVSNGTHWFITQRNFYEPQIITTDNTFVSGSCDVVIGIVNNTVYDPLQPELDSFKEELDKYFKNHTSPDVDLGDISGINASVVNIQKEIDRLNEVAKNLNESLIDLQELGKYEQYIKGGSGYIPEAPRDGQAYVRKDGEWVLLSTFL

SEQ ID NO: 6370 - protein, 1233 aa, Artificial Sequence
  SARS-CoV-2/pangolin/Guangxi/P1E/2017__EPI_ISL_410539 spike protein (1-1203)(Q957C_S995C) Foldon construct
MFVFLFVLPLVSSQCVNLTTRTGIQPGYTNSSTRGVYYPDKVFRSSILHLTQDLFLPFFSNVTWFNTINYQGGFKKFDNPVLPFNDGVYFASTEKSNIIRGWIFGTTLDARTQSLLIVNNATNVVIKVCEFQFCTDPFLGVYYHNNNKTWVENEFRVYSSANNCTFEYISQPFLMDLEGKQGNFKNLREFVFKNVDGYFKIYSKHTPIDLVRDLPRGFAALEPLVDLPIGINITRFQTLLALHRSYLTPGKLESGWTTGAAAYYVGYLQQRTFLLSYNQNGTITDAVDCSLDPLSETKCTLKSLTVEKGIYQTSNFRVQPTISIVRFPNITNLCPFGEVFNASKFASVYAWNRKRISNCVADYSVLYNSTSFSTFKCYGVSPTKLNDLCFTNVYADSFVVKGDEVRQIAPGQTGVIADYNYKLPDDFTGCVIAWNSVKQDALTGGNYLYRLFRKSKLKPFERDISTEIYQAGSTPCNGQVGLNCYYPLERYGFHPTTGVNYQPFRVVVLSFELLNGPATVCGPKLSTTLVKDKCVNFNFNGLTGTGVLTTSKKQFLPFQQFGRDISDTTDAVRDPQTLEILDITPCSFGGVSVITPGTNTSNQVAVLYQDVNCTEVPMAIHAEQLTPAWRVYSAGANVFQTRAGCLVGAEHVNNSYECDIPVGAGICASYHSMSSLRSVNQRSIIAYTMSLGAENSVAYSNNSIAIPTNFTISVTTEILPVSMTKTSVDCTMYICGDSIECSNLLLQYGSFCTQLNRALTGIAVEQDKNTQEVFAQVKQIYKTPPIKDFGGFNFSQILPDPSKPSKRSFIEDLLFNKVTLADAGFIKQYGDCLGDIAARDLICAQKFNGLTVLPPLLTDEMIAQYTSALLAGTITSGWTFGAGAALQIPFAMQMAYRFNGIGVTQNVLYENQKLIANQFNSAIGKIQDSLSSTASALGKLQDVVNQNAQALNTLVKCLSSNFGAISSVLNDILSRLDKVEAEVQIDRLITGRLQCLQTYVTQQLIRAAEIRASANLAATKMSECVLGQSKRVDFCGKGYHLMSFPQSAPHGVVFLHVTYVPAQEKNFTTAPAICHEGKAHFPREGVFVSNGTHWFITQRNFYEPQIITTDNTFVSGSCDVVIGIVNNTVYDPLQPELDSFKEELDKYFKNHTSPDVDLGDISGINASVVNIQKEIDRLNEVAKNLNESLIDLQELGKYEQYIKGGSGYIPEAPRDGQAYVRKDGEWVLLSTFL

SEQ ID NO: 6371 - protein, 1241 aa, Artificial Sequence
  SARS-CoV-2/Wuhan/WIV05/2019__EPI_ISL_402128 spike protein (1-1211)(F970C_G999C) Foldon construct
MFVFLVLLPLVSSQCVNLTTRTQLPPAYTNSFTRGVYYPDKVFRSSVLHSTQDLFLPFFSNVTWFHAIHVSGTNGTKRFDNPVLPFNDGVYFASTEKSNIIRGWIFGTTLDSKTQSLLIVNNATNVVIKVCEFQFCNDPFLGVYYHKNNKSWMESEFRVYSSANNCTFEYVSQPFLMDLEGKQGNFKNLREFVFKNIDGYFKIYSKHTPINLVRDLPQGFSALEPLVDLPIGINITRFQTLLALHRSYLTPGDSSSGWTAGAAAYYVGYLQPRTFLLKYNENGTITDAVDCALDPLSETKCTLKSFTVEKGIYQTSNFRVQPTESIVRFPNITNLCPFGEVFNATRFASVYAWNRKRISNCVADYSVLYNSASFSTFKCYGVSPTKLNDLCFTNVYADSFVIRGDEVRQIAPGQTGKIADYNYKLPDDFTGCVIAWNSNNLDSKVGGNYNYLYRLFRKSNLKPFERDISTEIYQAGSTPCNGVEGFNCYFPLQSYGFQPTNGVGYQPYRVVVLSFELLHAPATVCGPKKSTNLVKNKCVNFNFNGLTGTGVLTESNKKFLPFQQFGRDIADTTDAVRDPQTLEILDITPCSFGGVSVITPGTNTSNQVAVLYQDVNCTEVPVAIHADQLTPTWRVYSTGSNVFQTRAGCLIGAEHVNNSYECDIPIGAGICASYQTQTNSPRRARSVASQSIIAYTMSLGAENSVAYSNNSIAIPTNFTISVTTEILPVSMTKTSVDCTMYICGDSTECSNLLLQYGSFCTQLNRALTGIAVEQDKNTQEVFAQVKQIYKTPPIKDFGGFNFSQILPDPSKPSKRSFIEDLLFNKVTLADAGFIKQYGDCLGDIAARDLICAQKFNGLTVLPPLLTDEMIAQYTSALLAGTITSGWTFGAGAALQIPFAMQMAYRFNGIGVTQNVLYENQKLIANQFNSAIGKIQDSLSSTASALGKLQDVVNQNAQALNTLVKQLSSNCGAISSVLNDILSRLDKVEAEVQIDRLITCRLQSLQTYVTQQLIRAAEIRASANLAATKMSECVLGQSKRVDFCGKGYHLMSFPQSAPHGVVFLHVTYVPAQEKNFTTAPAICHDGKAHFPREGVFVSNGTHWFVTQRNFYEPQIITTDNTFVSGNCDVVIGIVNNTVYDPLQPELDSFKEELDKYFKNHTSPDVDLGDISGINASVVNIQKEIDRLNEVAKNLNESLIDLQELGKYEQYIKGGSGYIPEAPRDGQAYVRKDGEWVLLSTFL

SEQ ID NO: 6372 - protein, 1237 aa, Artificial Sequence
  SARS-CoV-2/bat/Yunnan/RaTG13/2013__EPI_ISL_402131 spike protein (1-1207)(F966C_G995C) Foldon construct
MFVFLVLLPLVSSQCVNLTTRTQLPPAYTNSSTRGVYYPDKVFRSSVLHLTQDLFLPFFSNVTWFHAIHVSGTNGIKRFDNPVLPFNDGVYFASTEKSNIIRGWIFGTTLDSKTQSLLIVNNATNVVIKVCEFQFCNDPFLGVYYHKNNKSWMESEFRVYSSANNCTFEYVSQPFLMDLEGKQGNFKNLREFVFKNIDGYFKIYSKHTPINLVRDLPPGFSALEPLVDLPIGINITRFQTLLALHRSYLTPGDSSSGWTAGAAAYYVGYLQPRTFLLKYNENGTITDAVDCALDPLSETKCTLKSFTVEKGIYQTSNFRVQPTDSIVRFPNITNLCPFGEVFNATTFASVYAWNRKRISNCVADYSVLYNSTSFSTFKCYGVSPTKLNDLCFTNVYADSFVITGDEVRQIAPGQTGKIADYNYKLPDDFTGCVIAWNSKHIDAKEGGNFNYLYRLFRKANLKPFERDISTEIYQAGSKPCNGQTGLNCYYPLYRYGFYPTDGVGHQPYRVVVLSFELLNAPATVCGPKKSTNLVKNKCVNFNFNGLTGTGVLTESNKKFLPFQQFGRDIADTTDAVRDPQTLEILDITPCSFGGVSVITPGTNASNQVAVLYQDVNCTEVPVAIHADQLTPTWRVYSTGSNVFQTRAGCLIGAEHVNNSYECDIPIGAGICASYQTQTNSRSVASQSIIAYTMSLGAENSVAYSNNSIAIPTNFTISVTTEILPVSMTKTSVDCTMYICGDSTECSNLLLQYGSFCTQLNRALTGIAVEQDKNTQEVFAQVKQIYKTPPIKDFGGFNFSQILPDPSKPSKRSFIEDLLFNKVTLADAGFIKQYGDCLGDIAARDLICAQKFNGLTVLPPLLTDEMIAQYTSALLAGTITSGWTFGAGAALQIPFAMQMAYRFNGIGVTQNVLYENQKLIANQFNSAIGKIQDSLSSTASALGKLQDVVNQNAQALNTLVKQLSSNCGAISSVLNDILSRLDKVEAEVQIDRLITCRLQSLQTYVTQQLIRAAEIRASANLAATKMSECVLGQSKRVDFCGKGYHLMSFPQSAPHGVVFLHVTYVPAQEKNFTTAPAICHDGKAHFPREGVFVSNGTHWFVTQRNFYEPQIITTDNTFVSGSCDVVIGIVNNTVYDPLQPELDSFKEELDKYFKNHTSPDVDLGDISGINASVVNIQKEIDRLNEVAKNLNESLIDLQELGKYEQYIKGGSGYIPEAPRDGQAYVRKDGEWVLLSTFL

SEQ ID NO: 6373 - protein, 1241 aa, Artificial Sequence
  SARS-CoV-2/Wuhan/HBCDC-HB-01/2019__EPI_ISL_402132 spike protein (1-1211)(F970C_G999C) Foldon construct
MFVFLVLLPLVSSQCVNLTTRTQLPPAYTNSITRGVYYPDKVFRSSVLHSTQDLFLPFFSNVTWFHAIHVSGTNGTKRFDNPVLPFNDGVYFASTEKSNIIRGWIFGTTLDSKTQSLLIVNNATNVVIKVCEFQFCNDPFLGVYYHKNNKSWMESEFRVYSSANNCTFEYVSQPFLMDLEGKQGNFKNLREFVFKNIDGYFKIYSKHTPINLVRDLPQGFSALEPLVDLPIGINITRFQTLLALHRSYLTPGDSSSGWTAGAAAYYVGYLQPRTFLLKYNENGTITDAVDCALDPLSETKCTLKSFTVEKGIYQTSNFRVQPTESIVRFPNITNLCPFGEVFNATRFASVYAWNRKRISNCVADYSVLYNSASFSTFKCYGVSPTKLNDLCFTNVYADSFVIRGDEVRQIAPGQTGKIADYNYKLPDDFTGCVIAWNSNNLDSKVGGNYNYLYRLFRKSNLKPFERDISTEIYQAGSTPCNGVEGFNCYFPLQSYGFQPTNGVGYQPYRVVVLSFELLHAPATVCGPKKSTNLVKNKCVNFNFNGLTGTGVLTESNKKFLPFQQFGRDIADTTDAVRDPQTLEILDITPCSFGGVSVITPGTNTSNQVAVLYQDVNCTEVPVAIHADQLTPTWRVYSTGSNVFQTRAGCLIGAEHVNNSYECDIPIGAGICASYQTQTNSPRRARSVASQSIIAYTMSLGAENSVAYSNNSIAIPTNFTISVTTEILPVSMTKTSVDCTMYICGDSTECSNLLLQYGSFCTQLNRALTGIAVEQDKNTQEVFAQVKQIYKTPPIKDFGGFNFSQILPDPSKPSKRSFIEDLLFNKVTLADAGFIKQYGDCLGDIAARDLICAQKFNGLTVLPPLLTDEMIAQYTSALLAGTITSGWTFGAGAALQIPFAMQMAYRFNGIGVTQNVLYENQKLIANQFNSAIGKIQDSLSSTASALGKLQDVVNQNAQALNTLVKQLSSNCGAISSVLNDILSRLDKVEAEVQIDRLITCRLQSLQTYVTQQLIRAAEIRASANLAATKMSECVLGQSKRVDFCGKGYHLMSFPQSAPHGVVFLHVTYVPAQEKNFTTAPAICHDGKAHFPREGVFVSNGTHWFVTQRNFYEPQIITTDNTFVSGNCDVVIGIVNNTVYDPLQPELDSFKEELDKYFKNHTSPDVDLGDISGINASVVNIQKEIDRLNEVAKNLNESLIDLQELGKYEQYIKGGSGYIPEAPRDGQAYVRKDGEWVLLSTFL

SEQ ID NO: 6374 - protein, 1241 aa, Artificial Sequence
  SARS-CoV-2/Guangdong/20SF028/2020__EPI_ISL_403936 spike protein (1-1211)(F970C_G999C) Foldon construct
MFVFLVLLPLVSSQCVNLTTRTQLPPAYTNSFTRGVYYPDKVFRSSVLYSTQDLFLPFFSNVTWFHAIHVSGTNGTKRFDNPVLPFNDGVYFASTEKSNIIRGWIFGTTLDSKTQSLLIVNNATNVVIKVCEFQFCNDPFLGVYYHKNNKSWMESEFRVYSSANNCTFEYVSQPFLMDLEGKQGNFKNLREFVFKNIDGYFKIYSKHTPINLVRDLPQGFSALEPLVDLPIGINITRFQTLLALHRSYLTPGDSSSGWTAGAAAYYVGYLQPRTFLLKYNENGTITDAVDCALDPLSETKCTLKSFTVEKGIYQTSNFRVQPTESIVRFPNITNLCPFGEVFNATRFASVYAWNRKRISNCVADYSVLYNSASFSTFKCYGVSPTKLNDLCFTNVYADSFVIRGDEVRQIAPGQTGKIADYNYKLPDDFTGCVIAWNSNNLDSKVGGNYNYLYRLFRKSNLKPFERDISTEIYQAGSTPCNGVEGFNCYFPLQSYGFQPTNGVGYQPYRVVVLSFELLHAPATVCGPKKSTNLVKNKCVNFNFNGLTGTGVLTESNKKFLPFQQFGRDIADTTDAVRDPQTLEILDITPCSFGGVSVITPGTNTSNQVAVLYQDVNCTEVPVAIHADQLTPTWRVYSTGSNVFQTRAGCLIGAEHVNNSYECDIPIGAGICASYQTQTNSPRRARSVASQSIIAYTMSLGAENSVAYSNNSIAIPTNFTISVTTEILPVSMTKTSVDCTMYICGDSTECSNLLLQYGSFCTQLNRALTGIAVEQDKNTQEVFAQVKQIYKTPPIKDFGGFNFSQILPDPSKPSKRSFIEDLLFNKVTLADAGFIKQYGDCLGDIAARDLICAQKFNGLTVLPPLLTDEMIAQYTSALLAGTITSGWTFGAGAALQIPFAMQMAYRFNGIGVTQNVLYENQKLIANQFNSAIGKIQDSLSSTASALGKLQDVVNQNAQALNTLVKQLSSNCGAISSVLNDILSRLDKVEAEVQIDRLITCRLQSLQTYVTQQLIRAAEIRASANLAATKMSECVLGQSKRVDFCGKGYHLMSFPQSAPHGVVFLHVTYVPAQEKNFTTAPAICHDGKAHFPREGVFVSNGTHWFVTQRNFYEPQIITTDNTFVSGNCDVVIGIVNNTVYDPLQPELDSFKEELDKYFKNHTSPDVDLGDISGINASVVNIQKEIDRLNEVAKNLNESLIDLQELGKYEQYIKGGSGYIPEAPRDGQAYVRKDGEWVLLSTFL

SEQ ID NO: 6375 - protein, 1241 aa, Artificial Sequence
  SARS-CoV-2/Shenzhen/SZTH-001/2020__EPI_ISL_406592 spike protein (1-1211)(F970C_G999C) Foldon construct
MFVFLVLLPLVSSQCVNLTTRTQLPPAYTNSFTRGVYYPDKVFRSSVLHSTQDLFLPFFSNVTWFHAIHVSGTNGTKRFDNPVLPFNDGVYFASTEKSNIIRGWIFGTTLDSKTQSLLIVNNATNVVIKVCEFQFCNDPFLGVYYHKNNKSWMESEFRVYSSANNCTFEYVSQPFLMDLEGKQGNFKNLREFVFKNIDGYFKIYSKHTPINLVRDLPQGFSALEPLVDLPIGINITRFQTLLALHRSYLTPGDSSSGWTAGAAAYYVGYLQPRTFLLKYNENGTITDAVDCALDPLSETKCTLKSFTVEKGIYQTSNFRVQPTESIVRFPNITNLCPFGEVFNATRFASVYAWNRKRISNCVADYSVLYNSASFSTFKCYGVSPTKLNDLCFTNVYADSFVIRGDEVRQIAPGQTGKIADYNYKLPDDFTGCVIAWNSNNLDSKVGGNYNYLYRLFRKSNLKPFERDISTEIYQAGSTPCNGVEGFNCYFPLQSYGFQPTNGVGYQPYRVVVLSFELLHAPATVCGPKKSTNLVKNKCVNFNFNGLTGTGVLTESNKKFLPFQQFGRDIADTTDAVRDPQTLEILDITPCSFGGVSVITPGTNTSNQVAVLYQDVNCTEVPVAIHADQLTPTWRVYSTGSNVFQTRAGCLIGAEHVNNSYECDIPIGAGICASYQTQTNSPRRARSVASQSIIAYTMSLGAENSVAYSNNSIAIPTNFTISVTTEILPVSMTKTSVDCTMYICGDSTECSNLLLQYGSFCTQLNRALTGIAVEQDKNTQEVFAQVKQIYKTPPIKDFGGFNFSQILPDPSKPSKRSFIEDLLFNKVTLADAGFIKQYGDCLGDIAARDLICAQKFNGLTVLPPLLTDEMIAQYTSALLAGTITSGWTFGAGAALQIPFAMQMAYRFNGIGVTQNVLYENQKLIANQFNSAIGKIQDSLSSTASALGKLQDVVNQNAQALNTLVKQLSSNCGAISSVLNDILSRLDKVEAEVQIDRLITCRLQSLQTYVTQQLIRAAEIRASANLAATKMSECVLGQSKRVDFCGKGYHLMSFPQSAPHGVVFLHVTYVPAQEKNFTTAPAICHDGKAHFPREGVFVSNGTHWFVTQRNFYEPQIITTDNTFVSGNCDVLIGIVNNTVYDPLQPELDSFKEELDKYFKNHTSPDVDLGDISGINASVVNIQKEIDRLNEVAKNLNESLIDLQELGKYEQYIKGGSGYIPEAPRDGQAYVRKDGEWVLLSTFL

SEQ ID NO: 6376 - protein, 1241 aa, Artificial Sequence
  SARS-CoV-2/Shenzhen/SZTH-004/2020__EPI_ISL_406595 spike protein (1-1211)(F970C_G999C) Foldon construct
MFVFLVLLPLVSSQCVNLTTRTQLPPAYTNSFTRGVYYPDKVFRSSVLHSTQDLFLPFFSNVTWFHAIHVSGTNGTKRFDNPVLPFNDGVYFASTEKSNIIRGWIFGTTLDSKTQSLLIVNNATNVVIKVCEFQFCNDPFLGVYYHKNNKSWMESEFRVYSSANNCTFEYVSQPFLMDLEGKQGNFKNLREFVFKNIDGYFKIYSKHTPINLVRDLPQGFSALEPLVDLPIGINITRFQTLLALHRSYLTPGDSSSGWTAGAAAYYVGYLQPRTFLLKYNENGTITDAVDCALDPLSETKCTLKSFTVEKGIYQTSNFRVQPTESIVRFPNITNLCPFGEVFNATRFASVYAWDRKRISNCVAYYSVLYNSASFSTFKCYGVSPTKLNDLCFTNVYADSFVIRGDEVRQIAPGQTGKIADYNYKLPDDFTGCVIAWNSNNLDSKVGGNYNYLYRLFRKSNLKPFERDISTEIYQAGSTPCNGVEGFNCYFPLQSYGFQPTNGVGYQPYRVVVLSFELLHAPATVCGPKKSTNLVKNKCVNFNFNGLTGTGVLTESNKKFLPFQQFGRDIADTTDAVRDPQTLEILDITPCSFGGVSVITPGTNTSNQVAVLYQDVNCTEVPVAIHADQLTPTWRVYSTGSNVFQTRAGCLIGAEHVNNSYECDIPIGAGICASYQTQTNSPRRARSVASQSIIAYTMSLGAENSVAYSNNSIAIPTNFTISVTTEILPVSMTKTSVDCTMYICGDSTECSNLLLQYGSFCTQLNRALTGIAVEQDKNTQEVFAQVKQIYKTPPIKDFGGFNFSQILPDPSKPSKRSFIEDLLFNKVTLADAGFIKQYGDCLGDIAARDLICAQKFNGLTVLPPLLTDEMIAQYTSALLAGTITSGWTFGAGAALQIPFAMQMAYRFNGIGVTQNVLYENQKLIANQFNSAIGKIQDSLSSTASALGKLQDVVNQNAQALNTLVKQLSSNCGAISSVLNDILSRLDKVEAEVQIDRLITCRLQSLQTYVTQQLIRAAEIRASANLAATKMSECVLGQSKRVDFCGKGYHLMSFPQSAPHGVVFLHVTYVPAQEKNFTTAPAICHDGKAHFPREGVFVSNGTHWFVTQRNFYEPQIITTDNTFVSGNCDVVIGIVNNTVYDPLQPELDSFKEELDKYFKNHTSPDVDLGDISGINASVVNIQKEIDRLNEVAKNLNESLIDLQELGKYEQYIKGGSGYIPEAPRDGQAYVRKDGEWVLLSTFL

SEQ ID NO: 6377 - protein, 1241 aa, Artificial Sequence
  SARS-CoV-2/France/IDF0372/2020__EPI_ISL_406596 spike protein (1-1211)(F970C_G999C) Foldon construct
MFVFLVLLPLVSSQCVNLTTRTQLPPAYTNSFTRGVYYPDKVFRSSVLHSTQDLFLPFFSNVTWFHAIHVSGTNGTKRFDNPVLPFNDGVYFASTEKSNIIRGWIFGTTLDSKTQSLLIVNNATNVVIKVCEFQFCNDPFLGVYYHKNNKSWMESEFRVYSSANNCTFEYVSQPFLMDLEGKQGNFKNLREFVFKNIDGYFKIYSKHTPINLVRDLPQGFSALEPLVDLPIGINITRFQTLLALHRSYLTPGDSSSGWTAGAAAYYVGYLQPRTFLLKYNENGTITDAVDCALDPLSETKCTLKSFTVEKGIYQTSNFRVQPTESIVRFPNITNLCPFGEVFNATRFASVYAWNRKRISNCVADYSFLYNSASFSTFKCYGVSPTKLNDLCFTNVYADSFVIRGDEVRQIAPGQTGKIADYNYKLPDDFTGCVIAWNSNNLDSKVGGNYNYLYRLFRKSNLKPFERDISTEIYQAGSTPCNGVEGFNCYFPLQSYGFQPTNGVGYQPYRVVVLSFELLHAPATVCGPKKSTNLVKNKCVNFNFNGLTGTGVLTESNKKFLPFQQFGRDIADTTDAVRDPQTLEILDITPCSFGGVSVITPGTNTSNQVAVLYQDVNCTEVPVAIHADQLTPTWRVYSTGSNVFQTRAGCLIGAEHVNNSYECDIPIGAGICASYQTQTNSPRRARSVASQSIIAYTMSLGAENSVAYSNNSIAIPTNFTISVTTEILPVSMTKTSVDCTMYICGDSTECSNLLLQYGSFCTQLNRALTGIAVEQDKNTQEVFAQVKQIYKTPPIKDFGGFNFSQILPDPSKPSKRSFIEDLLFNKVTLADAGFIKQYGDCLGDIAARDLICAQKFNGLTVLPPLLTDEMIAQYTSALLAGTITSGWTFGAGAALQIPFAMQMAYRFNGIGVTQNVLYENQKLIANQFNSAIGKIQDSLSSTASALGKLQDVVNQNAQALNTLVKQLSSNCGAISSVLNDILSRLDKVEAEVQIDRLITCRLQSLQTYVTQQLIRAAEIRASANLAATKMSECVLGQSKRVDFCGKGYHLMSFPQSAPHGVVFLHVTYVPAQEKNFTTAPAICHDGKAHFPREGVFVSNGTHWFVTQRNFYEPQIITTDNTFVSGNCDVVIGIVNNTVYDPLQPELDSFKEELDKYFKNHTSPDVDLGDISGINASVVNIQKEIDRLNEVAKNLNESLIDLQELGKYEQYIKGGSGYIPEAPRDGQAYVRKDGEWVLLSTFL

SEQ ID NO: 6378 - protein, 1241 aa, Artificial Sequence
  SARS-CoV-2/Australia/VIC01/2020__EPI_ISL_406844 spike protein (1-1211)(F970C_G999C) Foldon construct
MFVFLVLLPLVSSQCVNLTTRTQLPPAYTNSFTRGVYYPDKVFRSSVLHSTQDLFLPFFSNVTWFHAIHVSGTNGTKRFDNPVLPFNDGVYFASTEKSNIIRGWIFGTTLDSKTQSLLIVNNATNVVIKVCEFQFCNDPFLGVYYHKNNKSWMESEFRVYSSANNCTFEYVSQPFLMDLEGKQGNFKNLREFVFKNIDGYFKIYSKHTPINLVRDLPQGFSALEPLVDLPIGINITRFQTLLALHRRYLTPGDSSSGWTAGAAAYYVGYLQPRTFLLKYNENGTITDAVDCALDPLSETKCTLKSFTVEKGIYQTSNFRVQPTESIVRFPNITNLCPFGEVFNATRFASVYAWNRKRISNCVADYSVLYNSASFSTFKCYGVSPTKLNDLCFTNVYADSFVIRGDEVRQIAPGQTGKIADYNYKLPDDFTGCVIAWNSNNLDSKVGGNYNYLYRLFRKSNLKPFERDISTEIYQAGSTPCNGVEGFNCYFPLQSYGFQPTNGVGYQPYRVVVLSFELLHAPATVCGPKKSTNLVKNKCVNFNFNGLTGTGVLTESNKKFLPFQQFGRDIADTTDAVRDPQTLEILDITPCSFGGVSVITPGTNTSNQVAVLYQDVNCTEVPVAIHADQLTPTWRVYSTGSNVFQTRAGCLIGAEHVNNSYECDIPIGAGICASYQTQTNSPRRARSVASQSIIAYTMSLGAENSVAYSNNSIAIPTNFTISVTTEILPVSMTKTSVDCTMYICGDSTECSNLLLQYGSFCTQLNRALTGIAVEQDKNTQEVFAQVKQIYKTPPIKDFGGFNFSQILPDPSKPSKRSFIEDLLFNKVTLADAGFIKQYGDCLGDIAARDLICAQKFNGLTVLPPLLTDEMIAQYTSALLAGTITSGWTFGAGAALQIPFAMQMAYRFNGIGVTQNVLYENQKLIANQFNSAIGKIQDSLSSTASALGKLQDVVNQNAQALNTLVKQLSSNCGAISSVLNDILSRLDKVEAEVQIDRLITCRLQSLQTYVTQQLIRAAEIRASANLAATKMSECVLGQSKRVDFCGKGYHLMSFPQSAPHGVVFLHVTYVPAQEKNFTTAPAICHDGKAHFPREGVFVSNGTHWFVTQRNFYEPQIITTDNTFVSGNCDVVIGIVNNTVYDPLQPELDSFKEELDKYFKNHTSPDVDLGDISGINASVVNIQKEIDRLNEVAKNLNESLIDLQELGKYEQYIKGGSGYIPEAPRDGQAYVRKDGEWVLLSTFL

SEQ ID NO: 6379 - protein, 1241 aa, Artificial Sequence
  SARS-CoV-2/Germany/BavPat1/2020__EPI_ISL_406862 spike protein (1-1211)(F970C_G999C) Foldon construct
MFVFLVLLPLVSSQCVNLTTRTQLPPAYTNSFTRGVYYPDKVFRSSVLHSTQDLFLPFFSNVTWFHAIHVSGTNGTKRFDNPVLPFNDGVYFASTEKSNIIRGWIFGTTLDSKTQSLLIVNNATNVVIKVCEFQFCNDPFLGVYYHKNNKSWMESEFRVYSSANNCTFEYVSQPFLMDLEGKQGNFKNLREFVFKNIDGYFKIYSKHTPINLVRDLPQGFSALEPLVDLPIGINITRFQTLLALHRSYLTPGDSSSGWTAGAAAYYVGYLQPRTFLLKYNENGTITDAVDCALDPLSETKCTLKSFTVEKGIYQTSNFRVQPTESIVRFPNITNLCPFGEVFNATRFASVYAWNRKRISNCVADYSVLYNSASFSTFKCYGVSPTKLNDLCFTNVYADSFVIRGDEVRQIAPGQTGKIADYNYKLPDDFTGCVIAWNSNNLDSKVGGNYNYLYRLFRKSNLKPFERDISTEIYQAGSTPCNGVEGFNCYFPLQSYGFQPTNGVGYQPYRVVVLSFELLHAPATVCGPKKSTNLVKNKCVNFNFNGLTGTGVLTESNKKFLPFQQFGRDIADTTDAVRDPQTLEILDITPCSFGGVSVITPGTNTSNQVAVLYQGVNCTEVPVAIHADQLTPTWRVYSTGSNVFQTRAGCLIGAEHVNNSYECDIPIGAGICASYQTQTNSPRRARSVASQSIIAYTMSLGAENSVAYSNNSIAIPTNFTISVTTEILPVSMTKTSVDCTMYICGDSTECSNLLLQYGSFCTQLNRALTGIAVEQDKNTQEVFAQVKQIYKTPPIKDFGGFNFSQILPDPSKPSKRSFIEDLLFNKVTLADAGFIKQYGDCLGDIAARDLICAQKFNGLTVLPPLLTDEMIAQYTSALLAGTITSGWTFGAGAALQIPFAMQMAYRFNGIGVTQNVLYENQKLIANQFNSAIGKIQDSLSSTASALGKLQDVVNQNAQALNTLVKQLSSNCGAISSVLNDILSRLDKVEAEVQIDRLITCRLQSLQTYVTQQLIRAAEIRASANLAATKMSECVLGQSKRVDFCGKGYHLMSFPQSAPHGVVFLHVTYVPAQEKNFTTAPAICHDGKAHFPREGVFVSNGTHWFVTQRNFYEPQIITTDNTFVSGNCDVVIGIVNNTVYDPLQPELDSFKEELDKYFKNHTSPDVDLGDISGINASVVNIQKEIDRLNEVAKNLNESLIDLQELGKYEQYIKGGSGYIPEAPRDGQAYVRKDGEWVLLSTFL

SEQ ID NO: 6380 - protein, 1241 aa, Artificial Sequence
  SARS-CoV-2/Wuhan/HBCDC-HB-02/2020__EPI_ISL_412978 spike protein (1-1211)(F970C_G999C) Foldon construct
MFVFLVLLPLVSSQCVNLTTRTQLPPAYTNSFTRGVYYPDKVFRSSVLHSTQDLFLPFFSNVTWFHAIHVSGTNGTKRFDNPVLPFNDGVYFASTEKSNIIRGWIFGTTLDSKTQSLLIVNNATNVVIKVCEFQFCNDPFLGVYYHKNNKSWMESEFRVYSSANNCTFEYVSQPFLMDLEGKQGNFKNLREFVFKNIDGYFKIYSKHTPINLVRDLPQGFSALEPLVDLPIGINITRFQTLLALHRSYLTPGDSSSGWTAGAAAYYVGYLQPRTFLLKYNENGTITDAVDCALDPLSETKCTLKSFTVEKGIYQTSNFRVQPTESIVRFPNITNLCPFGEVFNATRFASVYAWNRKRISNCVADYSVLYNSASFSTFKCYGVSPTKLNDLCFTNVYADSFVIRGDEVRQIAPGQTGKIADYNYKLPDDFTGCVIAWNSNNLDSKVGGNYNYLYRLFRKSNLKPFERDISTEIYQAGSTPCNGVEGFNCYFPLQSYGFQPTNGVGYQPYRVVVLSFELLHAPATVCGPKKSTNLVKNKCVNFNFNGLTGTGVLTESNKKFLPFQQFGRDIADTTDAVRDPQTLEILDITPCSFGGVSVITPGTNTSNQVAVLYQDVNCTEVPVAIHADQLTPTWRVYSTGSNVFQTRAGCLIGAEHVNNSYECDIPIGAGICASYQTQTNSPRRARSVASQSIIAYTMSLGAENSVAYSNNSIAIPTNFTISVTTEILPVSMTKTSVDCTMYICGDSTECSNFLLQYGSFCTQLNRALTGIAVEQDKNTQEVFAQVKQIYKTPPIKDFGGFNFSQILPDPSKPSKRSFIEDLLFNKVTLADAGFIKQYGDCLGDIAARDLICAQKFNGLTVLPPLLTDEMIAQYTSALLAGTITSGWTFGAGAALQIPFAMQMAYRFNGIGVTQNVLYENQKLIANQFNSAIGKIQDSLSSTASALGKLQDVVNQNAQALNTLVKQLSSNCGAISSVLNDILSRLDKVEAEVQIDRLITCRLQSLQTYVTQQLIRAAEIRASANLAATKMSECVLGQSKRVDFCGKGYHLMSFPQSAPHGVVFLHVTYVPAQEKNFTTAPAICHDGKAHFPREGVFVSNGTHWFVTQRNFYEPQIITTDNTFVSGNCDVVIGIVNNTVYDPLQPELDSFKEELDKYFKNHTSPDVDLGDISGINASVVNIQKEIDRLNEVAKNLNESLIDLQELGKYEQYIKGGSGYIPEAPRDGQAYVRKDGEWVLLSTFL

SEQ ID NO: 6381 - protein, 1241 aa, Artificial Sequence
  SARS-CoV-2/Australia/QLD02/2020__EPI_ISL_407896 spike protein (1-1211)(F970C_G999C) Foldon construct
MFVFLVLLPLVSSQCVNLTTRTQLPPAYTNSFTRGVYYPDKVFRSSVLHSTQDLFLPFFSNVTWFHAIHVSGTNGTKRFDNPVLPFNDGVYFASTEKSNIIRGWIFGTTLDSKTQSLLIVNNATNVVIKVCEFQFCNDPFLGVYYHKNNKSWMESEFRVYSSANNCTFEYVSQPFLMDLEGKQGNFKNLREFVFKNIDGYFKIYSKHTPINLVRDLPQGFSALEPLVDLPIGINITRFQTLLALHRSYLTPGDSSSGWTAGAAAYYVGYLQPRTFLLKYNENGTITDAVDCALDPLSETKCTLKSFTVEKGIYQTSNFRVQPTESIVRFPNITNLCPFGEVFNATRFASVYAWNRKRISNCVADYSVLYNSASFSTFKCYGVSPTKLNDLCFTNVYADSFVIRGDEVRQIAPGQTGKIADYNYKLPDDFTGCVIAWNSNNLDSKVGGNYNYLYRLFRKSNLKPFERDISTEIYQAGSTPCNGVEGFNCYFPLQSYGFQPTNGVGYQPYRVVVLSFELLHAPATVCGPKKSTNLVKNKCVNFNFNGLTGTGVLTESNKKFLPFQQFGRDIADTTDAVRDPQTLEILDITPCSFGGVSVITPGTNTSNQVAVLYQDVNCTEVPVAIHADQLTPTWRVYSTGSNVFQTRAGCLIGAEHVNNSYECDIPIGAGICASYQTQTNSPRRARSVASQSIIAYTMSLGAENSVAYSNNSIAIPTNFTISVTTEILPVSMTKTSVDCTMYICGDSTECSNLLLQYGSFCTQLNRALTGIAVEQDKNTQEVFAQVKQIYKTPPIKDFGGFNFSQILPDPSKPSKRSFIEDLLFNKVTLADAGFIKQYGDCLGDIAARDLICAQKFNGLTVLPPLLTDEMIAQYTSALLAGTITSGWTFGAGAALQIPFAMQMAYRFNGIGVTQNVLYENQKLIANQFNSAIGKIQDSLSSTASALGKLQDVVNQNAQALNTLVKQLSSNCGAISSVLNDILSRLDKVEAEVQIDRLITCRLQSLQTYVTQQLIRAAEIRASANLAATKMSECVLGQSKRVDFCGKGYHLMSFPQSAPHGVVFLHVTYVPAQEKNFTTAPAICHDGKAHFPREGVFVSNGTHWFVTQRNFYEPQIITTDNTFVSGNCDVVIGIVNNTVYDPLQLELDSFKEELDKYFKNHTSPDVDLGDISGINASVVNIQKEIDRLNEVAKNLNESLIDLQELGKYEQYIKGGSGYIPEAPRDGQAYVRKDGEWVLLSTFL

SEQ ID NO: 6382 - protein, 1241 aa, Artificial Sequence
  SARS-CoV-2/India/1-31/2020__EPI_ISL_413523 spike protein (1-1211)(F970C_G999C) Foldon construct
MFVFLVLLPLVSSQCVNLTTRTQLPPAYTNSFTRGVYYPDKVFRSSVLHSTQDLFLPFFSNVTWFHAIHVSGTNGTKRFDNPVLPFNDGVYFASTEKSNIIRGWIFGTTLDSKTQSLLIVNNATNVVIKVCEFQFCNDPFLGVYYHKNNKSWMESEFRVYSSANNCTFEYVSQPFLMDLEGKQGNFKNLREFVFKNIDGYFKIYSKHTPINLVRDLPQGFSALEPLVDLPIGINITRFQTLLALHRSYLTPGDSSSGWTAGAAAYYVGYLQPRTFLLKYNENGTITDAVDCALDPLSETKCTLKSFTVEKGIYQTSNFRVQPTESIVRFPNITNLCPFGEVFNATRFASVYAWNRKRISNCVADYSVLYNSASFSTFKCYGVSPTKLNDLCFTNVYADSFVIRGDEVRQIAPGQTGKIADYNYKLPDDFTGCVIAWNSNNLDSKVGGNYNYLYRLFRKSNLKPFERDISTEIYQAGSTPCNGVEGFNCYFPLQSYGFQPTNGVGYQPYRVVVLSFELLHAPATVCGPKKSTNLVKNKCVNFNFNGLTGTGVLTESNKKFLPFQQFGRDIADTTDAVRDPQTLEILDITPCSFGGVSVITPGTNTSNQVAVLYQDVNCTEVPVAIHADQLTPTWRVYSTGSNVFQTRAGCLIGAEHVNNSYECDIPIGAGICASYQTQTNSPRRARSVASQSIIAYTMSLGAENSVAYSNNSIAIPTNFTISVTTEILPVSMTKTSVDCTMYICGDSTECSNLLLQYGSFCTQLNRALTGIAVEQDKNTQEVFAQVKQIYKTPPIKDFGGFNFSQILPDPSKPSKRSFIEDLLFNKVTLADAGFIKQYGDCLGDIAARDLICAQKFNGLTVLPPLLTDEMIAQYTSALLAGTITSGWTFGAGAALQIPFAMQMAYRFNGIGVTQNVLYENQKLIANQFNSVIGKIQDSLSSTASALGKLQDVVNQNAQALNTLVKQLSSNCGAISSVLNDILSRLDKVEAEVQIDRLITCRLQSLQTYVTQQLIRAAEIRASANLAATKMSECVLGQSKRVDFCGKGYHLMSFPQSAPHGVVFLHVTYVPAQEKNFTTAPAICHDGKAHFPREGVFVSNGTHWFVTQRNFYEPQIITTDNTFVSGNCDVVIGIVNNTVYDPLQPELDSFKEELDKYFKNHTSPDVDLGDISGINASVVNIQKEIDRLNEVAKNLNESLIDLQELGKYEQYIKGGSGYIPEAPRDGQAYVRKDGEWVLLSTFL

SEQ ID NO: 6383 - protein, 1241 aa, Artificial Sequence
  SARS-CoV-2/Guangdong/GD2020087-P0008/2020__EPI_ISL_413863 spike protein (1-1211)(F970C_G999C) Foldon construct
MFVFLVLLPLVSSQCVNLTTRTQLPPAYTNSFTRGVYYPDKVFRSSVLHSTQDLFLPFFSNVTWFHAIHVSGTNGTKRFDNPVLPFNDGVYFASTEKSNIIRGWIFGTTLDSKTQSLLIVNNATNVVIKVCEFQFCNDPFLGVYYHKNNKSWMESEFRVYSSANNCTFEYVSQPFLMDLEGKQGNFKNLREFVFKNIDGYFKIYSKHTPINLVRDLPQGFSALEPLVDLPIGINITRFQTLLALHRSYLTPGDSSSGWTAGAAAYYVGYLQPRTFLLKYNENGTITDAVDCALDPLSETKCTLKSFTVEKGIYQTSNFRVQPTESIVRFPNITNLCPFGEVFNATRFASVYAWNRKRISNCVADYSVLYNSASFSTFKCYGVSPTKLNDLCFTNVYADSFVIRGDEVREIAPGQTGKIADYNYKLPDDFTGCVIAWNSNNLDSKVGGNYNYLYRLFRKSNLKPFERDISTEIYQAGSTPCNGVEGFNCYFPLQSYGFQPTNGVGYQPYRVVVLSFELLHAPATVCGPKKSTNLVKNKCVNFNFNGLTGTGVLTESNKKFLPFQQFGRDIADTTDAVRDPQTLEILDITPCSFGGVSVITPGTNTSNQVAVLYQDVNCTEVPVAIHADQLTPTWRVYSTGSNVFQTRAGCLIGAEHVNNSYECDIPIGAGICASYQTQTNSPRRARSVASQSIIAYTMSLGAENSVAYSNNSIAIPTNFTISVTTEILPVSMTKTSVDCTMYICGDSTECSNLLLQYGSFCTQLNRALTGIAVEQDKNTQEVFAQVKQIYKTPPIKDFGGFNFSQILPDPSKPSKRSFIEDLLFNKVTLADAGFIKQYGDCLGDIAARDLICAQKFNGLTVLPPLLTDEMIAQYTSALLAGTITSGWTFGAGAALQIPFAMQMAYRFNGIGVTQNVLYENQKLIANQFNSAIGKIQDSLSSTASALGKLQDVVNQNAQALNTLVKQLSSNCGAISSVLNDILSRLDKVEAEVQIDRLITCRLQSLQTYVTQQLIRAAEIRASANLAATKMSECVLGQSKRVDFCGKGYHLMSFPQSAPHGVVFLHVTYVPAQEKNFTTAPAICHDGKAHFPREGVFVSNGTHWFVTQRNFYEPQIITTDNTFVSGNCDVVIGIVNNTVYDPLQPELDSFKEELDKYFKNHTSPDVDLGDISGINASVVNIQKEIDRLNEVAKNLNESLIDLQELGKYEQYIKGGSGYIPEAPRDGQAYVRKDGEWVLLSTFL

SEQ ID NO: 6384 - protein, 1241 aa, Artificial Sequence
  SARS-CoV-2/Sweden/01/2020__EPI_ISL_411951 spike protein (1-1211)(F970C_G999C) Foldon construct
MFVFLVLLPLVSSQCVNLTTRTQLPPAYTNSFTRGVYYPDKVFRSSVLHSTQDLFLPFFSNVTWFHAIHVSGTNGTKRFDNPVLPFNDGVYFASTEKSNIIRGWIFGTTLDSKTQSLLIVNNATNVVIKVCEFQFCNDPFLGVYYHKNNKSWMESEFRVYSSANNCTFEYVSQPFLMDLEGKQGNFKNLREFVFKNIDGYFKIYSKHTPINLVRDLPQGFSALEPLVDLPIGINITRFQTLLALHRSYLTPGDSSSGWTAGAAAYYVGYLQPRTFLLKYNENGTITDAVDCALDPLSETKCTLKSFTVEKGIYQTSNFRVQPTESIVRFPNITNLCPFGEVFNATRFASVYAWNRKRISNCVADYSVLYNSASFSTFKCYGVSPTKLNDLCFTNVYADSFVIRGDEVRQIAPGQTGKIADYNYKLPDDFTGCVIAWNSNNLDSKVGGNYNYLYRLFRKSNLKPFERDISTEIYQAGSTPCNGVEGFNCYFPLQSYGFQPTNGVGYQPYRVVVLSFELLHAPATVCGPKKSTNLVKNKCVNFNFNGLTGTGVLTESNKKFLPFQQFGRDIADTTDAVRDPQTLEILDITPCSFGGVSVITPGTNTSNQVAVLYQDVNCTEVPVAIHADQLTPTWRVYSTGSNVFQTRAGCLIGAEHVNNSYECDIPIGAGICASYQTQTNSPRRARSVASQSIIAYTMSLGAENSVAYSNNSIAIPTNFTISVTTEILPVSMTKTSVDCTMYICGDSTECSNLLLQYGSFCTQLNRALTGIAVEQDKNTQEVFAQVKQIYKTPPIKDCGGFNFSQILPDPSKPSKRSFIEDLLFNKVTLADAGFIKQYGDCLGDIAARDLICAQKFNGLTVLPPLLTDEMIAQYTSALLAGTITSGWTFGAGAALQIPFAMQMAYRFNGIGVTQNVLYENQKLIANQFNSAIGKIQDSLSSTASALGKLQDVVNQNAQALNTLVKQLSSNCGAISSVLNDILSRLDKVEAEVQIDRLITCRLQSLQTYVTQQLIRAAEIRASANLAATKMSECVLGQSKRVDFCGKGYHLMSFPQSAPHGVVFLHVTYVPAQEKNFTTAPAICHDGKAHFPREGVFVSNGTHWFVTQRNFYEPQIITTDNTFVSGNCDVVIGIVNNTVYDPLQPELDSFKEELDKYFKNHTSPDVDLGDISGINASVVNIQKEIDRLNEVAKNLNESLIDLQELGKYEQYIKGGSGYIPEAPRDGQAYVRKDGEWVLLSTFL

SEQ ID NO: 6385 - protein, 1241 aa, Artificial Sequence
  SARS-CoV-2/Tianmen/HBCDC-HB-07/2020__EPI_ISL_412983 spike protein (1-1211)(F970C_G999C) Foldon construct
MFVFLVLLPLVSSQCVNLTTRTQLPPAYTNSFTRGVYYPDKVFRSSVLHSTQDLFLPFFSNVTWFHAIHVSGTNGTKRFDNPVLPFNDGVYFASTEKSNIIRGWIFGTTLDSKTQSLLIVNNATNVVIKVCEFQFCNDPFLGVYYHKNNKSWMESEFRVYSSANNCTFEYVSQPFLMDLEGKQGNFKNLREFVFKNIDGYFKIYSKHTPINLVRDLPQGFSALEPLVDLPIGINITRFQTLLALHRSYLTPGDSSSGWTAGAAAYYVGYLQPRTFLLKYNENGTITDAVDCALDPLSETKCTLKSFTVEKGIYQTSNFRVQPTESIVRFPNITNLCPFGEVFNATRFASVYAWNRKRISNCVADYSVLYNSASFSTFKCYGVSPTKLNDLCFTNVYADSFVIRGDEVRQIAPGQTGKIADYNYKLPDDFTGCVIAWNSNNLDSKVGGNYNYLYRLFRKSNLKPFERDISTEIYQAGSTPCNGVEGFNCYFPLQSYGFQPTNGVGYQPYRVVVLSFELLHAPATVCGPKKSTNLVKNKCVNFNFNGLTGTGVLTESNKKFLPFQQFGRDIADTTDAVRDPQTLEILDITPCSFGGVSVITPGTNTSNQVAVLYQDLNCTEVPVAIHADQLTPTWRVYSTGSNVFQTRAGCLIGAEHVNNSYECDIPIGAGICASYQTQTNSPRRARSVASQSIIAYTMSLGAENSVAYSNNSIAIPTNFTISVTTEILPVSMTKTSVDCTMYICGDSTECSNLLLQYGSFCTQLNRALTGIAVEQDKNTQEVFAQVKQIYKTPPIKDFGGFNFSQILPDPSKPSKRSFIEDLLFNKVTLADAGFIKQYGDCLGDIAARDLICAQKFNGLTVLPPLLTDEMIAQYTSALLAGTITSGWTFGAGAALQIPFAMQMAYRFNGIGVTQNVLYENQKLIANQFNSAIGKIQDSLSSTASALGKLQDVVNQNAQALNTLVKQLSSNCGAISSVLNDILSRLDKVEAEVQIDRLITCRLQSLQTYVTQQLIRAAEIRASANLAATKMSECVLGQSKRVDFCGKGYHLMSFPQSAPHGVVFLHVTYVPAQEKNFTTAPAICHDGKAHFPREGVFVSNGTHWFVTQRNFYEPQIITTDNTFVSGNCDVVIGIVNNTVYDPLQPELDSFKEELDKYFKNHTSPDVDLGDISGINASVVNIQKEIDRLNEVAKNLNESLIDLQELGKYEQYIKGGSGYIPEAPRDGQAYVRKDGEWVLLSTFL

SEQ ID NO: 6386 - protein, 1241 aa, Artificial Sequence
  SARS-CoV-2/Hong Kong/case42_VM20002493/2020__EPI_ISL_414527 spike protein (1-1211)(F970C_G999C) Foldon construct
MFVFLVLLPLVSSQCVNLTTRTQLPPAYTNSFTRGVYYPDKVFRSSVLHSTQDLFLPFFSNVTWFHAIHVSGTNGTKRFDNPVLPFNDGVYFASTEKSNIIRGWIFGTTLDSKTQSLLIVNNATNVVIKVCEFQFCNDPFLGVYYHKNNKSWMESEFRVYSSANNCTFEYVSQPFLMDLEGKQGNFKNLREFVFKNIDGYFKIYSKHTPINLVRDLPQGFSALEPLVDLPIGINITRFQTLLALHRSYLTPGDSSSGWTAGAAAYYVGYLQPRTFLLKYNENGTITDAVDCALDPLSETKCTLKSFTVEKGIYQTSNFRVQPTESIVRFPNITNLCPFGEVFNATRFASVYAWNRKRISNCVADYSVLYNSASFSTFKCYGVSPTKLNDLCFTNVYADSFVIRGDEVRQIAPGQTGKIADYNYKLPDDFTGCVIAWNSNNLDSKVGGNYNYLYRLFRKSNLKPFERDISTEIYQAGSTPCNGVEGFNCYFPLQSYGFQPTNGVGYQPYRVVVLSFELLHAPATVCGPKKSTNLVKNKCVNFNFNGLTGTGVLTESNKKFLPFQQFGRDIADTTDAVRDPQTLEILDITPCSFGGVSVITPGTNTSNQVAVLYQDVNCTEVPVAIHADQLTPTWRVYSTGSNVFQTRAGCLIGAEHVNNSYECDIPIGAGICASYQTQTNSPRRARSVASQSIIAYTMSLGAENSVAYSNNSIAIPTNFAISVTTEILPVSMTKTSVDCTMYICGDSTECSNLLLQYGSFCTQLNRALTGIAVEQDKNTQEVFAQVKQIYKTPPIKDFGGFNFSQILPDPSKPSKRSFIEDLLFNKVTLADAGFIKQYGDCLGDIAARDLICAQKFNGLTVLPPLLTDEMIAQYTSALLAGTITSGWTFGAGAALQIPFAMQMAYRFNGIGVTQNVLYENQKLIANQFNSAIGKIQDSLSSTASALGKLQDVVNQNAQALNTLVKQLSSNCGAISSVLNDILSRLDKVEAEVQIDRLITCRLQSLQTYVTQQLIRAAEIRASANLAATKMSECVLGQSKRVDFCGKGYHLMSFPQSAPHGVVFLHVTYVPAQEKNFTTAPAICHDGKAHFPREGVFVSNGTHWFVTQRNFYEPQIITTDNTFVSGNCDVVIGIVNNTVYDPLQPELDSFKEELDKYFKNHTSPDVDLGDISGINASVVNIQKEIDRLNEVAKNLNESLIDLQELGKYEQYIKGGSGYIPEAPRDGQAYVRKDGEWVLLSTFL

SEQ ID NO: 6387 - protein, 1241 aa, Artificial Sequence
  SARS-CoV-2/USA/CruiseA-23/2020__EPI_ISL_414482 spike protein (1-1211)(F970C_G999C) Foldon construct
MFVFLVLLPLVSSQCVNLTTRTQLPPAYTNSFTRGVYYPDKVFRSSVLHSTQDLFLPFFSNVTWFHAIHVSGTNGTKRFDNPVLPFNDGVYFASTEKSNIIRGWIFGTTLDSKTQSLLIVNNATNVVIKVCEFQFCNDPFLGVYYHKNNKSWMESEFRVYSSANNCTFEYVSQPFLMDLEVKQGNFKNLREFVFKNIDGYFKIYSKHTPINLVRDLPQGFSALEPLVDLPIGINITRFQTLLALHRSYLTPGDSSSGWTAGAAAYYVGYLQPRTFLLKYNENGTITDAVDCALDPLSETKCTLKSFTVEKGIYQTSNFRVQPTESIVRFPNITNLCPFGEVFNATRFASVYAWNRKRISNCVADYSVLYNSASFSTFKCYGVSPTKLNDLCFTNVYADSFVIRGDEVRQIAPGQTGKIADYNYKLPDDFTGCVIAWNSNNLDSKVGGNYNYLYRLFRKSNLKPFERDISTEIYQAGSTPCNGVEGFNCYFPLQSYGFQPTNGVGYQPYRVVVLSFELLHAPATVCGPKKSTNLVKNKCVNFNFNGLTGTGVLTESNKKFLPFQQFGRDIADTTDAVRDPQTLEILDITPCSFGGVSVITPGTNTSNQVAVLYQDVNCTEVPVAIHADQLTPTWRVYSTGSNVFQTRAGCLIGAEHVNNSYECDIPIGAGICASYQTQTNSPRRARSVASQSIIAYTMSLGAENSVAYSNNSIAIPTNFTISVTTEILPVSMTKTSVDCTMYICGDSTECSNLLLQYGSFCTQLNRALTGIAVEQDKNTQEVFAQVKQIYKTPPIKDFGGFNFSQILPDPSKPSKRSFIEDLLFNKVTLADAGFIKQYGDCLGDIAARDLICAQKFNGLTVLPPLLTDEMIAQYTSALLAGTITSGWTFGAGAALQIPFAMQMAYRFNGIGVTQNVLYENQKLIANQFNSAIGKIQDSLSSTASALGKLQDVVNQNAQALNTLVKQLSSNCGAISSVLNDILSRLDKVEAEVQIDRLITCRLQSLQTYVTQQLIRAAEIRASANLAATKMSECVLGQSKRVDFCGKGYHLMSFPQSAPHGVVFLHVTYVPAQEKNFTTAPAICHDGKAHFPREGVFVSNGTHWFVTQRNFYEPQIITTDNTFVSGNCDVVIGIVNNTVYDPLQPELDSFKEELDKYFKNHTSPDVDLGDISGINASVVNIQKEIDRLNEVAKNLNESLIDLQELGKYEQYIKGGSGYIPEAPRDGQAYVRKDGEWVLLSTFL

SEQ ID NO: 6388 - protein, 1241 aa, Artificial Sequence
  SARS-CoV-2/Hong Kong/case85_VM20002868/2020__EPI_ISL_414519 spike protein (1-1211)(F970C_G999C) Foldon construct
MFVFLVLVPLVSSQCVNLTTRTQLPPAYTNSFTRGVYYPDKVFRSSVLHSTQDLFLPFFSNVTWFHAIHVSGTNGTKRFDNPVLPFNDGVYFASTEKSNIIRGWIFGTTLDSKTQSLLIVNNATNVVIKVCEFQFCNDPFLGVYYHKNNKSWMESEFRVYSSANNCTFEYVSQPFLMDLEGKQGNFKNLREFVFKNIDGYFKIYSKHTPINLVRDLPQGFSALEPLVDLPIGINITRFQTLLALHRSYLTPGDSSSGWTAGAAAYYVGYLQPRTFLLKYNENGTITDAVDCALDPLSETKCTLKSFTVEKGIYQTSNFRVQPTESIVRFPNITNLCPFGEVFNATRFASVYAWNRKRISNCVADYSVLYNSASFSTFKCYGVSPTKLNDLCFTNVYADSFVIRGDEVRQIAPGQTGKIADYNYKLPDDFTGCVIAWNSNNLDSKVGGNYNYLYRLFRKSNLKPFERDISTEIYQAGSTPCNGVEGFNCYFPLQSYGFQPTNGVGYQPYRVVVLSFELLHAPATVCGPKKSTNLVKNKCVNFNFNGLTGTGVLTESNKKFLPFQQFGRDIADTTDAVRDPQTLEILDITPCSFGGVSVITPGTNTSNQVAVLYQDVNCTEVPVAIHADQLTPTWRVYSTGSNVFQTRAGCLIGAEHVNNSYECDIPIGAGICASYQTQTNSPRRARSVASQSIIAYTMSLGAENSVAYSNNSIAIPTNFTISVTTEILPVSMTKTSVDCTMYICGDSTECSNLLLQYGSFCTQLNRALTGIAVEQDKNTQEVFAQVKQIYKTPPIKDFGGFNFSQILPDPSKPSKRSFIEDLLFNKVTLADAGFIKQYGDCLGDIAARDLICAQKFNGLTVLPPLLTDEMIAQYTSALLAGTITSGWTFGAGAALQIPFAMQMAYRFNGIGVTQNVLYENQKLIANQFNSAIGKIQDSLSSTASALGKLQDVVNQNAQALNTLVKQLSSNCGAISSVLNDILSRLDKVEAEVQIDRLITCRLQSLQTYVTQQLIRAAEIRASANLAATKMSECVLGQSKRVDFCGKGYHLMSFPQSAPHGVVFLHVTYVPAQEKNFTTAPAICHDGKAHFPREGVFVSNGTHWFVTQRNFYEPQIITTDNTFVSGNCDVVIGIVNNTVYDPLQPELDSFKEELDKYFKNHTSPDVDLGDISGINASVVNIQKEIDRLNEVAKNLNESLIDLQELGKYEQYIKGGSGYIPEAPRDGQAYVRKDGEWVLLSTFL

SEQ ID NO: 6389 - protein, 1241 aa, Artificial Sequence; identical to SEQ ID NO: 6379
  SARS-CoV-2/England/200990660/2020__EPI_ISL_414523 spike protein (1-1211)(F970C_G999C) Foldon construct

SEQ ID NO: 6390 - protein, 1241 aa, Artificial Sequence
  SARS-CoV-2/Australia/NSW09/2020__EPI_ISL_413595 spike protein (1-1211)(F970C_G999C) Foldon construct
MFVFLVLLPLVSSQCVNLTTRTQLPPAYTNSFTRGVYYPDKVFRSSVLHSTQDLFLPFFSNVTWFHAIHVSGTNGTKRFDNPVLPFNDGVYFASTEKSNIIRGWIFGTTLDSKTQSLLIVNNATNVVIKVCEFQFCNDPFLGVYYHKNNKSWMESEFRVYSSANNCTFEYVSQPFLMDLEGKQGNFKNLREFVFKNIDGYFKIYSKHTPINLVRDLPQGFSALEPLVDLPIGINITRFQTLLALHRSYLTPGDSSSGWTAGAAAYYVGYLQPRTFLLKYNENGTITDAVDCALDPLSETKCTLKSFTVEKGIYQTSNFRVQPTESIVRFPNITNLCPFGEVFNATRFASVYAWNRKRISNCVADYSVLYNSASFSTFKCYGVSPTKLNDLCFTNVYADSFVIRGDEVRQIAPGQTGKIADYNYKLPDDFTGCVIAWNSNNLDSKVGGNYNYLYRLFRKSNLKPFERDISTEIYQAGSTPCNGVEGFNCYFPLQSYGFQPTNGVGYQPYRVVVLSFELLHAPATVCGPKKSTNLVKNKCVNFNFNGLTGTGVLTESNKKFLPFQQFGRDIADTTDAVRDPQTLEILDITPCSFGGVSVITPGTNTSNQVAVLYQDVNCTEVPVAIHADQLTPTWRVYSTGSNVFQTRAGCLIGAEHVNNSYECDIPIGAGICASYQTQTNSPRRARSVASQSIIAYTMSLGAENSVAYSNNSIAIPTNFTISVTTEILPVSMTKTSVDCTMYICGDSTECSNLLLQYGSFCTQLNRALTGIAVEQDKNTQEVFAQVKQIYKTPPIKDFGGFNFSQILPDPSKPSKRSFIEDLLFNKVTLADAGFIKQYGDCLGDIAARDLICAQKFNGLTVLPPLLTDEMIAQYTSALLAGTITSGWTFGAGAALQIPFAMQMAYRFNGIGVTQNVLYENQKLIANQFNSAIGKIQDSLSFTASALGKLQDVVNQNAQALNTLVKQLSSNCGAISSVLNDILSRLDKVEAEVQIDRLITCRLQSLQTYVTQQLIRAAEIRASANLAATKMSECVLGQSKRVDFCGKGYHLMSFPQSAPHGVVFLHVTYVPAQEKNFTTAPAICHDGKAHFPREGVFVSNGTHWFVTQRNFYEPQIITTDNTFVSGNCDVVIGIVNNTVYDPLQPELDSFKEELDKYFKNHTSPDVDLGDISGINASVVNIQKEIDRLNEVAKNLNESLIDLQELGKYEQYIKGGSGYIPEAPRDGQAYVRKDGEWVLLSTFL

SEQ ID NO: 6391 - protein, 1241 aa, Artificial Sequence; identical to SEQ ID NO: 6371
  SARS-CoV-2/Australia/NSW10/2020__EPI_ISL_413596 spike protein (1-1211)(F970C_G999C) Foldon construct

SEQ ID NO: 6392 - protein, 1241 aa, Artificial Sequence
  SARS-CoV-2/Switzerland/1000477797/2020__EPI_ISL_413023 spike protein (1-1211)(F970C_G999C) Foldon construct
MFVFLVLLPLVSSQCVNLTTRTQLPPAYTNSFTRGVYYPDKVFRSSVLHSTQDLFLPFFSNVTWFHAIHVSGTNGTKRFDNPVLPFNDGVYFASTEKSNIIRGWIFGTTLDSKTQSLLIVNNATNVVIKVCEFQFCNDPFLGVYYHKNNKSWMESEFRVYSSANNCTFEYVSQPFLMDLEGKQGNFKNLREFVFKNIDGYFNIYSKHTPINLVRDLPQGFSALEPLVDLPIGINITRFQTLLALHRSYLTPGDSSSGWTAGAAAYYVGYLQPRTFLLKYNENGTITDAVDCALDPLSETKCTLKSFTVEKGIYQTSNFRVQPTESIVRFPNITNLCPFGEVFNATRFASVYAWNRKRISNCVADYSVLYNSASFSTFKCYGVSPTKLNDLCFTNVYADSFVIRGDEVRQIAPGQTGKIADYNYKLPDDFTGCVIAWNSNNLDSKVGGNYNYLYRLFRKSNLKPFERDISTEIYQAGSTPCNGVEGFNCYFPLQSYGFQPTNGVGYQPYRVVVLSFELLHAPATVCGPKKSTNLVKNKCVNFNFNGLTGTGVLTESNKKFLPFQQFGRDIADTTDAVRDPQTLEILDITPCSFGGVSVITPGTNTSNQVAVLYQGVNCTEVPVAIHADQLTPTWRVYSTGSNVFQTRAGCLIGAEHVNNSYECDIPIGAGICASYQTQTNSPRRARSVASQSIIAYTMSLGAENSVAYSNNSIAIPTNFTISVTTEILPVSMTKTSVDCTMYICGDSTECSNLLLQYGSFCTQLNRALTGIAVEQDKNTQEVFAQVKQIYKTPPIKDFGGFNFSQILPDPSKPSKRSFIEDLLFNKVTLADAGFIKQYGDCLGDIAARDLICAQKFNGLTVLPPLLTDEMIAQYTSALLAGTITSGWTFGAGAALQIPFAMQMAYRFNGIGVTQNVLYENQKLIANQFNSAIGKIQDSLSSTASALGKLQDVVNQNAQALNTLVKQLSSNCGAISSVLNDILSRLDKVEAEVQIDRLITCRLQSLQTYVTQQLIRAAEIRASANLAATKMSECVLGQSKRVDFCGKGYHLMSFPQSAPHGVVFLHVTYVPAQEKNFTTAPAICHDGKAHFPREGVFVSNGTHWFVTQRNFYEPQIITTDNTFVSGNCDVVIGIVNNTVYDPLQPELDSFKEELDKYFKNHTSPDVDLGDISGINASVVNIQKEIDRLNEVAKNLNESLIDLQELGKYEQYIKGGSGYIPEAPRDGQAYVRKDGEWVLLSTFL

SEQ ID NO: 6393 - protein, 1241 aa, Artificial Sequence
  SARS-CoV-2/Belgium/BA-02291/2020__EPI_ISL_415159 spike protein (1-1211)(F970C_G999C) Foldon construct
MFVFLVLLPLVSSQCVNLTTRTQLPPAYTNSFTRGVYYPDKVFRSSVLHSTQDLFLPFFSNVTWFHAIHVSGTNGTKRFDNPVLPFNDGVYFASTEKSNIIRGWIFGTTLDSKTQSLLIVNNATNVVIKVCEFQFCNDPFLGVYYHKNNKSWMESEFRVYSSANNCTFEYVSQPFLMDLEGKQGNFKNLREFVFKNIDGYFKIYSKHTPINLVRDLPQGFSALEPLVDLPIGINITRFQTLLALHRSYLTPGDSSSGWTAGAAAYYVGYLQPRTFLLKYNENGTITDAVDCALDPLSETKCTLKSFTVEKGIYQTSNFRVQPTESIVRFPNITNLCPFGEVFNATRFASVYAWNRKRISNCVADYSVLYNSASFSTFKCYGVSPTKLNDLCFTNVYADSFVIRGDEVRQIAPGQTGKIADYNYKLPDDFTGCVIAWNSNNLDSKVGGNYNYLYRLFRRSNLKPFERDISTEIYQAGSTPCNGVEGFNCYFPLQSYGFQPTNGVGYQPYRVVVLSFELLPAPATVCGPKKSTNLVKNKCVNFNFNGLTGTGVLTESNKKFLPFQQFGRDIADTTDAVRDPQTLEILDITPCSFGGVSVITPGTNTSNQVAVLYQGVNCTEVPVAIHADQLTPTWRVYSTGSNVFQTRAGCLIGAEHVNNSYECDIPIGAGICASYQTQTNSPRRARSVASQSIIAYTMSLGAENSVAYSNNSIAIPTNFTISVTTEILPVSMTKTSVDCTMYICGDSTECSNLLLQYGSFCTQLNRALTGIAVEQDKNTQEVFAQVKQIYKTPPIKDFGGFNFSQILPDPSKPSKRSFIEDLLFNKVTLADAGFIKQYGDCLGDIAARDLICAQKFNGLTVLPPLLTDEMIAQYTSALLAGTITSGWTFGAGAALQIPFAMQMAYRFNGIGVTQNVLYENQKLIANQFNSAIGKIQDSLSSAAPALGKLQDVVNQNAQALNTLVKQLSSNCGAISSVLNDILSRLDKVEAEVQIDRLITCRLQSLQTYVTQQLIRAAEIRASANLAATKMSECVLGQSKRVDFCGKGYHLMSFPQSAPHGVVFLHVTYVPAQEKNFTTAPAICHDGKAHFPREGVFVSNGTHWFVTQRNFYEPQIITTDNTFVSGNCDVVIGIVNNTVYDPLQPELDSFKEELDKYFKNHTSPDVDLGDISGINASVVNIQKEIDRLNEVAKNLNESLIDLQELGKYEQYIKGGSGYIPEAPRDGQAYVRKDGEWVLLSTFL

SEQ ID NO: 6394 - protein, 1241 aa, Artificial Sequence
  SARS-CoV-2/USA/WA8-UW5/2020__EPI_ISL_413486 spike protein (1-1211)(F970C_G999C) Foldon construct
MFVFLVLLPLVSSQCVNLTTRTQLPPAYTNSFTRGVYYPDKVFRSSVLHSTQDLFLPFFSNVTWFHAIHVSGTNGTKRFDNPVLPFNDGVYFASTEKSNIIRGWIFGTTLDSKTQSLLIVNNATNVVIKVCEFQFCNDPFLGVYYHKNNKSWMESEFRVYSSANNCTFEYVSQPFLMDLEGKQGNFKNLREFVFKNIDGYFKIYSKHTPINLVRDLPQGFSALEPLVDLPIGINITRFQTLLALHRSYLTPGDSSSGWTAGAAAYYVGYLQPRTFLLKYNENGTITDAVDCALDPLSETKCTLKSFTVEKGIYQTSNFRVQPTESIVRFPNITNLCPFGEVFNATRFASVYAWNRKRISNCVADYSVLYNSASFSTFKCYGVSPTKLNDLCFTNVYADSFVIRGDEVRQIAPGQTGKIADYNYKLPDDFTGCVIAWNSNNLDSKVGGNYNYLYRLFRKSNLKPFERDISTEIYQAGSTPCNGVEGFNCYFPLQSYGFQPTNGVGYQPYRVVVLSFELLHAPATVCGPKKSTNLVKNKCVNFNFNGLTGTGVLTESNKKFLPFQQFGRDIADTTDAVRDPQTLEILDITPCSFGGVSVITPGTNTSNQVAVLYQDVNCTEVPVAIHADQLTPTWRVYSTGSNVFQTRAGCLIGAEYVNNSYECDIPIGAGICASYQTQTNSPRRARSVASQSIIAYTMSLGAENSVAYSNNSIAIPTNFTISVTTEILPVSMTKTSVDCTMYICGDSTECSNLLLQYGSFCTQLNRALTGIAVEQDKNTQEVFAQVKQIYKTPPIKDFGGFNFSQILPDPSKPSKRSFIEDLLFNKVTLADAGFIKQYGDCLGDIAARDLICAQKFNGLTVLPPLLTDEMIAQYTSALLAGTITSGWTFGAGAALQIPFAMQMAYRFNGIGVTQNVLYENQKLIANQFNSAIGKIQDSLSSTASALGKLQDVVNQNAQALNTLVKQLSSNCGAISSVLNDILSRLDKVEAEVQIDRLITCRLQSLQTYVTQQLIRAAEIRASANLAATKMSECVLGQSKRVDFCGKGYHLMSFPQSAPHGVVFLHVTYVPAQEKNFTTAPAICHDGKAHFPREGVFVSNGTHWFVTQRNFYEPQIITTDNTFVSGNCDVVIGIVNNTVYDPLQPELDSFKEELDKYFKNHTSPDVDLGDISGINASVVNIQKEIDRLNEVAKNLNESLIDLQELGKYEQYIKGGSGYIPEAPRDGQAYVRKDGEWVLLSTFL

SEQ ID NO: 6395 - protein, 1241 aa, Artificial Sequence
  SARS-CoV-2/England/20102000506/2020__EPI_ISL_415147 spike protein (1-1211)(F970C_G999C) Foldon construct
MFVFLVLLPLVSSQCVNLTTRTQLPPAYTNSFTRGVYYPDKVFRSSVLHSTQDLFLPFFSNVTWFHAIHVSGTNGTKRFDNPVLPFNDGVYFASTEKSNIIRGWIFGTTLDSKTQSLLIVNNATNVVIKVCEFQFCNDPFLGVYYHKNNKSWMESEFRVYSSANNCTFEYVSQPFLMDLEGKQGNFKNLREFVFKNIDGYFKIYSKHTPINLVRDLPQGFSALEPLVDLPIGINITRFQTLLALHRSYLTPGDSSSGWTAGAAAYYVGYLQPRTFLLKYNENGTITDAVDCALDPLSETKCTLKSFTVEKGIYQTSNFRVQPTESIVRFPNITNLCPFGEVFNATRFASVYAWNRKRISNCVADYSVLYNSASFSTFKCYGVSPTKLNDLCFTNVYADSFVIRGDEVRQIAPGQTGKIADYNYKLPDDFTGCVIAWNSNNLDSKVGGNYNYLYRLFRKSNLKPFERDISTEIYQAGSTPCNGVEGFNCYFPLQSYGFQPTNGVGYQPYRVVVLSFELLHAPATVCGPKKSTNLVKNKCVNFNFNGLTGTGVLTESNKKFLPFQQFGRDIADTTDAVRDPQTLEILDITPCSFGGVSVITPGTNTSNQVAVLYQGVNCTEVPVAIHADQLTPTWRVYSTGSNVFQTRAGCLIGAEHVNNSYECDIPIGAGICASYQTQTNSPRRARSVASQSIIAYTMSLGAENSVAYSNNSIAIPTNFTISVTTEILPVSMTKTSVDCTMYICGDSTECSNLLLQYGSFCTQLNRALTGIAVEQDKNTQEVFAQVKQIYKTPPIKDFGGFNFSQILPDPSKPSKRSFIEDLLFNKVTLADAGFIKQYGYCLGDIAARDLICAQKFNGLTVLPPLLTDEMIAQYTSALLAGTITSGWTFGAGAALQIPFAMQMAYRFNGIGVTQNVLYENQKLIANQFNSAIGKIQDSLSSTASALGKLQDVVNQNAQALNTLVKQLSSNCGAISSVLNDILSRLDKVEAEVQIDRLITCRLQSLQTYVTQQLIRAAEIRASANLAATKMSECVLGQSKRVDFCGKGYHLMSFPQSAPHGVVFLHVTYVPAQEKNFTTAPAICHDGKAHFPREGVFVSNGTHWFVTQRNFYEPQIITTDNTFVSGNCDVVIGIVNNTVYDPLQPELDSFKEELDKYFKNHTSPDVDLGDISGINASVVNIQKEIDRLNEVAKNLNESLIDLQELGKYEQYIKGGSGYIPEAPRDGQAYVRKDGEWVLLSTFL

SEQ ID NO: 6396 - protein, 1241 aa, Artificial Sequence
  SARS-CoV-2/Belgium/VAG-03013/2020__EPI_ISL_415155 spike protein (1-1211)(F970C_G999C) Foldon construct
MFVFLVLLPLVSSQCVNLTTRTQLPPAYTNSFTRGVYYPDKVFRSSVLHSTQDLFLPFFSNVTWFHAIHVSGTNGTKRFDNPVLPFNDGVYFASTEKSNIIRGWIFGTTLDSKTQSLLIVNNATNVVIKVCEFQFCNDPFLGVYYHKNNKSWMESEFRVYSSANNCTFEYVSQPFLMDLEGKQGNFKNLREFVFKNIDGYFKIYSKHTPINLVRDLPQGFSALEPLVDLPIGINITRFQTLLALHRSYLTPGDSSSGWTAGAAAYYVGYLQPRTFLLKYNENGTITDAVDCALDPLSETKCTLKSFTVEKGIYQTSNFRVQPTESIVRFPNITNLCPFGEVFNATRFASVYAWNRKRISNCVADYSVLYNSASFSTFKCYGVSPTKLNDLCFTNVYADSFVIRGDEVRQIAPGQTGKIADYNYKLPDDFTGCVIAWNSNNLDSKVGGNYNYLYRLFRKSNLKPFERDISTEIYQAGSTPCNGVEGFNCYFPLQSYGFQPTNGVGYQPYRVVVLSFELLHAPATVCGPKKSTNLVKNKCVNFNFNGLTGTGVLTESNKKFLPFQQFGRDIADTTDAVRDPQTLEILDITPCSFGGVSVITPGTNTSNQVAVLYQGVNCTEVPVAIHADQLTPTWRVYSTGSNVFQTRAGCLIGAEHVNNSYECDIPIGAGICASYQTQTNSPRRARSVASQSIIAYTMSLGAENSVAYSNNSIAIPTNFTISVTTEILPVSMTKTSVDCTMYICGDSTECSNLLLQYGSFCTQLNRALTGIAVEQDKNTQEVFAQVKQIYKTPPIKDFGGFNFSQILPDPSKPSKRSFIEDLLFNKVTLADAGFIKQYGDCLGDIAARDLICAQKFNGLTVLPPLLTDEMIAQYTSALLAGTITSGWTFGAGAALQIPFAMQMAYRFNGIGVTQNVLYENQKLIANQFNSAIGKIQDSLSSTATALGKLQDVVNQNAQALNTLVKQLSSNCGAISSVLNDILSRLDKVEAEVQIDRLITCRLQSLQTYVTQQLIRAAEIRASANLAATKMSECVLGQSKRVDFCGKGYHLMSFPQSAPHGVVFLHVTYVPAQEKNFTTAPAICHDGKAHFPREGVFVSNGTHWFVTQRNFYEPQIITTDNTFVSGNCDVVIGIVNNTVYDPLQPELDSFKEELDKYFKNHTSPDVDLGDISGINASVVNIQKEIDRLNEVAKNLNESLIDLQELGKYEQYIKGGSGYIPEAPRDGQAYVRKDGEWVLLSTFL

SEQ ID NO: 6397 - protein, 1241 aa, Artificial Sequence
  SARS-CoV-2/Belgium/BC-03016/2020__EPI_ISL_415157 spike protein (1-1211)(F970C_G999C) Foldon construct
MFVFLVLLPLVSSQCVNLTTRTQLPPAYTNSFTRGVYYPDKVFRSSVLHSTQDLFLPFFSNVTWFHAIHVSGTNGTKRFDNPVLPFNDGVYFASTEKSNIIRGWIFGTTLDSKTQSLLIVNNATNVVIKVCEFQFCNDPFLGVYYHKNNKSWMESEFRVYSSANNCTFEYVSQPFLMDLEGKQGNFKNLREFVFKNIDGYFKIYSKHTPINLVRDLPQGFSALEPLVDLPIGINITRFQTLLALHRSYLTPGDSSSGWTAGAAAYYVGYLQPRTFLLKYNENGTITDAVDCALDPLSETKCTLKSFTVEKGIYQTSNFRVQPTESIVRFPNITNLCPFGEVFNATRFASVYAWNRKRISNCVADYSVLYNSASFSTFKCYGVSPTKLNDLCFTNVYADSFVIRGDEVRQIAPGQTGKIADYNYKLPDDFTGCVIAWNSNNLDSKVGGNYNYLYRLFRKSNLKPFERDISTEIYQAGSTPCNGVEGFNCYFPLQSYGFQPTNGVGYQPYRVVVLSFELLHAPATVCGPKKSTNLVKNKCVNFNFNGLTGTGVLTESNKKFLPFQQFGRDIADTTDAVRDPQTLEILDITPCSFGGVSVITPGTNTSNQVAVLYQGVNCTEVPVAIHADQLTPTWRVYSTGSNVFQTRAGCLIGAEHVNNSYECDIPIGAGICASYQTQTNSPRRARSVASQSIIAYTMSLGAENSVAYSNNSIAIPTNFTISVTTEILPVSMTKTSVDCTMYICGDSTECSNLLLQYGSFCTQLNRALTGIAVEQDKNTQEVFAQVKQIYKTPPIKDFGGFNFSQILPDPSKPSKRSFIEDLLFNKVTLADAGFIKQYGDCLGDIAARDLICAQKFNGLTVLPPLLTDEMIAQYTSALLAGTITSGWTFGAGAALQIPFAMQMAYRFNGIGVTQNVLYENQKLIANQFNSAIGKIQDSLSSTAPALGKLQDVVNQNAQALNTLVKQLSSNCGAISSVLNDILSRLDKVEAEVQIDRLITCRLQSLQTYVTQQLIRAAEIRASANLAATKMSECVLGQSKRVDFCGKGYHLMSFPQSAPHGVVFLHVTYVPAQEKNFTTAPAICHDGKAHFPREGVFVSNGTHWFVTQRNFYEPQIITTDNTFVSGNCDVVIGIVNNTVYDPLQPELDSFKEELDKYFKNHTSPDVDLGDISGINASVVNIQKEIDRLNEVAKNLNESLIDLQELGKYEQYIKGGSGYIPEAPRDGQAYVRKDGEWVLLSTFL

SEQ ID NO: 6398 - protein, 1241 aa, Artificial Sequence
  SARS-CoV-2/Germany/BavPat3/2020__EPI_ISL_414521 spike protein (1-1211)(F970C_G999C) Foldon construct
MFVFLVLLPLVSSQCVNLTTRTQLPPAYTNSFTRGVYYPDKVFRSSVLHSTQDLFLPFFSNVTWFHAIHVSGTNGTKRFDNPVLPFNDGVYFASTEKSNIIRGWIFGTTLDSKTQSLLIVNNATNVVIKVCEFQFCNDPFLGVYYHKNNKSWMESEFRVYSSANNCTFEYVSQPFLMDLEGKQGNFKNLREFVFKNIDGYFKIYSKHTPINLVRDLPQGFSALEPLVDLPIGINITRFQTLLALHRSYLTPGDSSSGWTAGAAAYYVGYLQPRTFLLKYNENGTITDAVDCALDPLSETKCTLKSFTVEKGIYQTSNFRVQPTESIVRFPNITNLCPFGEVFNATRFASVYAWNRKRISNCVADYSVLYNSASFSTFKCYGVSPTKLNDLCFTNVYADSFVIRGDEVRQIAPGQTGKIADYNYKLPDDFTGCVIAWNSNNLDSKVGGNYNYLYRLFRKSNLKPFERDISTEIYQAGSTPCNGVEGFNCYFPLQSYGFQPTNGVGYQPYRVVVLSFELLHAPATVCGPKKSTNLVKNKCVNFNFNGLTGTGVLTESNKKFLPFQQFGRDIADTTDAVRDPQTLEILDITPCSFGGVSVITPGTNTSNQVAVLYQDVNCTEVPVAIHADQLTPTWRVYSTGSNVFQTRAGCLIGAEHVNNSYECDIPIGAGICASYQTQTNSPRRARSVASQSIIAYTMSLGAENSVAYSNNSIAIPTNFTISVTTEILPVSMTKTSVDCTMYICGDSTECSNLLLQYGSFCTQLNRALTGIAVEQDKNTQQVFAQVKQIYKTPPIKDFGGFNFSQILPDPSKPSKRSFIEDLLFNKVTLADAGFIKQYGDCLGDIAARDLICAQKFNGLTVLPPLLTDEMIAQYTSALLAGTITSGWTFGAGAALQIPFAMQMAYRFNGIGVTQNVLYENQKLIANQFNSAIGKIQDSLSSTASALGKLQDVVNQNAQALNTLVKQLSSNCGAISSVLNDILSRLDKVEAEVQIDRLITCRLQSLQTYVTQQLIRAAEIRASANLAATKMSECVLGQSKRVDFCGKGYHLMSFPQSAPHGVVFLHVTYVPAQEKNFTTAPAICHDGKAHFPREGVFVSNGTHWFVTQRNFYEPQIITTDNTFVSGNCDVVIGIVNNTVYDPLQPELDSFKEELDKYFKNHTSPDVDLGDISGINASVVNIQKEIDRLNEVAKNLNESLIDLQELGKYEQYIKGGSGYIPEAPRDGQAYVRKDGEWVLLSTFL

SEQ ID NO: 6399 - protein, 1241 aa, Artificial Sequence
  SARS-CoV-2/France/HF1805/2020__EPI_ISL_414628 spike protein (1-1211)(F970C_G999C) Foldon construct
MFVFLVLLPLVSSQCVNLTTRTQLPPAYTNSFTRGVYYPDKVFRSSVLHSTQDLFLPFFSNVTWFHAIHVSGTNGTKRFDNPVLPFNDGVYFASTEKSNIIRGWIFGTTLDSKTQSLLIVNNATNVVIKVCEFQFCNDPFLGVYYHKNNKSWMESEFRVYSSANNCTFEYVSQPFLMDLEGKQGNFKNLREFVFKNIDGYFKIYSKHTPINLVRDLPQGFSALEPLVDLPIGINITRFQTLLALHRSYLTPGDSSSGWTAGAAAYYVGYLQPRTFLLKYNENGTITDAVDCALDPLSETKCTLKSFTVEKGIYQTSNFRVQPTESIVRFPNITNLCPFGEVFNATRFASVYAWNRKRISNCVADYSVLYNSASFSTFKCYGVSPTKLNDLCFTNVYADSFVIRGDEVRQIAPGQTGKIADYNYKLPDDFTGCVIAWNSNNLDSKVGGNYNYLYRLFRKSNLKPFERDISTEIYQAGSTPCNGVEGFNCYFPLQSYGFQPTNGVGYQPYRVVVLSFELLHAPATVCGPKKSTNLVKNKCVNFNFNGLTGTGVLTESNKKFLPFQQFGRDIADTTDAVRDPQTLEILDITPCSFGGVSVITPGTNTSNQVAVLYQGVNCTEVPVAIHADQLTPTWRVYSTGSNVFQTRAGCLIGAEHVNNSYECDIPIGAGICASYQTQTNSPRRARSVASQSIIAYTMSLGAENSVAYSNNSIAIPTNFTISVTTEILPVSMTKTSVDCTMYICGDSTECSNLLLQYGSFCTQLNRALTGIAVEQDKNTQEVFAQVKQIYKTPPIKDFGGFNFSQILPDPSKPSKRSFIEDLLFNKVTLADAGFIKQYGDCLGDIAARDLICAQKFNGLTVLPPLLTDEMIAQYTSALLAGTITSGWTFGAGAALQIPFAMQMAYRFNGIGVTQNVLYENQKLIANQFNSAIGKIQDSLSSTASALGKLQDVVNQNAQALNTLVKQLSSNCGAISSVLNDILSRLDKVEAEVQIDRLITCRLQSLQTYVTQQLIRAAEIRASANLAATKMSECVLGQSKRVDFCGKGYHLMSFPQSAPHGVVFLHVTYVPAQEKNFTTAPAICHDGKAHFPREGVFVSNGTHWFVTQRNFYEPQIITTDNTFVSGNCDVVIGVVNNTVYDPLQPELDSFKEELDKYFKNHTSPDVDLGDISGINASVVNIQKEIDRLNEVAKNLNESLIDLQELGKYEQYIKGGSGYIPEAPRDGQAYVRKDGEWVLLSTFL

SEQ ID NO: 6400 - protein, 1241 aa, Artificial Sequence
  SARS-CoV-2/Netherlands/ZuidHolland_9/2020__EPI_ISL_414445 spike protein (1-1211)(F970C_G999C) Foldon construct
MFVFLVLLPLVSSQCVNLTTRTQLPPAYTNSFTRGVYYPDKVFRSSVLHSTQDLFLPFFSNVTWFHAIHVSGTNGTKRFDNPVLPFNDGVYFASTEKSNIIRGWIFGTTLDSKTQSLLIVNNATNVVIKVCEFQFCNDPFLGVYYHKNNKSWMESEFRVYSSANNCTFEYVSQPFLMDLEGKQGNFKNLREFVFKNIDGYFKIYSKHTPINLVRDLPQGFSALEPLVDLPIGINITRFQTLLALHRSYLTPGDSSSGWTAGAAAYYVGYLQPRTFLLKYNENGTITDAVDCALDPLSETKCTLKSFTVEKGIYQTSNFRVQPTESIVRFPNITNLCPFGEVFNATRFASVYAWNRKRISNCVADYSVLYNSASFSTFKCYGVSPTKLNDLCFTNVYADSFVIRGDEVRQIAPGQTGKIADYNYKLPDDFTGCVIAWNSNNLDSKVGGNYNYLYRLFRKSNLKPFERDISTEIYQAGSTPCNGVEGFNCYFPLQSYGFQPTNGVGYQPYRVVVLSFELLHAPATVCGPKKSTNLVKNKCVNFNFNGLTGTGVLTESNKKFLPFQQFGRDIADTTDAVRDPQTLEILDITPCSFGGVSVITPGTNTSNQVAVLYQGVNCTEVPVAIHADQLTPTWRVYSTGSNVFQTRAGCLIGAEHVNNSYECDIPIGAGICASYQTQTNSPRRARSVASQSIIAYTMSLGAENSVAYSNNSIAIPTNFTISVTTEILPVSMTKTSVDCTMYICGDSTECSNLLLQYGSFCTQLNRALTGIAVEQDKNTQEVFAQVKQIYKTPPIKDFGGFNFSQILPDPSKPSKRSFIEDLLFNKVTLADAGFIKQYGDCLGDIAARDLICVQKFNGLTVLPPLLTDEMIAQYTSALLAGTITSGWTFGAGAALQIPFAMQMAYRFNGIGVTQNVLYENQKLIANQFNSAIGKIQDSLSSTASALGKLQDVVNQNAQALNTLVKQLSSNCGAISSVLNDILSRLDKVEAEVQIDRLITCRLQSLQTYVTQQLIRAAEIRASANLAATKMSECVLGQSKRVDFCGKGYHLMSFPQSAPHGVVFLHVTYVPAQEKNFTTAPAICHDGKAHFPREGVFVSNGTHWFVTQRNFYEPQIITTDNTFVSGNCDVVIGIVNNTVYDPLQPELDSFKEELDKYFKNHTSPDVDLGDISGINASVVNIQKEIDRLNEVAKNLNESLIDLQELGKYEQYIKGGSGYIPEAPRDGQAYVRKDGEWVLLSTFL

SEQ ID NO: 6401 - protein, 1241 aa, Artificial Sequence
  SARS-CoV-2/Finland/FIN03032020A/2020__EPI_ISL_413602 spike protein (1-1211)(F970C_G999C) Foldon construct
MFVFLVLLPLVSSQCVNLTTRTQLPPAYTNSFTRGVYYPDKVFRSSVLHSTQDLFLPFFSNVTWFHAIHVSGTNGTKRFDNPVLPFNDGVYFASTEKSNIIRGWIFGTTLDSKTQSLLIVNNATNVVIKVCEFQFCNDPFLGVYYHKNNKSWMESEFRVYSSANNCTFEYVSQPFLMDLEGKQGNFKNLREFVFKNIDGYFKIYSKHTPINLVRDLPQGFSALEPLVDLPIGINITRFQTLLALHRSYLTPGDSSSGWTAGAAAYYVGYLQPRTFLLKYNENGTITDAVDCALDPLSETKCTLKSFTVEKGIYQTSNFRVQPTESIVRFPNITNLCPFGEVFNATRFASVYAWNRKRISNCVADYSVLYNSASFSTFKCYGVSPTKLNDLCFTNVYADSFVIRGDEVRQIAPGQTGKIADYNYKLPDDFTGCVISWNSNNLDSKVGGNYNYLYRLFRKSNLKPFERDISTEIYQAGSTPCNGVEGFNCYFPLQSYGFQPTNGVGYQPYRVVVLSFELLHAPATVCGPKKSTNLVKNKCVNFNFNGLTGTGVLTESNKKFLPFQQFGRDIADTTDAVRDPQTLEILDITPCSFGGVSVITPGTNTSNQVAVLYQGVNCTEVPVAIHADQLTPTWRVYSTGSNVFQTRAGCLIGAEHVNNSYECDIPIGAGICASYQTQTNSPRRARSVASQSIIAYTMSLGAENSVAYSNNSIAIPTNFTISVTTEILPVSMTKTSVDCTMYICGDSTECSNLLLQYGSFCTQLNRALTGIAVEQDKNTQEVFAQVKQIYKTPPIKDFGGFNFSQILPDPSKPSKRSFIEDLLFNKVTLADAGFIKQYGDCLGDIAARDLICAQKFNGLTVLPPLLTDEMIAQYTSALLAGTITSGWTFGAGAALQIPFAMQMAYRFNGIGVTQNVLYENQKLIANQFNSAIGKIQDSLSSTASALGKLQDVVNQNAQALNTLVKQLSSNCGAISSVLNDILSRLDKVEAEVQIDRLITCRLQSLQTYVTQQLIRAAEIRASANLAATKMSECVLGQSKRVDFCGKGYHLMSFPQSAPHGVVFLHVTYVPAQEKNFTTAPAICHDGKAHFPREGVFVSNGTHWFVTQRNFYEPQIITTDNTFVSGNCDVVIGIVNNTVYDPLQPELDSFKEELDKYFKNHTSPDVDLGDISGINASVVNIQKEIDRLNEVAKNLNESLIDLQELGKYEQYIKGGSGYIPEAPRDGQAYVRKDGEWVLLSTFL

SEQ ID NO: 6402 - protein, 1241 aa, Artificial Sequence
  SARS-CoV-2/France/GE1977/2020__EPI_ISL_414632 spike protein (1-1211)(F970C_G999C) Foldon construct
MFVFLVLLPLVSSQCVNLTTRTQLPPAYTNSFTRGVYYPDKVFRSSVLHSTQDLFLPFFSNVTWFHAIHVSGTNGTKRFDNPVLPFNDGVYFASTEKSNIIRGWIFGTTLDSKTQSLLIVNNATNVVIKVCEFQFCNDPFLGVYYHKNNKSWMESEFRVYSSANNCTFEYVSQPFLMDLEGKQGNFKNLREFVFKNIDGYFKIYSKHTPINLVRDLPQGFSALEPLVDLPIGINITRFQTLLALHRSYLTPGDSSSGWTAGAAAYYVGYLQPRTFLLKYNENGTITDAVDCALDPLSETKCTLKSFTVEKGIYQTSNFRVQPTESIVRFPNITNLCPFGEVFNATRFASVYAWNRKRISNCVADYSVLYNSASFSTFKCYGVSPTKLNDLCFTNVYADSFVIRGDEVRQIAPGQTGKIADYNYKLPDDFTGCVIAWNSNNLDSKVGGNYNYLYRLFRKSNLKPFERDISTEIYQAGSTPCNGVEGFNCYFPLQSYGFQPTNGVGYQPYRVVVLSFELLHAPATVCGPKKSTNLVKNKCVNFNFNGLTGTGVLTESNKKFLPFQQFGRDIADTTDAVRDPQTLEILDITPCSFGGVSVITPGTNTSNQVAVLYQGVNCTEVPVAIHADQLTPTWRVYSTGSNVFQTRAGCLIGAEHVNNSYECDIPIGAGICASYQTQTNSPRRARSVASQSIIAYTMSLGAENSVAYSNNSIAIPTNFTISVTTEILPVSMTKTSVDCTMYICGDSTECSNLLLQYGSFCTQLNRALTGIAVEQDKNTQEVFAQVKQIYKTPPIKDFGGFNFSQILPDPSKPSKRSFIEDLLFNKVTLADAGFIKQYGDCLGDIAARDLICAQKFNGLTVLPPLLTDEMIAQYTSALLAGTITSGWTFGAGAALQIPFAMQMAYRFNGIGVTQNVLYENQKLIANQFNSAIGKIQDSLFSTASALGKLQDVVNQNAQALNTLVKQLSSNCGAISSVLNDILSRLDKVEAEVQIDRLITCRLQSLQTYVTQQLIRAAEIRASANLAATKMSECVLGQSKRVDFCGKGYHLMSFPQSAPHGVVFLHVTYVPAQEKNFTTAPAICHDGKAHFPREGVFVSNGTHWFVTQRNFYEPQIITTDNTFVSGNCDVVIGIVNNTVYDPLQPELDSFKEELDKYFKNHTSPDVDLGDISGINASVVNIQKEIDRLNEVAKNLNESLIDLQELGKYEQYIKGGSGYIPEAPRDGQAYVRKDGEWVLLSTFL

SEQ ID NO: 6403 - protein, 1241 aa, Artificial Sequence
  SARS-CoV-2/Finland/FIN-313/2020__EPI_ISL_414641 spike protein (1-1211)(F970C_G999C) Foldon construct
MFVFLVLLPLVSSQCVNLTTRTQLPPAYTNSFTRGVYYPDKVFRSSVLHSTQDLFLPFFSNVTWFHAIHVSGTNGTKRFDNPVLPFNDGVYFASTEKSNIIRGWIFGTTLDSKTQSLLIVNNATNVVIKVCEFQFCNDPFLGVYYHKNNKSWMESEFRVYSSANNCTFEYVSQPFLMDLEGKQGNFKNLREFVFKNIDGYFKIYSKHTPINLVRDLPQGFSALEPLVDLPIGINITRFKTLLALHRSYLTPGDSSSGWTAGAAAYYVGYLQPRTFLLKYNENGTITDAVDCALDPLSETKCTLKSFTVEKGIYQTSNFRVQPTESIVRFPNITNLCPFGEVFNATRFASVYAWNRKRISNCVADYSVLYNSASFSTFKCYGVSPTKLNDLCFTNVYADSFVIRGDEVRQIAPGQTGKIADYNYKLPDDFTGCVIAWNSNNLDSKVGGNYNYLYRLFRKSNLKPFERDISTEIYQAGSTPCNGVEGFNCYFPLQSYGFQPTNGVGYQPYRVVVLSFELLHAPATVCGPKKSTNLVKNKCVNFNFNGLTGTGVLTESNKKFLPFQQFGRDIADTTDAVRDPQTLEILDITPCSFGGVSVITPGTNTSNQVAVLYQGVNCTEVPVAIHADQLTPTWRVYSTGSNVFQTRAGCLIGAEHVNNSYECDIPIGAGICASYQTQTNSPRRARSVASQSIIAYTMSLGAENSVAYSNNSIAIPTNFTISVTTEILPVSMTKTSVDCTMYICGDSTECSNLLLQYGSFCTQLNRALTGIAVEQDKNTQEVFAQVKQIYKTPPIKDFGGFNFSQILPDPSKPSKRSFIEDLLFNKVTLADAGFIKQYGDCLGDIAARDLICAQKFNGLTVLPPLLTDEMIAQYTSALLAGTITSGWTFGAGAALQIPFAMQMAYRFNGIGVTQNVLYENQKLIANQFNSAIGKIQDSLSSTASALGKLQDVVNQNAQALNTLVKQLSSNCGAISSVLNDILSRLDKVEAEVQIDRLITCRLQSLQTYVTQQLIRAAEIRASANLAATKMSECVLGQSKRVDFCGKGYHLMSFPQSAPHGVVFLHVTYVPAQEKNFTTAPAICHDGKAHFPREGVFVSNGTHWFVTQRNFYEPQIITTDNTFVSGNCDVVIGIVNNTVYDPLQPELDSFKEELDKYFKNHTSPDVDLGDISGINASVVNIQKEIDRLNEVAKNLNESLIDLQELGKYEQYIKGGSGYIPEAPRDGQAYVRKDGEWVLLSTFL

SEQ ID NO: 6404 - protein, 1241 aa, Artificial Sequence
  SARS-CoV-2/Netherlands/ZuidHolland_2/2020__EPI_ISL_414556 spike protein (1-1211)(F970C_G999C) Foldon construct
MFVFLVLLPLVSSQCVNLTTRTQLPPAYTNSFTRGVYYPDKVFRSSVLHSTQDLFLPFFSNVTWFHAIHVSGTNGTKRFDNPVLPFNDGVYFASTEKSNIIRGWIFGTTLDSKTQSLLIVNNATNVVIKVCEFQFCNDPFLGVYYHKNNKSWMESEFRVYSSANNCTFEYVSQPFLMDLEGKQGNFKNLREFVFKNIDGYFKIYSKHTPINLVRDLPQGFSALEPLVDLPIGINITRFQTLLALHRSYLTPGDSSSGWTAGAAAYYVGYLQPRTFLLKYNENGTITDAVDCALDPLSETKCTLKSFTVEKGIYQTSNFRVQPTESIVRFPNITNLCPFGEVFNATRFASVYAWNRKRISNCVADYSVLYNSASFSTFKCYGVSPTKLNDLCFTNVYADSFVIRGDEVRQIAPGQTGKIADYNYKLPDDFTGCVIAWNSNNLDSKVGGNYNYLYRLFRKSNLKPFERDISTEIYQAGSTPCNGVEGFNCYFPLQSYGFQPTNGVGYQPYRVVVLSFELLHAPATVCGPKKSTNLVKNKCVNFNFNGLTGTGVLTESNKKFLPFQQFGRDIADTTDAVRDPQTLEILDITPCSFGGVSVITPGTNTSNQVAVLYQGVNCTEVPVAIHADQLTPTWRVYSTGSNVFQTRAGCLIGAEHVNNSYECDIPIGAGICASYQTQTNSPRRARSVASQSIIAYTMSLGAENSVAYSNNSIAIPTNFTISVTTEILPVSMTKTSVDCTMYICGDSTECSNLLLQYGSFCTQLNRALTGIALEQDKNTQEVFAQVKQIYKTPPIKDFGGFNFSQILPDPSKPSKRSFIEDLLFNKVTLADAGFIKQYGDCLGDIAARDLICAQKFNGLTVLPPLLTDEMIAQYTSALLAGTITSGWTFGAGAALQIPFAMQMAYRFNGIGVTQNVLYENQKLIANQFNSAIGKIQDSLSSTASALGKLQDVVNQNAQALNTLVKQLSSNCGAISSVLNDILSRLDKVEAEVQIDRLITCRLQSLQTYVTQQLIRAAEIRASANLAATKMSECVLGQSKRVDFCGKGYHLMSFPQSAPHGVVFLHVTYVPAQEKNFTTAPAICHDGKAHFPREGVFVSNGTHWFVTQRNFYEPQIITTDNTFVSGNCDVVIGIVNNTVYDPLQPELDSFKEELDKYFKNHTSPDVDLGDISGINASVVNIQKEIDRLNEVAKNLNESLIDLQELGKYEQYIKGGSGYIPEAPRDGQAYVRKDGEWVLLSTFL

SEQ ID NO: 6405 - protein, 1241 aa, Artificial Sequence
  SARS-CoV-2/USA/WA-UW31/2020__EPI_ISL_414618 spike protein (1-1211)(F970C_G999C) Foldon construct
MFVFLVLLPLVSSQCVNLTTRTQLPPAYTNSFTRGVYYPDKVFRSSVLHSTQDLFLPFFSNVTWFHAIHVSGTNGTKRFDNPVLPFNDGVYFASTEKSNIIRGWIFGTTLDSKTQSLLIVNNATNVVIKVCEFQFCNDPFLGVYYHKNNKSWMESEFRVYSSANNCTFEYVSQPFLMDLEGKQGNFKNLREFVFKNIDGYFKIYSKHTPINLVRDLPQGFSALEPLVDLPIGINITRFQTLLALHRSYLTPGDSSSGWTAGAAAYYVGYLQPRTFLLKYNENGTITDAVDCALDPLSETKCTLKSFTVEKGIYQTSNFRVQPTESIVRFPNITNLCPFGEVFNATRFASVYAWNRKRISNCVADYSVLYNSASFSTFKCYGVSPTKLNDLCFTNVYADSFVIRGDEVRQIAPGQTGKIADYNYKLPDDFTGCVIAWNSNNLDSKVGGNYNYLYRLFRKSNLKPFERDISTEIYQAGSTPCNGAEGFNCYFPLQSYGFQPTNGVGYQPYRVVVLSFELLHAPATVCGPKKSTNLVKNKCVNFNFNGLTGTGVLTESNKKFLPFQQFGRDIADTTDAVRDPQTLEILDITPCSFGGVSVITPGTNTSNQVAVLYQDVNCTEVPVAIHADQLTPTWRVYSTGSNVFQTRAGCLIGAEHVNNSYECDIPIGAGICASYQTQTNSPRRARSVASQSIIAYTMSLGAENSVAYSNNSIAIPTNFTISVTTEILPVSMTKTSVDCTMYICGDSTECSNLLLQYGSFCTQLNRALTGIAVEQDKNTQEVFAQVKQIYKTPPIKDFGGFNFSQILPDPSKPSKRSFIEDLLFNKVTLADAGFIKQYGDCLGDIAARDLICAQKFNGLTVLPPLLTDEMIAQYTSALLAGTITSGWTFGAGAALQIPFAMQMAYRFNGIGVTQNVLYENQKLIANQFNSAIGKIQDSLSSTASALGKLQDVVNQNAQALNTLVKQLSSNCGAISSVLNDILSRLDKVEAEVQIDRLITCRLQSLQTYVTQQLIRAAEIRASANLAATKMSECVLGQSKRVDFCGKGYHLMSFPQSAPHGVVFLHVTYVPAQEKNFTTAPAICHDGKAHFPREGVFVSNGTHWFVTQRNFYEPQIITTDNTFVSGNCDVVIGIVNNTVYDPLQPELDSFKEELDKYFKNHTSPDVDLGDISGINASVVNIQKEIDRLNEVAKNLNESLIDLQELGKYEQYIKGGSGYIPEAPRDGQAYVRKDGEWVLLSTFL

SEQ ID NO: 6406 - protein, 1241 aa, Artificial Sequence
  SARS-CoV-2/South Korea/SNU01/2020__EPI_ISL_411929 spike protein (1-1211)(F970C_G999C) Foldon construct
MFVFLVLLPLVSSQCVNLTTRTQLPPAYTNSFTRGVYYPDKVFRSSVLHSTQDLFLPFFSNVTWFHAIHVSGTNGTKRFDNPVLPFNDGVYFASTEKSNIIRGWIFGTTLDSKTQSLLIVNNATNVVIKVCEFQFCNDPFLGVYYHKNNKSWMESEFRVYSSANNCTFEYVSQPFLMDLEGKQGNFKNLREFVFKNIDGYFKIYSKHTPINLVRDLPQGFWALEPLVDLPIGINITRFQTLLALHRSYLTPGDSSSGWTAGAAAYYVGYLQPRTFLLKYNENGTITDAVDCALDPLSETKCTLKSFTVEKGIYQTSNFRVQPTESIVRFPNITNLCPFGEVFNATRFASVYAWNRKRISNCVADYSVLYNSASFSTFKCYGVSPTKLNDLCFTNVYADSFVIRGDEVRQIAPGQTGKIADYNYKLPDDFTGCVIAWNSNNLDSKVGGNYNYLYRLFRKSNLKPFERDISTEIYQAGSTPCNGVEGFNCYFPLQSYGFQPTNGVGYQPYRVVVLSFELLHAPATVCGPKKSTNLVKNKCVNFNFNGLTGTGVLTESNKKFLPFQQFGRDIADTTDAVRDPQTLEILDITPCSFGGVSVITPGTNTSNQVAVLYQDVNCTEVPVAIHADQLTPTWRVYSTGSNVFQTRAGCLIGAEHVNNSYECDIPIGAGICASYQTQTNSPRRARSVASQSIIAYTMSLGAENSVAYSNNSIAIPTNFTISVTTEILPVSMTKTSVDCTMYICGDSTECSNLLLQYGSFCTQLNRALTGIAVEQDKNTQEVFAQVKQIYKTPPIKDFGGFNFSQILPDPSKPSKRSFIEDLLFNKVTLADAGFIKQYGDCLGDIAARDLICAQKFNGLTVLPPLLTDEMIAQYTSALLAGTITSGWTFGAGAALQIPFAMQMAYRFNGIGVTQNVLYENQKLIANQFNSAIGKIQDSLSSTASALGKLQDVVNQNAQALNTLVKQLSSNCGAISSVLNDILSRLDKVEAEVQIDRLITCRLQSLQTYVTQQLIRAAEIRASANLAATKMSECVLGQSKRVDFCGKGYHLMSFPQSAPHGVVFLHVTYVPAQEKNFTTAPAICHDGKAHFPREGVFVSNGTHWFVTQRNFYEPQIITTDNTFVSGNCDVVIGIVNNTVYDPLQPELDSFKEELDKYFKNHTSPDVDLGDISGINASVVNIQKEIDRLNEVAKNLNESLIDLQELGKYEQYIKGGSGYIPEAPRDGQAYVRKDGEWVLLSTFL

SEQ ID NO: 6407 - protein, 1241 aa, Artificial Sequence
  SARS-CoV-2/China/WF0004/2020__EPI_ISL_413694 spike protein (1-1211)(F970C_G999C) Foldon construct
MFVFLVLLPLVSSQCVNLTTRTQLPPAYTNSFTRGVYYPDKVFRSSVLHSTQDLFLPFFSNVTWFHAIHVSGTNGTKRFDNPVLPFNDGVYFASTEKSNIIRGWIFGTTLDSKTQSLLIVNNATNVVIKVCEFQFCNDPFLGVYYHKNNKSWTESEFRVYSSANNCTFEYVSQPFLMDLEGKQGNFKNLREFVFKNIDGYFKIYSKHTPINLVRDLPQGFSALEPLVDLPIGINITRFQTLLALHRSYLTPGDSSSGWTAGAAAYYVGYLQPRTFLLKYNENGTITDAVDCALDPLSETKCTLKSFTVEKGIYQTSNFRVQPTESIVRFPNITNLCPFGEVFNATRFASVYAWNRKRISNCVADYSVLYNSASFSTFKCYGVSPTKLNDLCFTNVYADSFVIRGDEVRQIAPGQTGKIADYNYKLPDDFTGCVIAWNSNNLDSKVGGNYNYLYRLFRKSNLKPFERDISTEIYQAGSTPCNGVEGFNCYFPLQSYGFQPTNGVGYQPYRVVVLSFELLHAPATVCGPKKSTNLVKNKCVNFNFNGLTGTGVLTESNKKFLPFQQFGRDIADTTDAVRDPQTLEILDITPCSFGGVSVITPGTNTSNQVAVLYQDVNCTEVPVAIHADQLTPTWRVYSTGSNVFQTRAGCLIGAEHVNNSYECDIPIGAGICASYQTQTNSPRRARSVASQSIIAYTMSLGAENSVAYSNNSIAIPTNFTISVTTEILPVSMTKTSVDCTMYICGDSTECSNLLLQYGSFCTQLNRALTGIAVEQDKNTQEVFAQVKQIYKTPPIKDFGGFNFSQILPDPSKPSKRSFIEDLLFNKVTLADAGFIKQYGDCLGDIAARDLICAQKFNGLTVLPPLLTDEMIAQYTSALLAGTITSGWTFGAGAALQIPFAMQMAYRFNGIGVTQNVLYENQKLIANQFNSAIGKIQDSLSSTASALGKLQDVVNQNAQALNTLVKQLSSNCGAISSVLNDILSRLDKVEAEVQIDRLITCRLQSLQTYVTQQLIRAAEIRASANLAATKMSECVLGQSKRFDFCGKGYHLMSFPQSAPHGVVFLHVTYVPAQEKNFTTAPAICHDGKAHFPREGVFVSNGTHWFVTQRNFYEPQIITTDNTFVSGNCDVVIGIVNNTVYDPLQPELDSFKEELDKYFKNHTSPDVDLGDISGINASVVNIQKEIDRLNEVAKNLNESLIDLQELGKYEQYIKGGSGYIPEAPRDGQAYVRKDGEWVLLSTFL

SEQ ID NO: 6408 - protein, 1241 aa, Artificial Sequence
  SARS-CoV-2/China/WF0028/2020__EPI_ISL_413791 spike protein (1-1211)(F970C_G999C) Foldon construct
MFVFLVLLPLVSSQCVNLTTRTQLPPAYTNSFTRGVYYPDKVFRSSVLHSTQDLFLPFFSNVTWFHAIHVSGTNGTKRFDNPVLPFNDGVYFASTEKSNIIRGWIFGTTLDSKTQSLLIVNNATNVVIKVCEFQFCNDPFLGVYYHKNNKSWMESEFRVYSSANNCTFEYVSQPFLMDLEGKQGNFKNLREFVFKNIDGYFKIYSKHTPINLVRDLPQGFSALEPLVDLPIGINITRFQTLLALHRSYLTPGDSSSGWTAGAAAYYVGYLQPRTFLLKYNENGTITDAVDCALDPLSETKCTLKSFTVEKGIYQTSNFRVQPTESIVRFPNITNLCPFGEVFNATRFASVYAWNRKRISNCVADYSVLYNSASFSTFKCYGVSPTKLNDLCFTNVYADSFVIRGDEVRQIAPGQTGKIADYNYKLPDDFTGCVIAWNSNNLDSKVGGNYNYLYRLFRKSNLKPFERDISTEIYQAGSTPCNGVEGFNCYFPLQSYGFQPTNGVGYQPYRVVVLSFELLHAPATVCGPKKSTNLVKNKCVNFNFNGLTGTGVLTESNKKFLPFQQFGRDIADTTDAVRDPQTLEILDITPCSFGGVSVITPGTNTSNQVAVLYQDVNCTEVPVAIHADQLTPTWRVYSTGSNVFQTRAGCLIGAEHVNNSYECDIPIGAGICASYQTQTNSPRRARSVASQSIIAYTMSLGAENSVAYSNNSIAIPTNFTISVTTEILPVSMTKTSVDCTMYICGDSTECSNLLLQYGSFCTQLNRALTGIAVEQDKNTQEVFAQVKQIYKTPPIKDFGGFNFSQILPDPSKPSKRSFIEDLLFNKVTLADAGFIKQYGDCLGDIAARDLICAQKFNGLTVLPPLLTDEMIAQYTSALLAGTITSGWTFGAGAALQIPFAMQMAYRFNGIGVTQNVLYENQKLIANQFNSAIGKIQDSLSSTASALGKLQDVVNQNAQALNTLVKQLSSNCGAISSVLNDILSRLDKVEAEVQIDRLITCRLQSLQTYVTQQLIRAAEIRASANLAATKMSECVLGQSKRVDFCGKGYHLMSFPQSAPHGVVFLHVTYVPAQEKNFTTAPAICHDGKAHFPREGVFVSNGTHWFVTQRNFYEPQIITTDNTFVSGNCDVVIGIVNNTVYDPLQPELESFKEELDKYFKNHTSPDVDLGDISGINASVVNIQKEIDRLNEVAKNLNESLIDLQELGKYEQYIKGGSGYIPEAPRDGQAYVRKDGEWVLLSTFL

SEQ ID NO: 6409 - protein, 1241 aa, Artificial Sequence
  SARS-CoV-2/2019-nCoV/USA-CruiseA-18/2020__MT159716.1 spike protein (1-1211)(F970C_G999C) Foldon construct
MFVFLVLLPLVSSQCVNLTTRTQLPPAYTNSFTRGVYYPDKVFRSSVLHSTQDLFLPFFSNVTWFHAIHVSGTNGTKRFDNPVLPFNDGVYFASTEKSNIIRGWIFGTTLDSKTQSLLIVNNATNVVIKVCEFQFCNDPFLGVYYHKNNKSWMESELRVYSSANNCTFEYVSQPFLMDLEGKQGNFKNLREFVFKNIDGYFKIYSKHTPINLVRDLPQGFSALEPLVDLPIGINITRFQTLLALHRSYLTPGDSSSGWTAGAAAYYVGYLQPRTFLLKYNENGTITDAVDCALDPLSETKCTLKSFTVEKGIYQTSNFRVQPTESIVRFPNITNLCPFGEVFNATRFASVYAWNRKRISNCVADYSVLYNSASFSTFKCYGVSPTKLNDLCFTNVYADSFVIRGDEVRQIAPGQTGKIADYNYKLPDDFTGCVIAWNSNNLDSKVGGNYNYLYRLFRKSNLKPFERDISTEIYQAGSTPCNGVEGFNCYFPLQSYGFQPTNGVGYQPYRVVVLSFELLHAPATVCGPKKSTNLVKNKCVNFNFNGLTGTGVLTESNKKFLPFQQFGRDIADTTDAVRDPQTLEILDITPCSFGGVSVITPGTNTSNQVAVLYQDVNCTEVPVAIHADQLTPTWRVYSTGSNVFQTRAGCLIGAEHVNNSYECDIPIGAGICASYQTQTNSPRRARSVASQSIIAYTMSLGAENSVAYSNNSIAIPTNFTISVTTEILPVSMTKTSVDCTMYICGDSTECSNLLLQYGSFCTQLNRALTGIAVEQDKNTQEVFAQVKQIYKTPPIKDFGGFNFSQILPDPSKPSKRSFIEDLLFNKVTLADAGFIKQYGDCLGDIAARDLICAQKFNGLTVLPPLLTDEMIAQYTSALLAGTITSGWTFGAGAALQIPFAMQMAYRFNGIGVTQNVLYENQKLIANQFNSAIGKIQDSLSSTASALGKLQDVVNQNAQALNTLVKQLSSNCGAISSVLNDILSRLDKVEAEVQIDRLITCRLQSLQTYVTQQLIRAAEIRASANLAATKMSECVLGQSKRVDFCGKGYHLMSFPQSAPHGVVFLHVTYVPAQEKNFTTAPAICHDGKAHFPREGVFVSNGTHWFVTQRNFYEPQIITTDNTFVSGNCDVVIGIVNNTVYDPLQPELDSFKEELDKYFKNHTSPDVDLGDISGINASVVNIQKEIDRLNEVAKNLNESLIDLQELGKYEQYIKGGSGYIPEAPRDGQAYVRKDGEWVLLSTFL

SEQ ID NO: 6410 - protein, 1241 aa, Artificial Sequence
  SARS-CoV-2/SARS-CoV-2/Yunnan-01/human/2020/CHN__MT049951.1 spike protein (1-1211)(F970C_G999C) Foldon construct
MFVFLVLLPLVSSQCVNLTTRTQLPPANTNSFTRGVYYPDKVFRSSVLHSTQDLFLPFFSNVTWFHAIHVSGTNGTKRFDNPVLPFNDGVYFASTEKSNIIRGWIFGTTLDSKTQSLLIVNNATNVVIKVCEFQFCNDPFLGVYYHKNNKSWMESEFRVYSSANNCTFEYVSQPFLMDLEGKQGNFKNLREFVFKNIDGYFKIYSKHTPINLVRDLPQGFSALEPLVDLPIGINITRFQTLLALHRSYLTPGDSSSGWTAGAAAYYVGYLQPRTFLLKYNENGTITDAVDCALDPLSETKCTLKSFTVEKGIYQTSNFRVQPTESIVRFPNITNLCPFGEVFNATRFASVYAWNRKRISNCVADYSVLYNSASFSTFKCYGVSPTKLNDLCFTNVYADSFVIRGDEVRQIAPGQTGKIADYNYKLPDDFTGCVIAWNSNNLDSKVGGNYNYLYRLFRKSNLKPFERDISTEIYQAGSTPCNGVEGFNCYFPLQSYGFQPTNGVGYQPYRVVVLSFELLHAPATVCGPKKSTNLVKNKCVNFNFNGLTGTGVLTESNKKFLPFQQFGRDIADTTDAVRDPQTLEILDITPCSFGGVSVITPGTNTSNQVAVLYQDVNCTEVPVAIHADQLTPTWRVYSTGSNVFQTRAGCLIGAEHVNNSYECDIPIGAGICASYQTQTNSPRRARSVASQSIIAYTMSLGAENSVAYSNNSIAIPTNFTISVTTEILPVSMTKTSVDCTMYICGDSTECSNLLLQYGSFCTQLNRALTGIAVEQDKNTQEVFAQVKQIYKTPPIKDFGGFNFSQILPDPSKPSKRSFIEDLLFNKVTLADAGFIKQYGDCLGDIAARDLICAQKFNGLTVLPPLLTDEMIAQYTSALLAGTITSGWTFGAGAALQIPFAMQMAYRFNGIGVTQNVLYENQKLIANQFNSAIGKIQDSLSSTASALGKLQDVVNQNAQALNTLVKQLSSNCGAISSVLNDILSRLDKVEAEVQIDRLITCRLQSLQTYVTQQLIRAAEIRASANLAATKMSECVLGQSKRVDFCGKGYHLMSFPQSAPHGVVFLHVTYVPAQEKNFTTAPAICHDGKAHFPREGVFVSNGTHWFVTQRNFYEPQIITTDNTFVSGNCDVVIGIVNNTVYDPLQPELDSFKEELDKYFKNHTSPDVDLGDISGINASVVNIQKEIDRLNEVAKNLNESLIDLQELGKYEQYIKGGSGYIPEAPRDGQAYVRKDGEWVLLSTFL

SEQ ID NO: 6411 - protein, 1241 aa, Artificial Sequence
  SARS-CoV-2/USA/WA-UW292/2020__EPI_ISL_418077 spike protein (1-1211)(F970C_G999C) Foldon construct
MFVFLVLLPLVSSQCVNLTTRTQLPPAYTNSFTRGVYYPDKVFRSSVLHSTQDLFLPFFSNVTWFHAIHVSGTNGTKRFDNPVLPFNDGVYFASTEKSNIIRGWIFGTTLDSKTQSLLIVNNATNVVIKVCEFQFCNDPFLGVYYHKNNKSWMESEFRVYSSANNCTFEYVSQPFLMDLEGKQGNFKNLREFVFKNIDGYFKIYSKHTPINLVRDLPQGFSALEPLVDLPIGINITRFQTLLALHRSYLTPGDSSSGWTAGAAAYYVGYLQPRTFLLKYNENGTITDAVDCALDPLSETKCTLKSFTVEKGIYQTSNFRVQPTESIVRFPNITNLCPFGEVFNATRFASVYAWNRKRISNCVADYSVLYNSASFSTFKCYGVSPTKLNDLCFTNVYADSFVIRGDEVRQIAPGQTGKIADYNYKLPDDFTGCVIAWNSNNLDSKVGGNYNYLYRLFRKSNLKPFERDISTEIYQASSTPCNGVEGFNCYFPLQSYGFQPTNGVGYQPYRVVVLSFELLHAPATVCGPKKSTNLVKNKCVNFNFNGLTGTGVLTESNKKFLPFQQFGRDIADTTDAVRDPQTLEILDITPCSFGGVSVITPGTNTSNQVAVLYQDVNCTEVPVAIHADQLTPTWRVYSTGSNVFQTRAGCLIGAEHVNNSYECDIPIGAGICASYQTQTNSPRRARSVASQSIIAYTMSLGAENSVAYSNNSIAIPTNFTISVTTEILPVSMTKTSVDCTMYICGDSTECSNLLLQYGSFCTQLNRALTGIAVEQDKNTQEVFAQVKQIYKTPPIKDFGGFNFSQILPDPSKPSKRSFIEDLLFNKVTLADAGFIKQYGDCLGDIAARDLICAQKFNGLTVLPPLLTDEMIAQYTSALLAGTITSGWTFGAGAALQIPFAMQMAYRFNGIGVTQNVLYENQKLIANQFNSAIGKIQDSLSSTASALGKLQDVVNQNAQALNTLVKQLSSNCGAISSVLNDILSRLDKVEAEVQIDRLITCRLQSLQTYVTQQLIRAAEIRASANLAATKMSECVLGQSKRVDFCGKGYHLMSFPQSAPHGVVFLHVTYVPAQEKNFTTAPAICHDGKAHFPREGVFVSNGTHWFVTQRNFYEPQIITTDNTFVSGNCDVVIGIVNNTVYDPLQPELDSFKEELDKYFKNHTSPDVDLGDISGINASVVNIQKEIDRLNEVAKNLNESLIDLQELGKYEQYIKGGSGYIPEAPRDGQAYVRKDGEWVLLSTFL

SEQ ID NO: 6412 - protein, 1241 aa, Artificial Sequence
  SARS-CoV-2/Iceland/192/2020__EPI_ISL_417819 spike protein (1-1211)(F970C_G999C) Foldon construct
MFVFFVLLPLVSSQCVNLTTRTQLPPAYTNSFTRGVYYPDKVFRSSVLHSTQDLFLPFFSNVTWFHAIHVSGTNGTKRFDNPVLPFNDGVYFASTEKSNIIRGWIFGTTLDSKTQSLLIVNNATNVVIKVCEFQFCNDPFLGVYYHKNNKSWMESEFRVYSSANNCTFEYVSQPFLMDLEGKQGNFKNLREFVFKNIDGYFKIYSKHTPINLVRDLPQGFSALEPLVDLPIGINITRFQTLLALHRSYLTPGDSSSGWTAGAAAYYVGYLQPRTFLLKYNENGTITDAVDCALDPLSETKCTLKSFTVEKGIYQTSNFRVQPTESIVRFPNITNLCPFGEVFNATRFASVYAWNRKRISNCVADYSVLYNSASFSTFKCYGVSPTKLNDLCFTNVYADSFVIRGDEVRQIAPGQTGKIADYNYKLPDDFTGCVIAWNSNNLDSKVGGNYNYLYRLFRKSNLKPFERDISTEIYQAGSTPCNGVEGFNCYFPLQSYGFQPTNGVGYQPYRVVVLSFELLHAPATVCGPKKSTNLVKNKCVNFNFNGLTGTGVLTESNKKFLPFQQFGRDIADTTDAVRDPQTLEILDITPCSFGGVSVITPGTNTSNQVAVLYQGVNCTEVPVAIHADQLTPTWRVYSTGSNVFQTRAGCLIGAEHVNNSYECDIPIGAGICASYQTQTNSPRRARSVASQSIIAYTMSLGAENSVAYSNNSIAIPTNFTISVTTEILPVSMTKTSVDCTMYICGDSTECSNLLLQYGSFCTQLNRALTGIAVEQDKNTQEVFAQVKQIYKTPPIKDFGGFNFSQILPDPSKPSKRSFIEDLLFNKVTLADAGFIKQYGDCLGDIAARDLICAQKFNGLTVLPPLLTDEMIAQYTSALLAGTITSGWTFGAGAALQIPFAMQMAYRFNGIGVTQNVLYENQKLIANQFNSAIGKIQDSLSSTASALGKLQDVVNQNAQALNTLVKQLSSNCGAISSVLNDILSRLDKVEAEVQIDRLITCRLQSLQTYVTQQLIRAAEIRASANLAATKMSECVLGQSKRVDFCGKGYHLMSFPQSAPHGVVFLHVTYVPAQEKNFTTAPAICHDGKAHFPREGVFVSNGTHWFVTQRNFYEPQIITTDNTFVSGNCDVVIGIVNNTVYDPLQPELDSFKEELDKYFKNHTSPDVDLGDISGINASVVNIQKEIDRLNEVAKNLNESLIDLQELGKYEQYIKGGSGYIPEAPRDGQAYVRKDGEWVLLSTFL

SEQ ID NO: 6413 - protein, 1241 aa, Artificial Sequence
  SARS-CoV-2/Belgium/ULG-6939/2020__EPI_ISL_417020 spike protein (1-1211)(F970C_G999C) Foldon construct
MFVFLVLLPLVSSQCVNLTTRTQLPPAYTNSFTRGVYYPDKVFRSSVLHSTQDLFLPFFSNVTWFHAIHVSGTNGTKRFDNPVLPFNDGVYFASTEKSNIIRGWIFGTTLDSKTQSLLIVNNATNVVIKVCEFQFCNDPFLGVYYHKNNKSWMESEFRVYSSANNCTFEYVSQPFLMDLEGKQGNFKNLREFVFKNIDGYFKIYSKHTPINLVRDLPQGFSALEPLVDLPIGINITRFQTLLALHRSYLTPGDSSSGWTAGAAAYYVGYLQPRTFLLKYNENGTITDAVDCALDPLSETKCTLKSFTVEKGIYQTSNFRVQPTESIVRFPNITNLCPFGEVFNATRFASVYAWNRKRISNCVADYSVLYNSASFSTFKCYGVSPTKLNDLCFTNVYADSFVIRGDEVRQIAPGQTGKIADYNYKLPDDFTGCVIAWNSNNLDSKVGGNYNYLYRLFRKSNLKPFERDISTEIYQAGSTPCNGVEGFNCYFPLQSYGFQPTNGVGYQPYRVVVLSFELLHAPATVCGPKKSTNLVKNKCVNFNFNGLTGTGVLTESNKKFLPFQQFGRDIADTTDAVRDPQTLEILDITPCSFGGVSVITPGTNTSNQVAVLYQGVNCTEVPVAIHADQLTPTWRVYSTGSNVFQTRAGCLIGAEHVNNSYECDIPIGAGICASYQTQTNSPRRARSVASQSIIAYTMSLGAENSVVYSNNSIAIPTNFTISVTTEILPVSMTKTSVDCTMYICGDSTECSNLLLQYGSFCTQLNRALTGIAVEQDKNTQEVFAQVKQIYKTPPIKDFGGFNFSQILPDPSKPSKRSFIEDLLFNKVTLADAGFIKQYGDCLGDIAARDLICAQKFNGLTVLPPLLTDEMIAQYTSALLAGTITSGWTFGAGAALQIPFAMQMAYRFNGIGVTQNVLYENQKLIANQFNSAIGKIQDSLSSTASALGKLQDVVNQNAQALNTLVKQLSSNCGAISSVLNDILSRLDKVEAEVQIDRLITCRLQSLQTYVTQQLIRAAEIRASANLAATKMSECVLGQSKRVDFCGKGYHLMSFPQSAPHGVVFLHVTYVPAQEKNFTTAPAICHDGKAHFPREGVFVSNGTHWFVTQRNFYEPQIITTDNTFVSGNCDVVIGIVNNTVYDPLQPELDSFKEELDKYFKNHTSPDVDLGDISGINASVVNIQKEIDRLNEVAKNLNESLIDLQELGKYEQYIKGGSGYIPEAPRDGQAYVRKDGEWVLLSTFL

SEQ ID NO: 6414 - protein, 1241 aa, Artificial Sequence
  SARS-CoV-2/France/HF2496/2020__EPI_ISL_418231 spike protein (1-1211)(F970C_G999C) Foldon construct
MFVFLVLLPLVSSQCVNLTTRTQLPPAYTNSFTRGVYYPDKVFRSSVLHSTQDLFLPFFSNVTWFHAIHVSGTNGTKRFDNPVLPFNDGVYFASTEKSNIIRGWIFGTTLDSKTQSLLIVNNATNVVIKVCEFQFCNDPFLGVYYHKNNKSWMESEFRVYSSANNCTFEYVSQPFLMDLEGKQGNFKNLREFVFKNIDGYFKIYSKHTPINLVRDLPQGFSALEPLVDLPIGINITRFQTLLALHRSYLTPGDSSSGWTAGAAAYYVGYLQPRTFLLKYNENGTITDAVDCALDPLSETKCTLKSFTVEKGIYQTSNFRVQPTESIVRFPNITNLCPFGEVFNATRFASVYAWNRKRISNCVADYSVLYNSASFSTFKCYGVSPTKLNDLCFTNVYADSFVIRGDEVRQIAPGQTGKIADYNYKLPDDFTGCVIAWNSNNLDSKVGGNYNYLYRLFRKSNLKPFERDISTEIYQAGSTPCNGVEGFNCYFPLQSYGFQPTNGVGYQPYRVVVLSFELLHAPATVCGPKKSTNLVKNKCVNFNFNGLTGTGVLTESNKKFLPFQQFGRDIADTTDAVRDPQTLEILDITPCSFGGVSVITPGTNTSNQVAVLYQGVNCTEVPVAIHADQLTPTWRVYSTGSNVFQTRAGCLIGAEHVNNSYECDIPIGAGICASYQTQTNSPRRARSVASQSIIAYTMSLGAENSVAYSNNSIAIPTNFTISVTTEILPVSMTKTSVDCTMYICGDSTECSNLLLQYGSFCTQLNRALTGIAVEQDKNTQEVFAQVKQIYKTPPIKDFGGFNFSQILPDPSKPSKRSFIEDLLFNKVTLADAGFIKQYGDCLGDIVARDLICAQKFNGLTVLPPLLTDEMIAQYTSALLAGTITSGWTFGAGAALQIPFAMQMAYRFNGIGVTQNVLYENQKLIANQFNSAIGKIQDSLSSTASALGKLQDVVNQNAQALNTLVKQLSSNCGAISSVLNDILSRLDKVEAEVQIDRLITCRLQSLQTYVTQQLIRAAEIRASANLAATKMSECVLGQSKRVDFCGKGYHLMSFPQSAPHGVVFLHVTYVPAQEKNFTTAPAICHDGKAHFPREGVFVSNGTHWFVTQRNFYEPQIITTDNTFVSGNCDVVIGIVNNTVYDPLQPELDSFKEELDKYFKNHTSPDVDLGDISGINASVVNIQKEIDRLNEVAKNLNESLIDLQELGKYEQYIKGGSGYIPEAPRDGQAYVRKDGEWVLLSTFL

SEQ ID NO: 6415 - protein, 1241 aa, Artificial Sequence
  SARS-CoV-2/USA/WA-UW291/2020__EPI_ISL_418076 spike protein (1-1211)(F970C_G999C) Foldon construct
MFVFLVLLPLVSSQCVNLTTRTQLPPAYTNSFTRGVYYPDKVFRSSVLHSTQDLFLPFFSNVTWFHAIHVSGTNGTKRFDNPVLPFNDGVYFASTEKSNIIRGWIFGTTLDSKTQSLLIVNNATNVVIKVCEFQFCNDPFLGVYYHKNNKSWMESEFRVYSSANNCTFEYVSQPFLMDLEGKQGNFKNLREFVFKNIDGYFKIYSKHTPINLVRDLPQGFSALEPLVDLPIGINITRFQTLLALHRSYLTPGDSSSGWTAGAAAYYVGYLQPRTFLLKYNENGTITDAVDCALDPLSETKCTLKSFTVEKGIYQTSNFRVQPTESIVRFPNITNLCPFGEVFNATRFASVYAWNRKRISNCVADYSVLYNSASFSTFKCYGVSPTKLNDLCFTNVYADSFVIRGDEVRQIAPGQTGKIADYNYKLPDDFTGCVIAWNSNNLDSKVGGNYNYLYRLFRKSNLKPFERDISTEIYQAGSTPCNGVEGFNCYFPLQSYGFQPTNGVGYQPYRVVVLSFELLHAPATVCGPKKSTNLVKNKCVNFNFNGLTGTGVLTESNKKFLPFQQFGRDIADTTDAVRDPQTLEILDITPCSFGGVSVITPGTNTSNQVAVLYQGVNCTEVPVAIHADQLTPTWRVYSTGSNVFQTRAGCLIGAEHVNNSYECDIPIGAGICASYQTQTNSPRRARSVASQSIIAYTMSLGAENSVAYSNNSIAIPTNFTISVTTEILPVSMTKTSVDCTMYICGDSTECSNLLLQYGSFCTQLNRALTGIAVEQDKNTQEVFAQVKQIYKTPPIKDFGGFNFSQILPDPSKPSKRSFIEDLLFNKVTLADAGFIKQYGDCLGDIAARDLICAQKFNGLTVLPPLLTDEMIAQYTSALLAGTITSGWTFGAGAALQIPFAMQMAYRFNGIGVTQNVLYENQKLIANQFNSAIGKIQYSLSSTASALGKLQDVVNQNAQALNTLVKQLSSNCGAISSVLNDILSRLDKVEAEVQIDRLITCRLQSLQTYVTQQLIRAAEIRASANLAATKMSECVLGQSKRVDFCGKGYHLMSFPQSAPHGVVFLHVTYVPAQEKNFTTAPAICHDGKAHFPREGVFVSNGTHWFVTQRNFYEPQIITTDNTFVSGNCDVVIGIVNNTVYDPLQPELDSFKEELDKYFKNHTSPDVDLGDISGINASVVNIQKEIDRLNEVAKNLNESLIDLQELGKYEQYIKGGSGYIPEAPRDGQAYVRKDGEWVLLSTFL

SEQ ID NO: 6416 - protein, 1241 aa, Artificial Sequence; identical to SEQ ID NO: 6379
  SARS-CoV-2/Portugal/PT0034/2020__EPI_ISL_418019 spike protein (1-1211)(F970C_G999C) Foldon construct

SEQ ID NO: 6417 - protein, 1241 aa, Artificial Sequence
  SARS-CoV-2/Iceland/202/2020__EPI_ISL_417750 spike protein (1-1211)(F970C_G999C) Foldon construct
MFVFLVLLPLVSSQCVNLTTRTQLPPAYTNSFTRGVYYPDKVFRSSVLHSTQDLFLPFFSNVTWFHAIHVSGTNGTKRFDNPVLPFNDGVYFASTEKSNIIRGWIFGTTLDSKTQSLLIVNNATNVVIKVCEFQFCNDPFLGVYYHKNNKSWMESEFRVYSSANNCTFEYVSQPFLMDLEGKQGNFKNLREFVFKNIDGYFKIYSKHTPINLVRDLPQGFSALEPLVDLPIGINITRFQTLLALHRSYLTPGDSSSGWTAGAAAYYVGYLQPRTFLLKYNENGTITDAVDCALDPLSETKCTLKSFTVEKGIYQTSNFRVQPTESIVRFPNITNLCPFGEVFNATRFASVYAWNRKRISNCVADYSVLYNSASFSTFKCYGVSPTKLNDLCFTNVYADSFVIRGDEVRQIAPGQTGKIADYNYKLPDDFTGCVIAWNSNNLDSKVGGNYNYLYRLFRKSNLKPFERDISTEIYQAGSTPCNGVEGFNCYFPLQSYGFQPTNGVGYQPYRVVVLSFELLHAPATVCGPKKSTNLVKNKCVNFNFNGLTGTGVLTESNKKFLPFQQFGRDIADTTDAVRDPQTLEILDITPCSFGGVSVITPGTNTSNQVAVLYQDVNCTEVPVAIHADQLTPTWRVYSTGSNVFQTRAGCLIGAEHVNNSYECDIPIGAGICASYQTQTNSPRRARSVASQSIIAYTMSLGAENSVAYSNNSIAIPTNFTISVTTEILPVSMTKTSVDCTMYICGDSTECSNLLLQYGSFCTQLNRALTGIAVEQDKNTQEVFAQVKQIYKTPPIKDFGGFNFSQILPDPSKPSKRSFIEDLLFNKVTLADAGFIKQYGDCLGDIAARDLICAQKFNGLTVLPPLLTDEMIAQYTSALLAGTITSGWTFGAGAALQIPFAMQMAYRFNGIGVTQNVLYENQKLIANQFNSAIGKIQDSLSSTASALGKLQDVVNQNAQALNTLVKQLSSNCGAISSVLNDILSRLDKVEAEVQIDRLITCRLQSLQTYVTQQLIRAAEIRASANLAATKMSECVLGQSKRVDFCGKGYHLMSFPQSAPHGVVFLHVTYVPAQEKNFTTAPAICHDGKAHFPREGVFVSNGTHWFVTQRNFYEPQIITTDNTFVSGNCDVVIGIVNNTVYDPLQPELDSFKEELDKYFKNHTSPDVDLGDIPGINASVVNIQKEIDRLNEVAKNLNESLIDLQELGKYEQYIKGGSGYIPEAPRDGQAYVRKDGEWVLLSTFL

SEQ ID NO: 6418 - protein, 1241 aa, Artificial Sequence
  SARS-CoV-2/USA/WA-UW261/2020__EPI_ISL_418046 spike protein (1-1211)(F970C_G999C) Foldon construct
MFVFLVLLPLVSSQCVNLTTRTQLPPAYTNSFTRGVYYPDKVFRSSVLHSTQDLFLPFFSNVTWFHAIHVSGTNGTKRFDNPVLPFNDGVYFASTEKSNIIRGWIFGTTLDSKTQSLLIVNNATNVVIKVCEFQFCNDPFLGVYYHKNNKSWMESEFRVYSSANNCTFEYVSQPFLMDLEGKQGNFKNLREFVFKNIDGYFKIYSKHTPINLVRDLPQGFSALEPLVDLPIGINITRFQTLLALHRSYLTPGDSSSGWTAGAAAYYVGYLQPRTFLLKYNENGTITDAVDCALDPLSETKCTLKSFTVEKGIYQTSNFRVQPTESIVRFPNITNLCPFGEVFNATRFTSVYAWNRKRISNCVADYSVLYNSASFSTFKCYGVSPTKLNDLCFTNVYADSFVIRGDEVRQIAPGQTGKIADYNYKLPDDFTGCVIAWNSNNLDSKVGGNYNYLYRLFRKSNLKPFERDISTEIYQAGSTPCNGVEGFNCYFPLQSYGFQPTNGVGYQPYRVVVLSFELLHAPATVCGPKKSTNLVKNKCVNFNFNGLTGTGVLTESNKKFLPFQQFGRDIADTTDAVRDPQTLEILDITPCSFGGVSVITPGTNTSNQVAVLYQDVNCTEVPVAIHADQLTPTWRVYSTGSNVFQTRAGCLIGAEHVNNSYECDIPIGAGICASYQTQTNSPRRARSVASQSIIAYTMSLGAENSVAYSNNSIAIPTNFTISVTTEILPVSMTKTSVDCTMYICGDSTECSNLLLQYGSFCTQLNRALTGIAVEQDKNTQEVFAQVKQIYKTPPIKDFGGFNFSQILPDPSKPSKRSFIEDLLFNKVTLADAGFIKQYGDCLGDIAARDLICAQKFNGLTVLPPLLTDEMIAQYTSALLAGTITSGWTFGAGAALQIPFAMQMAYRFNGIGVTQNVLYENQKLIANQFNSAIGKIQDSLSSTASALGKLQDVVNQNAQALNTLVKQLSSNCGAISSVLNDILSRLDKVEAEVQIDRLITCRLQSLQTYVTQQLIRAAEIRASANLAATKMSECVLGQSKRVDFCGKGYHLMSFPQSAPHGVVFLHVTYVPAQEKNFTTAPAICHDGKAHFPREGVFVSNGTHWFVTQRNFYEPQIITTDNTFVSGNCDVVIGIVNNTVYDPLQPELDSFKEELDKYFKNHTSPDVDLGDISGINASVVNIQKEIDRLNEVAKNLNESLIDLQELGKYEQYIKGGSGYIPEAPRDGQAYVRKDGEWVLLSTFL

SEQ ID NO: 6419 - protein, 1241 aa, Artificial Sequence
  SARS-CoV-2/Portugal/PT0035/2020__EPI_ISL_418020 spike protein (1-1211)(F970C_G999C) Foldon construct
MFVFLVLLPLVSSQCVNLTTRTQLPPAYTNSFTRGVYYPDKVFRSSVLHSTQDLFLPFFSNVTWFHAIHVSGTNGTKRFDNPVLPFNDGVYFASTEKSNIIRGWIFGTTLDSKTQSLLIVNNATNVVIKVCEFQFCNDPFLGVYYHKNNKSWMESEFRVYSSANNCTFEYVSQPFLMDLEGKQGNFKNLREFVFKNIDGYFKIYSKHTPINLVRDLPQGFSALEPLVDLPIGINITRFQTLLALHRSYLTPGDSSSGWTAGAAAYYVGYLQPRTFLLKYNENGTITDAVDCALDPLSETKCTLKSFTVEKGIYQTSNFRVQPTESIVRFPNITNLCPFGEVFNATRFASVYAWNRKRISNCVADYSVLYNSASFSTFKCYGVSPTKLNDLCFTNVYADSFVIRGDEVRQIAPGQTGKIADYNYKLPDDFTGCVIAWNSNNLDSKVGGNYNYLYRLFRKSNLKPFERDISTEIYQAGSTPCNGVEGFNCYFPLQSYGFQPTNGVGYQPYRVVVLSFELLHAPATVCGPKKSTNLVKNKCVNFNFNGLTGTGVLTESNKKFLPFQQFGRDIADTTDAVRDPQTLEILDITPCSFGGVSVITPGTNTSNQVAVLYQDVNCTEVPVAIHADQLTPTWRVYSTGSNVFQTRAGCLIGAEHVNNSYECDIPIGAGICASYQTQTNSPRRARSVASQSIIAYTMSLGAENSVAYSNNSIAIPTNFTISVTTEILPVSMTKTSVDCTMYICGDSTECSNLLLQYGSFCTQLNRALTGIAVEQDKNTQEVFAQVKQIYKTPPIKDFGGFNFSQILPDPSKPSKRSFIEDLLFNKVTLADAGFIKQYGDCLGDISARDLICAQKFNGLTVLPPLLTDEMIAQYTSALLAGTITSGWTFGAGAALQIPFAMQMAYRFNGIGVTQNVLYENQKLIANQFNSAIGKIQDSLSSTASALGKLQDVVNQNAQALNTLVKQLSSNCGAISSVLNDILSRLDKVEAEVQIDRLITCRLQSLQTYVTQQLIRAAEIRASANLAATKMSECVLGQSKRVDFCGKGYHLMSFPQSAPHGVVFLHVTYVPAQEKNFTTAPAICHDGKAHFPREGVFVSNGTHWFVTQRNFYEPQIITTDNTFVSGNCDVVIGIVNNTVYDPLQPELDSFKEELDKYFKNHTSPDVDLGDISGINASVVNIQKEIDRLNEVAKNLNESLIDLQELGKYEQYIKGGSGYIPEAPRDGQAYVRKDGEWVLLSTFL

SEQ ID NO: 6420 - protein, 1241 aa, Artificial Sequence
  SARS-CoV-2/USA/NY-NYUMC7/2020__EPI_ISL_418192 spike protein (1-1211)(F970C_G999C) Foldon construct
MFVFLVLLPLVSSQCVNLTTRTQLPPAYTNSFTRGVYYPDKVFRSSVLHSTQDLFLPFFSNVTWFHAIHVSGTNGTKRFDNPVLPFNDGVYFASTEKSNIIRGWIFGTTLDSKTQSLLIVNNATNVVIKVCEFQFCNDPFLGVYHHKNNKSWMESEFRVYSSANNCTFEYVSQPFLMDLEGKQGNFKNLREFVFKNIDGYFKIYSKHTPINLVRDLPQGFSALEPLVDLPIGINITRFQTLLALHRSYLTPGDSSSGWTAGAAAYYVGYLQPRTFLLKYNENGTITDAVDCALDPLSETKCTLKSFTVEKGIYQTSNFRVQPTESIVRFPNITNLCPFGEVFNATRFASVYAWNRKRISNCVADYSVLYNSASFSTFKCYGVSPTKLNDLCFTNVYADSFVIRGDEVRQIAPGQTGKIADYNYKLPDDFTGCVIAWNSNNLDSKVGGNYNYLYRLFRKSNLKPFERDISTEIYQAGSTPCNGVEGFNCYFPLQSYGFQPTNGVGYQPYRVVVLSFELLHAPATVCGPKKSTNLVKNKCVNFNFNGLTGTGVLTESNKKFLPFQQFGRDIADTTDAVRDPQTLEILDITPCSFGGVSVITPGTNTSNQVAVLYQGVNCTEVPVAIHADQLTPTWRVYSTGSNVFQTRAGCLIGAEHVNNSYECDIPIGAGICASYQTQTNSPRRARSVASQSIIAYTMSLGAENSVAYSNNSIAIPTNFTISVTTEILPVSMTKTSVDCTMYICGDSTECSNLLLQYGSFCTQLNRALTGIAVEQDKNTQEVFAQVKQIYKTPPIKDFGGFNFSQILPDPSKPSKRSFIEDLLFNKVTLADAGFIKQYGDCLGDIAARDLICAQKFNGLTVLPPLLTDEMIAQYTSALLAGTITSGWTFGAGAALQIPFAMQMAYRFNGIGVTQNVLYENQKLIANQFNSAIGKIQDSLSSTASALGKLQDVVNQNAQALNTLVKQLSSNCGAISSVLNDILSRLDKVEAEVQIDRLITCRLQSLQTYVTQQLIRAAEIRASANLAATKMSECVLGQSKRVDFCGKGYHLMSFPQSAPHGVVFLHVTYVPAQEKNFTTAPAICHDGKAHFPREGVFVSNGTHWFVTQRNFYEPQIITTDNTFVSGNCDVVIGIVNNTVYDPLQPELDSFKEELDKYFKNHTSPDVDLGDISGINASVVNIQKEIDRLNEVAKNLNESLIDLQELGKYEQYIKGGSGYIPEAPRDGQAYVRKDGEWVLLSTFL

SEQ ID NO: 6421 - protein, 1241 aa, Artificial Sequence
  SARS-CoV-2/Iceland/189/2020__EPI_ISL_417709 spike protein (1-1211)(F970C_G999C) Foldon construct
MFVFLVLLPLVSSQCVNLTTRTQLPPAYTNSFTRGVYYPDKVFRSSVLHSTQDLFLPFFSNVTWFHAIHVSGTNGTKRFDNPVLPFNDGVYFASTEKSNIIRGWIFGTTLDSKTQSLLIVNNATNVVIKVCEFQFCNDPFLGVYYHKNNKSWMESEFRVYSSANNCTFEYVSQPFLMDLEGKQGNFKNLREFVFKNIDGYFKIYSKHTPINLVRDLPQGFSALEPLVDLPIGINITRFQTLLALHRSYLTPGDSSSGWTAGAAAYYVGYLQPRTFLLKYNENGTITDAVDCALDPLSETKCTLKSFTVEKGIYQTSNFRVQPTESIVRFPNITNLCPFGEVFNATRFASVYAWNRKRISNCVADYSVLYNSASFSTFKCYGVSPTKLNDLCFTNVYADSFVIRGDEVRQIAPGQTGKIADYNYKLPDDFTGCVIAWNSNNLDSKVGGNYNYLYRLFRKSNLKPFERDISTEIYQAGSTPCNGVEGFNCYFPLQSYGFQPTNGVGYQPYRVVVLSFELLHAPATVCGPKKSTNLVKNKCVNFNFNGLTGTGVLTESNKKFLPFQQFGRDIADTTDAVRDPQTLEILDITPCSFGGVSVITPGTNTSNQVAVLYQGVNCTEVPVAIHADQLTPTWRVYSTGSNVFQTRAGCLIGAEHVNNSYECDIPIGAGICASYQTQTNSPRRARSVASQSIIAYTMSLGAENSVAYSNNSIAIPTNFTISVTTEILPVSMTKTSVDCTMYICGDSTECSNLLLQYGSFCTQLNRALTGIAVEQDKNTQEVFAQVKQIYKTPPIKDFGGFNFSQILPDPSKPSKRSFIEDLLFNKVTLADAGFTKQYGDCLGDIAARDLICAQKFNGLTVLPPLLTDEMIAQYTSALLAGTITSGWTFGAGAALQIPFAMQMAYRFNGIGVTQNVLYENQKLIANQFNSAIGKIQDSLSSTASALGKLQDVVNQNAQALNTLVKQLSSNCGAISSVLNDILSRLDKVEAEVQIDRLITCRLQSLQTYVTQQLIRAAEIRASANLAATKMSECVLGQSKRVDFCGKGYHLMSFPQSAPHGVVFLHVTYVPAQEKNFTTAPAICHDGKAHFPREGVFVSNGTHWFVTQRNFYEPQIITTDNTFVSGNCDVVIGIVNNTVYDPLQPELDSFKEELDKYFKNHTSPDVDLGDISGINASVVNIQKEIDRLNEVAKNLNESLIDLQELGKYEQYIKGGSGYIPEAPRDGQAYVRKDGEWVLLSTFL

SEQ ID NO: 6422 - protein, 1241 aa, Artificial Sequence
  SARS-CoV-2/Australia/NSW56/2020__EPI_ISL_417408 spike protein (1-1211)(F970C_G999C) Foldon construct
MFVFLVLLPLVSSQCVNLTTRTQLPPAYTNSFTRGVYYPDKVFRSSVLHSTQDLFLPFFSNVTWFHAIHVSGTNGTKRFDNPVLPFNDGVYFASTEKSNIIRGWIFGTTLDSKTQSLLIVNNATNVVIKVCEFQFCNDPFLGVYYHKNNKSWMESEFRVYSSANNCTFEYVSQPFLMDLEGKQGNFKNLREFVFKNIDGYFKIYSKHTPINLVRDLPQGFSALEPLVDLPIGINITRFQTLLALHRSYLTPGDSSSGWTAGAAAYYVGYLQPRTFLLKYNENGTITDAVDCALDPLSETKCTLKSFTVEKGIYQTSNFRVQPTESIVRFPNITNLCPFGEVFNATRFASVYAWNRKRISNCVADYSVLYNSASFSTFKCYGVSPTKLNDLCFTNVYADSFVIRGDEVRQIAPGQTGKIADYNYKLPDDFTGCVIAWNSNNLDSKVGGNYNYLYRLFRKSNLKPFERDISTEIYQAGSTPCNGVEGFNCYFPLQSYGFQPTNGVGYQPYRVVVLSFELLHAPATVCGPKKSTNLVKNKCVNFNFNGLTGTGVLTESNKKFLPFQQFGRDIADTTDAVRDPQTLEILDITPCSFGGVSVITPGTNTSNQVAVLYQDVNCTEVPVAIHADQLTPTWRVYSTGSNVFQTRAGCLIGAEHVNNSYECDIPIGAGICASYQTQTNSPRRARSVASQSIIAYTMSLGAENSVAYSNNSIAIPTNFTISVTTEILPVSMTKTSVDCTMYICGDSTECSNLLLQYGSFCTQLNRALTGIAVEQDKNTQEVFAQVKQIYKTPPIKDFGGFNFSQILPDSSKPSKRSFIEDLLFNKVTLADAGFIKQYGDCLGDIAARDLICAQKFNGLTVLPPLLTDEMIAQYTSALLAGTITSGWTFGAGAALQIPFAMQMAYRFNGIGVTQNVLYENQKLIANQFNSAIGKIQDSLSSTASALGKLQDVVNQNAQALNTLVKQLSSNCGAISSVLNDILSRLDKVEAEVQIDRLITCRLQSLQTYVTQQLIRAAEIRASANLAATKMSECVLGQSKRVDFCGKGYHLMSFPQSAPHGVVFLHVTYVPAQEKNFTTAPAICHDGKAHFPREGVFVSNGTHWFVTQRNFYEPQIITTDNTFVSGNCDVVIGIVNNTVYDPLQPELDSFKEELDKYFKNHTSPDVDLGDISGINASVVNIQKEIDRLNEVAKNLNESLIDLQELGKYEQYIKGGSGYIPEAPRDGQAYVRKDGEWVLLSTFL

SEQ ID NO: 6423 - protein, 1241 aa, Artificial Sequence
  SARS-CoV-2/Iceland/280/2020__EPI_ISL_417608 spike protein (1-1211)(F970C_G999C) Foldon construct
MFVFLVLLPLVSSQCVNLTTRTQLPPAYTNSFTRGVYYPDKVFRSSVLHSTQDLFLPFFSNVTWFHAIHVSGTNGTKRFDNPVLPFNDGVYFASTEKSNIIRGWIFGTTLDSKTQSLLIVNNATNVVIKVCEFQFCNDPFLGVYYHKNNKSWMESEFRVYSSANNCTFEYVSQPFLMDLEGKQGNFKNLREFVFKNIDGYFKIYSKHTPINLVRDLPQGFSALEPLVDLPIGINITRFQTLLALHRSYLTPGDSSSGWTAGAAAYYVGYLQPRTFLLKYNENGTITDAVDCALDPLSETKCTLKSFTVEKGIYQTSNFRVQPTESIVRFPNITNLCPFGEVFNATRFASVYAWNRKRISNCVADYSVLYNSASFSTFKCYGVSPTKLNDLCFTNVYADSFVIRGDEVRQIAPGQTGKIADYNYKLPDDFTGCVIAWNSNNLDSKVGGNYNYLYRLFRKSNLKPFERDISTEIYQAGSTPCNGVEGFNCYFPLQSYGFQPTNGVGYQPYRVVVLSFELLHAPATVCGPKKSTNLVKNKCVNFNFNGLTGTGVLTESNKKFLPFQQFGRDIADTTDAVRDPQTLEILDITPCSFGGVSVITPGTNTSNQVAVLYQGVNCTEVPVAIHADQLTPTWRVYSTGSNVFQTRAGCLIGAEHVNNSYECDIPIGAGICASYHTQTNSPRRARSVASQSIIAYTMSLGAENSVAYSNNSIAIPTNFTISVTTEILPVSMTKTSVDCTMYICGDSTECSNLLLQYGSFCTQLNRALTGIAVEQDKNTQEVFAQVKQIYKTPPIKDFGGFNFSQILPDPSKPSKRSFIEDLLFNKVTLADAGFIKQYGDCLGDIAARDLICAQKFNGLTVLPPLLTDEMIAQYTSALLAGTITSGWTFGAGAALQIPFAMQMAYRFNGIGVTQNVLYENQKLIANQFNSAIGKIQDSLSSTASALGKLQDVVNQNAQALNTLVKQLSSNCGAISSVLNDILSRLDKVEAEVQIDRLITCRLQSLQTYVTQQLIRAAEIRASANLAATKMSECVLGQSKRVDFCGKGYHLMSFPQSAPHGVVFLHVTYVPAQEKNFTTAPAICHDGKAHFPREGVFVSNGTHWFVTQRNFYEPQIITTDNTFVSGNCDVVIGIVNNTVYDPLQPELDSFKEELDKYFKNHTSPDVDLGDISGINASVVNIQKEIDRLNEVAKNLNESLIDLQELGKYEQYIKGGSGYIPEAPRDGQAYVRKDGEWVLLSTFL

SEQ ID NO: 6424 - protein, 1241 aa, Artificial Sequence; identical to SEQ ID NO: 6379
  SARS-CoV-2/Iceland/247/2020__EPI_ISL_417575 spike protein (1-1211)(F970C_G999C) Foldon construct

SEQ ID NO: 6425 - protein, 1241 aa, Artificial Sequence
  SARS-CoV-2/Iceland/238/2020__EPI_ISL_417566 spike protein (1-1211)(F970C_G999C) Foldon construct
MFVFLVLLPLVSSQCVNLTTRTQLPPAYTNSFTRGVYYPDKVFRSSVLHSTQDLFLPFFSNVTWFHAIHVSGTNGTKRFDNPVLPFNDGVYFASTEKSNIIRGWIFGTTLDSKTQSLLIVNNATNVVIKVCEFQFCNDPFLGVYYHKNNKSWMESEFRVYSSANNCTFEYVSQPFLMDLEGKQGNFKNLREFVFKNIDGYFKIYSKHTPINLVRDLPQGFSALEPLVDLPIGINITRFQTLLALHRSYLTPGDSSSGWTAGAAAYYVGYLQPRTFLLKYNENGTITDAVDCALDPLSETKCTLKSFTVEKGIYQTSNFRVQPTESIVRFPNITNLCPFGEVFNATRFASVYAWNRKRISNCVADYSVLYNSASFSTFKCYGVSPTKLNDLCFTNVYADSFVIRGDEVRQIAPGQTGKIADYNYKLPDDFTGCVIAWNSNNLDSKVGGNYNYLYRLFRKSNLKPFERDISTEIYQAGSTPCNGVEGFNCYFPLQSYGFQPTNGVGYQPYRVVVLSFELLHAPATVCGPKKSTNLVKNKCVNFNFNGLTGTGVLTESNKKFLPFQQFGRDIADTTDAVRDPQTLEILDITPCSFGGVSVITPGTNTSNQVAVLYQGVNCTEVPVAIHADQLTPTWRVYSTGSNVFQTRAGCLIGAEHVNNSYECDIPIGAGICASYQTQTNSPRRARSVASQSIIAYTMSLGAENSVAYSNNSIAIPTNFTISVTTEILPVSMTKTSVDCTMYICGDSTECSNLLLQYGSFCTQLNRALTGIAVEQDKNTQEVFAQVKQIYKTPPIKDFGGFNFSQILPDPSKPSKRSFIEDLLFNKVTLADVGFIKQYGDCLGDIAARDLICAQKFNGLTVLPPLLTDEMIAQYTSALLAGTITSGWTFGAGAALQIPFAMQMAYRFNGIGVTQNVLYENQKLIANQFNSAIGKIQDSLSSTASALGKLQDVVNQNAQALNTLVKQLSSNCGAISSVLNDILSRLDKVEAEVQIDRLITCRLQSLQTYVTQQLIRAAEIRASANLAATKMSECVLGQSKRVDFCGKGYHLMSFPQSAPHGVVFLHVTYVPAQEKNFTTAPAICHDGKAHFPREGVFVSNGTHWFVTQRNFYEPQIITTDNTFVSGNCDVVIGIVNNTVYDPLQPELDSFKEELDKYFKNHTSPDVDLGDISGINASVVNIQKEIDRLNEVAKNLNESLIDLQELGKYEQYIKGGSGYIPEAPRDGQAYVRKDGEWVLLSTFL

SEQ ID NO: 6426 - protein, 1241 aa, Artificial Sequence
  SARS-CoV-2/Greece/16/2020__EPI_ISL_418265 spike protein (1-1211)(F970C_G999C) Foldon construct
MFVFLVLLPLVSSQCVNLTTRTQLPPAYTNSFTRGVYYPDKVFRSSVLHSTQDLFLPFFSNVTWFHAIHVSGTNGTKRFDNPVLPFNDGVYFASTEKSNIIRGWIFGTTLDSKTQSLLIVNNATNVVIKVCEFQFCNDPFLGVYYHKNNKSWMESEFRVYSSANNCTFEYVSQPFLMDLEGKQGNFKNLREFVFKNVDGYFKIYSKHTPINLVRDLPQGFSALEPLVDLPIGINITRFQTLLALHRSYLTPGDSSSGWTAGAAAYYVGYLQPRTFLLKYNENGTITDAVDCALDPLSETKCTLKSFTVEKGIYQTSNFRVQPTESIVRFPNITNLCPFGEVFNATRFASVYAWNRKRISNCVADYSVLYNSASFSTFKCYGVSPTKLNDLCFTNVYADSFVIRGDEVRQIAPGQTGKIADYNYKLPDDFTGCVIAWNSNNLDSKVGGNYNYLYRLFRKSNLKPFERDISTEIYQAGSTPCNGVEGFNCYFPLQSYGFQPTNGVGYQPYRVVVLSFELLHAPATVCGPKKSTNLVKNKCVNFNFNGLTGTGVLTESNKKFLPFQQFGRDIADTTDAVRDPQTLEILDITPCSFGGVSVITPGTNTSNQVAVLYQDVNCTEVPVAIHADQLTPTWRVYSTGSNVFQTRAGCLIGAEHVNNSYECDIPIGAGICASYQTQTNSPRRARSVASQSIIAYTMSLGAENSVAYSNNSIAIPTNFTISVTTEILPVSMTKTSVDCTMYICGDSTECSNLLLQYGSFCTQLNRALTGIAVEQDKNTQEVFAQVKQIYKTPPIKDFGGFNFSQILPDPSKPSKRSFIEDLLFNKVTLADAGFIKQYGDCLGDIAARDLICAQKFNGLTVLPPLLTDEMIAQYTSALLAGTITSGWTFGAGAALQIPFAMQMAYRFNGIGVTQNVLYENQKLIANQFNSAIGKIQDSLSSTASALGKLQDVVNQNAQALNTLVKQLSSNCGAISSVLNDILSRLDKVEAEVQIDRLITCRLQSLQTYVTQQLIRAAEIRASANLAATKMSECVLGQSKRVDFCGKGYHLMSFPQSAPHGVVFLHVTYVPAQEKNFTTAPAICHDGKAHFPREGVFVSNGTHWFVTQRNFYEPQIITTDNTFVSGNCDVVIGIVNNTVYDPLQPELDSFKEELDKYFKNHTSPDVDLGDISGINASVVNIQKEIDRLNEVAKNLNESLIDLQELGKYEQYIKGGSGYIPEAPRDGQAYVRKDGEWVLLSTFL

SEQ ID NO: 6427 - protein, 1241 aa, Artificial Sequence
  SARS-CoV-2/Iceland/319/2020__EPI_ISL_417648 spike protein (1-1211)(F970C_G999C) Foldon construct
MFVFLVLLPLVSSQCVNLTTRTQLPPAYTNSFTRGVYYPDKVFRSSVLHSTQDLFLPFFSNVTWFHAIHVSGTNGTKRFDNPVLPFNDGVYFASTEKSNIIRGWIFGTTLDSKTQSLLIVNNATNVVIKVCEFQFCNDPFLGVYYHKNNKSWMESEFRVYSSANNCTFEYVSQPFLIDLEGKQGNFKNLREFVFKNIDGYFKIYSKHTPINLVRDLPQGFSALEPLVDLPIGINITRFQTLLALHRSYLTPGDSSSGWTAGAAAYYVGYLQPRTFLLKYNENGTITDAVDCALDPLSETKCTLKSFTVEKGIYQTSNFRVQPTESIVRFPNITNLCPFGEVFNATRFASVYAWNRKRISNCVADYSVLYNSASFSTFKCYGVSPTKLNDLCFTNVYADSFVIRGDEVRQIAPGQTGKIADYNYKLPDDFTGCVIAWNSNNLDSKVGGNYNYLYRLFRKSNLKPFERDISTEIYQAGSTPCNGVEGFNCYFPLQSYGFQPTNGVGYQPYRVVVLSFELLHAPATVCGPKKSTNLVKNKCVNFNFNGLTGTGVLTESNKKFLPFQQFGRDIADTTDAVRDPQTLEILDITPCSFGGVSVITPGTNTSNQVAVLYQGVNCTEVPVAIHADQLTPTWRVYSTGSNVFQTRAGCLIGAEHVNNSYECDIPIGAGICASYQTQTNSPRRARSVASQSIIAYTMSLGAENSVAYSNNSIAIPTNFTISVTTEILPVSMTKTSVDCTMYICGDSTECSNLLLQYGSFCTQLNRALTGIAVEQDKNTQEVFAQVKQIYKTPPIKDFGGFNFSQILPDPSKPSKRSFIEDLLFNKVTLADAGFIKQYGDCLGDIAARDLICAQKFNGLTVLPPLLTDEMIAQYTSALLAGTITSGWTFGAGAALQIPFAMQMAYRFNGIGVTQNVLYENQKLIANQFNSAIGKIQDSLSSTASALGKLQDVVNQNAQALNTLVKQLSSNCGAISSVLNDILSRLDKVEAEVQIDRLITCRLQSLQTYVTQQLIRAAEIRASANLAATKMSECVLGQSKRVDFCGKGYHLMSFPQSAPHGVVFLHVTYVPAQEKNFTTAPAICHDGKAHFPREGVFVSNGTHWFVTQRNFYEPQIITTDNTFVSGNCDVVIGIVNNTVYDPLQPELDSFKEELDKYFKNHTSPDVDLGDISGINASVVNIQKEIDRLNEVAKNLNESLIDLQELGKYEQYIKGGSGYIPEAPRDGQAYVRKDGEWVLLSTFL

SEQ ID NO: 6428 - protein, 1241 aa, Artificial Sequence
  SARS-CoV-2/Congo/94/2020__EPI_ISL_417947 spike protein (1-1211)(F970C_G999C) Foldon construct
MFVFLVLLPLVSSQCVNLTTRTQLPPAYTNSFTRGVYYPDKVFRSSVLHSTQDLFLPFFSNVTWFHAIHVSGTNGTKRFDNPVLPFNDGVYFASTEKSNIIRGWIFGTTLDSKTQSLLIVNNATNVVIKVCEFQFCNDPFLGVYYHKNNKSWMESEFRVYSSANNCTFEYVSQPFLMDLEGKQGNFKNLREFVFKNIDGYFKIYSKHTPINLVRDLPQGFSALEPLVDLPIGINITRFQTLLALHRSYLTPGDSSSGWTAGAAAYYVGYLQPRTFLLKYNENGTITDAVDCALDPLSETKCTLKSFTVEKGIYQTSNFRVQPTESIVRFPNITNLCPFGEVFNATRFASVYAWNRKRISNCVADYSVLYNSASFSTFKCYGVSPTKLNDLCFTNVYADSFVIRGDEVRQIAPGQTGKIADYNYKLPDDFTGCVIAWNSNNLDSKVGGNYNYLYRLFRKSNLKPFERDISTEIYQAGSTPCNGVEGFNCYFPLQSYGFQPTNGVGYQPYRVVVLSFELLHAPATVCGPKKSTNLVKNKCVNFNFNGLTGTGVLTESNKKFLPFQQFGRDIADTTDAVRDPQTLEILDITPCSFGGVSVITPGTNTSNQVAVLYQGVNCTEVPVAIHADQLTPTWRVYSTGSNVFQTRAGCLIGAEHVNNSYECDIPIGAGICASYQTQTNSPRRARSVASQSIIAYTMSLGAENSVAYSNNSIAIPTNFTISVTTEILPVSMTKTSVDCTMYICGDSTECSNLLLQYGSFCTQLNRALTGIAVEQDKNTQEVFAQVKQIYKTPPIKDFGGFNFSQILPDPSKPSKRSFIEDILFNKVTLADAGFIKQYGDCLGDIAARDLICAQKFNGLTVLPPLLTDEMIAQYTSALLAGTITSGWTFGAGAALQIPFAMQMAYRFNGIGVTQNVLYENQKLIANQFNSAIGKIQDSLSSTASALGKLQDVVNQNAQALNTLVKQLSSNCGAISSVLNDILSRLDKVEAEVQIDRLITCRLQSLQTYVTQQLIRAAEIRASANLAATKMSECVLGQSKRVDFCGKGYHLMSFPQSAPHGVVFLHVTYVPAQEKNFTTAPAICHDGKAHFPREGVFVSNGTHWFVTQRNFYEPQIITTDNTFVSGNCDVVIGIVNNTVYDPLQPELDSFKEELDKYFKNHTSPDVDLGDISGINASVVNIQKEIDRLNEVAKNLNESLIDLQELGKYEQYIKGGSGYIPEAPRDGQAYVRKDGEWVLLSTFL

SEQ ID NO: 6429 - protein, 1241 aa, Artificial Sequence
  SARS-CoV-2/Congo/158/2020__EPI_ISL_417950 spike protein (1-1211)(F970C_G999C) Foldon construct
MFVFLVLLPLVSSQCVNLTTRTQLPPAYTNSFTRGVYYPDKVFRSSVLHSTQDLFLPFFSNVTWFHAIHVSGTNGTKRFDNPVLPFNDGVYFASTEKSNIIRGWIFGTTLDSKTQSLLIVNNATNVVIKVCEFQFCNDPFLGVYYHKNNKSWMESEFRVYSSANNCTFEYVSQPFLMDLEGKQGNFKNLREFVFKNIDGYFKIYSKHTPINLVRDLPQGFSALEPLVDLPIGINITRFQTLLALHRSYLTPGDSSSGWTAGAAAYYVGYLQPRTFLLKYNENGTITDAVDCALDPLSETKCTLKSFTVEKGIYQTSNFRVQPTESIVRFPNITNLCPFGEVFNATRFASVYAWNRKRISNCVADYSVLYNSASFSTFKCYGVSPTKLNDLCFTNVYADSFVIRGDEVRQIAPGQTGKIADYNYKLPDDFTGCVIAWNSNNLDSKVGGNYNYLYRLFRKSNLKPFERDISTEIYQAGSTPCNGVEGFNCYFPLQSYGFQPTNGVGYQPYRVVVLSFELLHAPATVCGPKKSTNLVKNKCVNFNFNGLTGTGVLTESNKKFLPFQQFGRDIADTTDAVRDPQTLEILDITPCSFGGVSVITPGTNTSNQVAVLYQDVNCTEVPVAIHADQLTPTWRVYSTGSNVFQTRAGCLIGAEHVNNSYECDIPIGAGICASYQTQTNSPRRARSVASQSIIAYTMSLGAENSVAYSNNSIAIPTNFTISVTTEILPVSMTKTSVDCTMYICGDSTECSNLLLQYGSFCTQLNRALTGIAVEQDKNTQEVFAQVKQIYKTPPIKDFGGFNFSQILPDPSKPSKRSFIEDLLFNKVTLADAGFIKQYGDCLGDIAARDLICAQKFNGLTVLPPLLTDEMIAQYTSALLAGTITSGWTFGAGAALQIPFAMQMAYRFNGIGVTQNVLYENQKLIANQFNSAIGKIQDSLSSTASALGKLQDVVNQNAQALNTLVKQLSSNCGAISSVLNDILSRLDKVEAEVQIDRLITCRLQSLQTYVTQQLIRAAEIRASANLAATKMSECVLGQSKRVDFCGKGYHLMSFPQSAPHGVVFLHVTYVPAQEKNFTTAPAICHDGKAHFPREGVFVSNGTHWFVTQRNFYEPQIITTDNTFLSGNCDVVIGIVNNTVYDPLQPELDSFKEELDKYFKNHTSPDVDLGDISGINASVVNIQKEIDRLNEVAKNLNESLIDLQELGKYEQYIKGGSGYIPEAPRDGQAYVRKDGEWVLLSTFL

SEQ ID NO: 6430 - protein, 1241 aa, Artificial Sequence
  SARS-CoV-2/USA/UT-00034/2020__EPI_ISL_417977 spike protein (1-1211)(F970C_G999C) Foldon construct
MFVFLVLLPLVSSQCVNLTTRTQLPPAYTNSFTRGVYYPDKVFRSSVLHSTQDLFLPFFSNVTWFHAIHVSGTNGTKRFDNPVLPFNDGVYFASTEKSNIIRGWIFGTTLDSKTQSLLIVNNATNVVIKVCEFQFCNDPFLGVYYYKNNKSWMESEFRVYSSANNCTFEYVSQPFLMDLEGKQGNFKNLREFVFKNIDGYFKIYSKHTPINLVRDLPQGFSALEPLVDLPIGINITRFQTLLALHRSYLTPGDSSSGWTAGAAAYYVGYLQPRTFLLKYNENGTITDAVDCALDPLSETKCTLKSFTVEKGIYQTSNFRVQPTESIVRFPNITNLCPFGEVFNATRFASVYAWNRKRISNCVADYSVLYNSASFSTFKCYGVSPTKLNDLCFTNVYADSFVIRGDEVRQIAPGQTGKIADYNYKLPDDFTGCVIAWNSNNLDSKVGGNYNYLYRLFRKSNLKPFERDISTEIYQAGSTPCNGVEGFNCYFPLQSYGFQPTNGVGYQPYRVVVLSFELLHAPATVCGPKKSTNLVKNKCVNFNFNGLTGTGVLTESNKKFLPFQQFGRDIADTTDAVRDPQTLEILDITPCSFGGVSVITPGTNTSNQVAVLYQGVNCTEVPVAIHADQLTPTWRVYSTGSNVFQTRAGCLIGAEHVNNSYECDIPIGAGICASYQTQTNSPRRARSVASQSIIAYTMSLGAENSVAYSNNSIAIPTNFTISVTTEILPVSMTKTSVDCTMYICGDSTECSNLLLQYGSFCTQLNRALTGIAVEQDKNTQEVFAQVKQIYKTPPIKDFGGFNFSQILPDPSKPSKRSFIEDLLFNKVTLADAGFIKQYGDCLGDIAARDLICAQKFNGLTVLPPLLTDEMIAQYTSALLAGTITSGWTFGAGAALQIPFAMQMAYRFNGIGVTQNVLYENQKLIANQFNSAIGKIQDSLSSTASALGKLQDVVNQNAQALNTLVKQLSSNCGAISSVLNDILSRLDKVEAEVQIDRLITCRLQSLQTYVTQQLIRAAEIRASANLAATKMSECVLGQSKRVDFCGKGYHLMSFPQSAPHGVVFLHVTYVPAQEKNFTTAPAICHDGKAHFPREGVFVSNGTHWFVTQRNFYEPQIITTDNTFVSGNCDVVIGIVNNTVYDPLQPELDSFKEELDKYFKNHTSPDVDLGDISGINASVVNIQKEIDRLNEVAKNLNESLIDLQELGKYEQYIKGGSGYIPEAPRDGQAYVRKDGEWVLLSTFL

SEQ ID NO: 6431 - protein, 1241 aa, Artificial Sequence
  SARS-CoV-2/USA/UT-00033/2020__EPI_ISL_417976 spike protein (1-1211)(F970C_G999C) Foldon construct
MFVFLVLLPLVSSQCVNLTTRTQLPPAYTNSFTRGVYYPDKVFRSSVLHSTQDLFLPFFSNVTWFHAIHVSGTNGTKRFDNPVLPFNDGVYFASTEKSNIIRGWIFGTTLDSKTQSLLIVNNATNVVIKVCEFQFCNDPFLGVYYHKNNKSWMESEFRVYSSANNCTFEYVSQPFLMDLEGKQGNFKNLREFVFKNIDGYFKIYSKHTPINLVRDLPQGFSALEPLVDLPIGINITRFQTLLALHRSYLTPGDSSSGLTAGAAAYYVGYLQPRTFLLKYNENGTITDAVDCALDPLSETKCTLKSFTVEKGIYQTSNFRVQPTESIVRFPNITNLCPFGEVFNATRFASVYAWNRKRISNCVADYSVLYNSASFSTFKCYGVSPTKLNDLCFTNVYADSFVIRGDEVRQIAPGQTGKIADYNYKLPDDFTGCVIAWNSNNLDSKVGGNYNYLYRLFRKSNLKPFERDISTEIYQAGSTPCNGVEGFNCYFPLQSYGFQPTNGVGYQPYRVVVLSFELLHAPATVCGPKKSTNLVKNKCVNFNFNGLTGTGVLTESNKKFLPFQQFGRDIADTTDAVRDPQTLEILDITPCSFGGVSVITPGTNTSNQVAVLYQGVNCTEVPVAIHADQLTPTWRVYSTGSNVFQTRAGCLIGAEHVNNSYECDIPIGAGICASYQTQTNSPRRARSVASQSIIAYTMSLGAENSVAYSNNSIAIPTNFTISVTTEILPVSMTKTSVDCTMYICGDSTECSNLLLQYGSFCTQLNRALTGIAVEQDKNTQEVFAQVKQIYKTPPIKDFGGFNFSQILPDPSKPSKRSFIEDLLFNKVTLADAGFIKQYGDCLGDIAARDLICAQKFNGLTVLPPLLTDEMIAQYTSALLAGTITSGWTFGAGAALQIPFAMQMAYRFNGIGVTQNVLYENQKLIANQFNSAIGKIQDSLSSTASALGKLQDVVNQNAQALNTLVKQLSSNCGAISSVLNDILSRLDKVEAEVQIDRLITCRLQSLQTYVTQQLIRAAEIRASANLAATKMSECVLGQSKRVDFCGKGYHLMSFPQSAPHGVVFLHVTYVPAQEKNFTTAPAICHDGKAHFPREGVFVSNGTHWFVTQRNFYEPQIITTDNTFVSGNCDVVIGIVNNTVYDPLQPELDSFKEELDKYFKNHTSPDVDLGDISGINASVVNIQKEIDRLNEVAKNLNESLIDLQELGKYEQYIKGGSGYIPEAPRDGQAYVRKDGEWVLLSTFL

SEQ ID NO: 6432 - protein, 1241 aa, Artificial Sequence
  SARS-CoV-2/USA/WI-13/2020__EPI_ISL_417516 spike protein (1-1211)(F970C_G999C) Foldon construct
MFVFLVLLPLVSSQCVNLTTRTQLPPAYTNSFTRGVYYPDKVFRSSVLHSTQDLFLPFFSNVTWFHAIHVSGTNGTKRFDNPVLPFNDGVYFASTEKSNIIRGWIFGTTLDSKTQSLLIVNNATNVVIKVCEFQFCNDPFLGVYYHKNNKSWMESEFRVYSSANNCTFEYVSQPFLMDLEGKQGNFKNLREFVFKNIDGYFKIYSKHTPINLVRDLPQGFSALEPLVDLPIGINITRFQTLLALHRSYLTPGDSSSGWTAGAAAYYVGYLQPRTFLLKYNENGTITDAVDCALDPLSETKCTLKSFTVEKGIYQTSNFRVLPTESIVRFPNITNLCPFGEVFNATRFASVYAWNRKRISNCVADYSVLYNSASFSTFKCYGVSPTKLNDLCFTNVYADSFVIRGDEVRQIAPGQTGKIADYNYKLPDDFTGCVIAWNSNNLDSKVGGNYNYLYRLFRKSNLKPFERDISTEIYQAGSTPCNGVEGFNCYFPLQSYGFQPTNGVGYQPYRVVVLSFELLHAPATVCGPKKSTNLVKNKCVNFNFNGLTGTGVLTESNKKFLPFQQFGRDIADTTDAVRDPQTLEILDITPCSFGGVSVITPGTNTSNQVAVLYQGVNCTEVPVAIHADQLTPTWRVYSTGSNVFQTRAGCLIGAEHVNNSYECDIPIGAGICASYQTQTNSPRRARSVASQSIIAYTMSLGAENSVAYSNNSIAIPTNFTISVTTEILPVSMTKTSVDCTMYICGDSTECSNLLLQYGSFCTQLNRALTGIAVEQDKNTQEVFAQVKQIYKTPPIKDFGGFNFSQILPDPSKPSKRSFIEDLLFNKVTLADAGFIKQYGDCLGDIAARDLICAQKFNGLTVLPPLLTDEMIAQYTSALLAGTITSGWTFGAGAALQIPFAMQMAYRFNGIGVTQNVLYENQKLIANQFNSAIGKIQDSLSSTASALGKLQDVVNQNAQALNTLVKQLSSNCGAISSVLNDILSRLDKVEAEVQIDRLITCRLQSLQTYVTQQLIRAAEIRASANLAATKMSECVLGQSKRVDFCGKGYHLMSFPQSAPHGVVFLHVTYVPAQEKNFTTAPAICHDGKAHFPREGVFVSNGTHWFVTQRNFYEPQIITTDNTFVSGNCDVVIGIVNNTVYDPLQPELDSFKEELDKYFKNHTSPDVDLGDISGINASVVNIQKEIDRLNEVAKNLNESLIDLQELGKYEQYIKGGSGYIPEAPRDGQAYVRKDGEWVLLSTFL

SEQ ID NO: 6433 - protein, 1240 aa, Artificial Sequence
  SARS-CoV-2/India/1-27/2020__EPI_ISL_413522 spike protein (1-1210)(F969C_G998C) Foldon construct
MFVFLVLLPLVSSQCVNLTTRTQLPPAYTNSFTRGVYYPDKVFRSSVLHSTQDLFLPFFSNVTWFHAIHVSGTNGTKRFDNPVLPFNDGVYFASTEKSNIIRGWIFGTTLDSKTQSLLIVNNATNVVIKVCEFQFCNDPFLGVYHKNNKSWMESEFRVYSSANNCTFEYVSQPFLMDLEGKQGNFKNLREFVFKNIDGYFKIYSKHTPINLVRDLPQGFSALEPLVDLPIGINITRFQTLLALHRSYLTPGDSSSGWTAGAAAYYVGYLQPRTFLLKYNENGTITDAVDCALDPLSETKCTLKSFTVEKGIYQTSNFRVQPTESIVRFPNITNLCPFGEVFNATRFASVYAWNRKRISNCVADYSVLYNSASFSTFKCYGVSPTKLNDLCFTNVYADSFVIRGDEVIQIAPGQTGKIADYNYKLPDDFTGCVIAWNSNNLDSKVGGNYNYLYRLFRKSNLKPFERDISTEIYQAGSTPCNGVEGFNCYFPLQSYGFQPTNGVGYQPYRVVVLSFELLHAPATVCGPKKSTNLVKNKCVNFNFNGLTGTGVLTESNKKFLPFQQFGRDIADTTDAVRDPQTLEILDITPCSFGGVSVITPGTNTSNQVAVLYQDVNCTEVPVAIHADQLTPTWRVYSTGSNVFQTRAGCLIGAEHVNNSYECDIPIGAGICASYQTQTNSPRRARSVASQSIIAYTMSLGAENSVAYSNNSIAIPTNFTISVTTEILPVSMTKTSVDCTMYICGDSTECSNLLLQYGSFCTQLNRALTGIAVEQDKNTQEVFAQVKQIYKTPPIKDFGGFNFSQILPDPSKPSKRSFIEDLLFNKVTLADAGFIKQYGDCLGDIAARDLICAQKFNGLTVLPPLLTDEMIAQYTSALLAGTITSGWTFGAGAALQIPFAMQMAYRFNGIGVTQNVLYENQKLIANQFNSAIGKIQDSLSSTASALGKLQDVVNQNAQALNTLVKQLSSNCGAISSVLNDILSRLDKVEAEVQIDRLITCRLQSLQTYVTQQLIRAAEIRASANLAATKMSECVLGQSKRVDFCGKGYHLMSFPQSAPHGVVFLHVTYVPAQEKNFTTAPAICHDGKAHFPREGVFVSNGTHWFVTQRNFYEPQIITTDNTFVSGNCDVVIGIVNNTVYDPLQPELDSFKEELDKYFKNHTSPDVDLGDISGINASVVNIQKEIDRLNEVAKNLNESLIDLQELGKYEQYIKGGSGYIPEAPRDGQAYVRKDGEWVLLSTFL

SEQ ID NO: 6434 - protein, 1235 aa, Artificial Sequence
  SARS-CoV-2/pangolin/Guangxi/P4L/2017__EPI_ISL_410538 spike protein (1-1205)(F964C_G993C) Foldon construct
MFVFLFVLPLVSSQCVNLTTRTGIPPGYTNSSTRGVYYPDKVFRSSILHLTQDLFLPFFSNVTWFNTINYQGGFKKFDNPVLPFNDGVYFASTEKSNIIRGWIFGTTLDARTQSLLIVNNATNVVIKVCEFQFCTDPFLGVYYHNNNKTWVENEFRVYSSANNCTFEYISQPFLMDLEGKQGNFKNLREFVFKNVDGYFKIYSKHTPIDLVRDLPRGFAALEPLVDLPIGINITRFQTLLALHRSYLTPGNLESGWTTGAAAYYVGYLQQRTFLLSYNQNGTITDAVDCSLDPLSETKCTLKSLTVEKGIYQTSNFRVQPTISIVRFPNITNLCPFGEVFNASKFASVYAWNRKRISNCVADYSVLYNSTSFSTFKCYGVSPTKLNDLCFTNVYADSFVVKGDEVRQIAPGQTGVIADYNYKLPDDFTGCVIAWNSVKQDALTGGNYGYLYRLFRKSKLKPFERDISTEIYQAGSTPCNGQVGLNCYYPLERYGFHPTTGVNYQPFRVVVLSFELLNGPATVCGPKLSTTLVKDKCVNFNFNGLTGTGVLTTSKKQFLPFQQFGRDISDTTDAVRDPQTLEILDITPCSFGGVSVITPGTNTSNQVAVLYQDVNCTEVPMAIHAEQLTPAWRVYSAGANVFQTRAGCLVGAEHVNNSYECDIPVGAGICASYHSMSSLRSVNQRSIIAYTMSLGAENSVAYSNNSIAIPTNFTISVTTEILPVSMTKTSVDCTMYICGDSIECSNLLLQYGSFCTQLNRALTGIAVEQDKNTQEVFAQVKQIYKTPPIKDFGGFNFSQILPDPSKPSKRSFIEDLLFNKVTLADAGFIKQYGDCLGDIAARDLICAQKFNGLTVLPPLLTDEMIAQYTSALLAGTITSGWTFGAGAALQIPFAMQMAYRFNGIGVTQNVLYENQKLIANQFNSAIGKIQDSLSSTASALGKLQDVVNQNAQALNTLVKQLSSNCGAISSVLNDILSRLDKVEAEVQIDRLITCRLQSLQTYVTQQLIRAAEIRASANLAATKMSECVLGQSKRVDFCGKGYHLMSFPQSAPHGVVFLHVTYVPAQEKNFTTAPAICHEGKAHFPREGVFVSNGTHWFITQRNFYEPQIITTDNTFVSGSCDVVIGIVNNTVYDPLQPELDSFKEELDKYFKNHTSPDVDLGDISGINASVVNIQKEIDRLNEVAKNLNESPIDLQELGKYEQYIKGGSGYIPEAPRDGQAYVRKDGEWVLLSTFL

SEQ ID NO: 6435 - protein, 1235 aa, Artificial Sequence
  SARS-CoV-2/pangolin/Guangxi/P5L/2017__EPI_ISL_410540 spike protein (1-1205)(F964C_G993C) Foldon construct
MFVFLFVLPLVSSQCVNLTTRTGIPPGYTNSSTRGVYYPDKVFRSSILHLTQDLFLPFFSNVTWFNTINYQGGFKKFDNPVLPFNDGVYFASTEKSNIIRGWIFGTTLDARTQSLLIVNNATNVVIKVCEFQFCTDPFLGVYYHNNNKTWVENEFRVYSSANNCTFEYISQPFLMDLEGKQGNFKNLREFVFKNVDGYFKIYSKHTPIDLVRDLPRGFAALEPLVDLPIGINITRFQTLLALHRSYLTPGKLESGWTTGAAAYYVGYLQQRTFLLSYNQNGTITDAVDCSLDPLSETKCTLKSLTVEKGIYQTSNFRVQPTISIVRFPNITNLCPFGEVFNASKFASVYAWNRKRISNCVADYSVLYNSTSFSTFKCYGVSPTKLNDLCFTNVYADSFVVKGDEVRQIAPGQTGVIADYNYKLPDDFTGCVIAWNSVKQDALTGGNYGYLYRLFRKSKLKPFERDISTEIYQAGSTPCNGQVGLNCYYPLERYGFHPTTGVNYQPFRVVVLSFELLNGPATVCGPKLSTTLVKDKCVNFNFNGLTGTGVLTTSKKQFLPFQQFGRDISDTTDAVRDPQTLEILDITPCSFGGVSVITPGTNTSNQVAVLYQDVNCTEVPMAIHAEQLTPAWRVYSAGANVFQTRAGCLVGAEHVNNSYECDIPVGAGICASYHSMSSFRSVNQRSIIAYTMSLGAENSVAYSNNSIAIPTNFTISVTTEILPVSMTKTSVDCTMYICGDSIECSNLLLQYGSFCTQLNRALTGIAVEQDKNTQEVFAQVKQIYKTPPIKDFGGFNFSQILPDPSKPSKRSFIEDLLFNKVTLADAGFIKQYGDCLGDIAARDLICAQKFNGLTVLPPLLTDEMIAQYTSALLAGTITSGWTFGAGAALQIPFAMQMAYRFNGIGVTQNVLYENQKLIANQFNSAIGKIQDSLSSTASALGKLQDVVNQNAQALNTLVKQLSSNCGAISSVLNDILSRLDKVEAEVQIDRLITCRLQSLQTYVTQQLIRAAEIRASANLAATKMSECVLGQSKRVDFCGKGYHLMSFPQSAPHGVVFLHVTYVPAQEKNFTTAPAICHEGKAHFPREGVFVSNGTHWFITQRNFYEPQIITTDNTFVSGSCDVVIGIVNNTVYDPLQPELDSFKEELDKYFKNHTSPDVDLGDISGINASVVNIQKEIDRLNEVAKNLNESLIDLQELGKYEQYIKGGSGYIPEAPRDGQAYVRKDGEWVLLSTFL

SEQ ID NO: 6436 - protein, 1235 aa, Artificial Sequence
  SARS-CoV-2/pangolin/Guangxi/P5E/2017__EPI_ISL_410541 spike protein (1-1205)(F964C_G993C) Foldon construct
MFVFLFVLPLVSSQCVNLTTRTGIPPGYTNSSTRGVYYPDKVFRSSILHLTQDLFLPFFSNVTWFNTITYQGGSKKFDNPVLPFNDGVYFASTEKSNIIRGWIFGTTLDARTQSLLIVNNATNVVIKVCEFQFCTDPFLGVYYHNNNKTWVENEFRVYSSANNCTFEYISQPFLMDLEGKQGNFKNLREFVFKNVDGYFKIYSKHTPIDLVRDLPRGFAALEPLVDLPIGINITRFQTLLALHRSYLTPGKLESGWTTGAAAYYVGYLQQRTFLLSYNQNGTITDAVDCSLDPLSETKCTLKSLTVEKGIYQTSNFRVQPTISIVRFPNITNLCPFGEVFNASKFASVYAWNRKRISNCVADYSVLYNSTSFSTFKCYGVSPTKLNDLCFTNVYADSFVVKGDEVRQIAPGQTGVIADYNYKLPDDFTGCVIAWNSVKQDALTGDNYGYLYRLFRKSKLKPFERDISTEIYQAGSTPCNGQVGLNCYYPLERYGFHPTTGVNYQPFRVVVLSFELLNGPATVCGPKLSTTLVKDKCVNFNFNGLTGTGVLTTSKKQFLPFQQFGRDISDTTDAVRDPQTLEILDITPCSFGGVSVITPGTNTSNQVAVLYQDVNCTEVPMAIHAEQLTPAWRVYSAGANVFQTRAGCLVGAEHVNNSYECDIPVGAGICASYHSMSSFRSVNQRSIIAYTMSLGAENSVAYSNNSIAIPTNFTISVTTEILPVSMTKTSVDCTMYICGDSIECSNLLLQYGSFCTQLNRALTGIAVEQDKNTQEVFAQVKQIYKTPPIKDFGGFNFSQILPDPSKPSKRSFIEDLLFNKVTLADAGFIKQYGDCLGDIAARDLICAQKFNGLTVLPPLLTDEMIAQYTSALLAGTITSGWTFGAGAALQIPFAMQMAYRFNGIGVTQNVLYENQKLIANQFNSAIGKIQDSLSSTASALGKLQDVVNQNAQALNTLVKQLSSNCGAISSVLNDILSRLDKVEAEVQIDRLITCRLQSLQTYVTQQLIRAAEIRASANLAATKMSECVLGQSKRVDFCGKGYHLMSFPQSAPHGVVFLHVTYVPAQEKNFTTAPAICHEGKAHFPREGVFVSNGTHWFITQRNFYEPQIITTDNTFVSGSCDVVIGIVNNTVYDPLQPELDSFKEELDKYFKNHTSPDVDLGDISGINASVVNIQKEIDRLNEVAKNLNESLIDLQELGKYEQYIKGGSGYIPEAPRDGQAYVRKDGEWVLLSTFL

SEQ ID NO: 6437 - protein, 1233 aa, Artificial Sequence
  SARS-CoV-2/pangolin/Guangxi/P1E/2017__EPI_ISL_410539 spike protein (1-1203)(F962C_G991C) Foldon construct
MFVFLFVLPLVSSQCVNLTTRTGIQPGYTNSSTRGVYYPDKVFRSSILHLTQDLFLPFFSNVTWFNTINYQGGFKKFDNPVLPFNDGVYFASTEKSNIIRGWIFGTTLDARTQSLLIVNNATNVVIKVCEFQFCTDPFLGVYYHNNNKTWVENEFRVYSSANNCTFEYISQPFLMDLEGKQGNFKNLREFVFKNVDGYFKIYSKHTPIDLVRDLPRGFAALEPLVDLPIGINITRFQTLLALHRSYLTPGKLESGWTTGAAAYYVGYLQQRTFLLSYNQNGTITDAVDCSLDPLSETKCTLKSLTVEKGIYQTSNFRVQPTISIVRFPNITNLCPFGEVFNASKFASVYAWNRKRISNCVADYSVLYNSTSFSTFKCYGVSPTKLNDLCFTNVYADSFVVKGDEVRQIAPGQTGVIADYNYKLPDDFTGCVIAWNSVKQDALTGGNYLYRLFRKSKLKPFERDISTEIYQAGSTPCNGQVGLNCYYPLERYGFHPTTGVNYQPFRVVVLSFELLNGPATVCGPKLSTTLVKDKCVNFNFNGLTGTGVLTTSKKQFLPFQQFGRDISDTTDAVRDPQTLEILDITPCSFGGVSVITPGTNTSNQVAVLYQDVNCTEVPMAIHAEQLTPAWRVYSAGANVFQTRAGCLVGAEHVNNSYECDIPVGAGICASYHSMSSLRSVNQRSIIAYTMSLGAENSVAYSNNSIAIPTNFTISVTTEILPVSMTKTSVDCTMYICGDSIECSNLLLQYGSFCTQLNRALTGIAVEQDKNTQEVFAQVKQIYKTPPIKDFGGFNFSQILPDPSKPSKRSFIEDLLFNKVTLADAGFIKQYGDCLGDIAARDLICAQKFNGLTVLPPLLTDEMIAQYTSALLAGTITSGWTFGAGAALQIPFAMQMAYRFNGIGVTQNVLYENQKLIANQFNSAIGKIQDSLSSTASALGKLQDVVNQNAQALNTLVKQLSSNCGAISSVLNDILSRLDKVEAEVQIDRLITCRLQSLQTYVTQQLIRAAEIRASANLAATKMSECVLGQSKRVDFCGKGYHLMSFPQSAPHGVVFLHVTYVPAQEKNFTTAPAICHEGKAHFPREGVFVSNGTHWFITQRNFYEPQIITTDNTFVSGSCDVVIGIVNNTVYDPLQPELDSFKEELDKYFKNHTSPDVDLGDISGINASVVNIQKEIDRLNEVAKNLNESLIDLQELGKYEQYIKGGSGYIPEAPRDGQAYVRKDGEWVLLSTFL

SEQ ID NO: 6438 - protein, 1241 aa, Artificial Sequence
  SARS-CoV-2/Wuhan/WIV05/2019__EPI_ISL_402128 spike protein (1-1211)(A972C_R995C) Foldon construct
MFVFLVLLPLVSSQCVNLTTRTQLPPAYTNSFTRGVYYPDKVFRSSVLHSTQDLFLPFFSNVTWFHAIHVSGTNGTKRFDNPVLPFNDGVYFASTEKSNIIRGWIFGTTLDSKTQSLLIVNNATNVVIKVCEFQFCNDPFLGVYYHKNNKSWMESEFRVYSSANNCTFEYVSQPFLMDLEGKQGNFKNLREFVFKNIDGYFKIYSKHTPINLVRDLPQGFSALEPLVDLPIGINITRFQTLLALHRSYLTPGDSSSGWTAGAAAYYVGYLQPRTFLLKYNENGTITDAVDCALDPLSETKCTLKSFTVEKGIYQTSNFRVQPTESIVRFPNITNLCPFGEVFNATRFASVYAWNRKRISNCVADYSVLYNSASFSTFKCYGVSPTKLNDLCFTNVYADSFVIRGDEVRQIAPGQTGKIADYNYKLPDDFTGCVIAWNSNNLDSKVGGNYNYLYRLFRKSNLKPFERDISTEIYQAGSTPCNGVEGFNCYFPLQSYGFQPTNGVGYQPYRVVVLSFELLHAPATVCGPKKSTNLVKNKCVNFNFNGLTGTGVLTESNKKFLPFQQFGRDIADTTDAVRDPQTLEILDITPCSFGGVSVITPGTNTSNQVAVLYQDVNCTEVPVAIHADQLTPTWRVYSTGSNVFQTRAGCLIGAEHVNNSYECDIPIGAGICASYQTQTNSPRRARSVASQSIIAYTMSLGAENSVAYSNNSIAIPTNFTISVTTEILPVSMTKTSVDCTMYICGDSTECSNLLLQYGSFCTQLNRALTGIAVEQDKNTQEVFAQVKQIYKTPPIKDFGGFNFSQILPDPSKPSKRSFIEDLLFNKVTLADAGFIKQYGDCLGDIAARDLICAQKFNGLTVLPPLLTDEMIAQYTSALLAGTITSGWTFGAGAALQIPFAMQMAYRFNGIGVTQNVLYENQKLIANQFNSAIGKIQDSLSSTASALGKLQDVVNQNAQALNTLVKQLSSNFGCISSVLNDILSRLDKVEAEVQIDCLITGRLQSLQTYVTQQLIRAAEIRASANLAATKMSECVLGQSKRVDFCGKGYHLMSFPQSAPHGVVFLHVTYVPAQEKNFTTAPAICHDGKAHFPREGVFVSNGTHWFVTQRNFYEPQIITTDNTFVSGNCDVVIGIVNNTVYDPLQPELDSFKEELDKYFKNHTSPDVDLGDISGINASVVNIQKEIDRLNEVAKNLNESLIDLQELGKYEQYIKGGSGYIPEAPRDGQAYVRKDGEWVLLSTFL

SEQ ID NO: 6439 - protein, 1237 aa, Artificial Sequence
  SARS-CoV-2/bat/Yunnan/RaTG13/2013__EPI_ISL_402131 spike protein (1-1207)(A968C_R991C) Foldon construct
MFVFLVLLPLVSSQCVNLTTRTQLPPAYTNSSTRGVYYPDKVFRSSVLHLTQDLFLPFFSNVTWFHAIHVSGTNGIKRFDNPVLPFNDGVYFASTEKSNIIRGWIFGTTLDSKTQSLLIVNNATNVVIKVCEFQFCNDPFLGVYYHKNNKSWMESEFRVYSSANNCTFEYVSQPFLMDLEGKQGNFKNLREFVFKNIDGYFKIYSKHTPINLVRDLPPGFSALEPLVDLPIGINITRFQTLLALHRSYLTPGDSSSGWTAGAAAYYVGYLQPRTFLLKYNENGTITDAVDCALDPLSETKCTLKSFTVEKGIYQTSNFRVQPTDSIVRFPNITNLCPFGEVFNATTFASVYAWNRKRISNCVADYSVLYNSTSFSTFKCYGVSPTKLNDLCFTNVYADSFVITGDEVRQIAPGQTGKIADYNYKLPDDFTGCVIAWNSKHIDAKEGGNFNYLYRLFRKANLKPFERDISTEIYQAGSKPCNGQTGLNCYYPLYRYGFYPTDGVGHQPYRVVVLSFELLNAPATVCGPKKSTNLVKNKCVNFNFNGLTGTGVLTESNKKFLPFQQFGRDIADTTDAVRDPQTLEILDITPCSFGGVSVITPGTNASNQVAVLYQDVNCTEVPVAIHADQLTPTWRVYSTGSNVFQTRAGCLIGAEHVNNSYECDIPIGAGICASYQTQTNSRSVASQSIIAYTMSLGAENSVAYSNNSIAIPTNFTISVTTEILPVSMTKTSVDCTMYICGDSTECSNLLLQYGSFCTQLNRALTGIAVEQDKNTQEVFAQVKQIYKTPPIKDFGGFNFSQILPDPSKPSKRSFIEDLLFNKVTLADAGFIKQYGDCLGDIAARDLICAQKFNGLTVLPPLLTDEMIAQYTSALLAGTITSGWTFGAGAALQIPFAMQMAYRFNGIGVTQNVLYENQKLIANQFNSAIGKIQDSLSSTASALGKLQDVVNQNAQALNTLVKQLSSNFGCISSVLNDILSRLDKVEAEVQIDCLITGRLQSLQTYVTQQLIRAAEIRASANLAATKMSECVLGQSKRVDFCGKGYHLMSFPQSAPHGVVFLHVTYVPAQEKNFTTAPAICHDGKAHFPREGVFVSNGTHWFVTQRNFYEPQIITTDNTFVSGSCDVVIGIVNNTVYDPLQPELDSFKEELDKYFKNHTSPDVDLGDISGINASVVNIQKEIDRLNEVAKNLNESLIDLQELGKYEQYIKGGSGYIPEAPRDGQAYVRKDGEWVLLSTFL

SEQ ID NO: 6440 - protein, 1241 aa, Artificial Sequence
  SARS-CoV-2/Wuhan/HBCDC-HB-01/2019__EPI_ISL_402132 spike protein (1-1211)(A972C_R995C) Foldon construct
MFVFLVLLPLVSSQCVNLTTRTQLPPAYTNSITRGVYYPDKVFRSSVLHSTQDLFLPFFSNVTWFHAIHVSGTNGTKRFDNPVLPFNDGVYFASTEKSNIIRGWIFGTTLDSKTQSLLIVNNATNVVIKVCEFQFCNDPFLGVYYHKNNKSWMESEFRVYSSANNCTFEYVSQPFLMDLEGKQGNFKNLREFVFKNIDGYFKIYSKHTPINLVRDLPQGFSALEPLVDLPIGINITRFQTLLALHRSYLTPGDSSSGWTAGAAAYYVGYLQPRTFLLKYNENGTITDAVDCALDPLSETKCTLKSFTVEKGIYQTSNFRVQPTESIVRFPNITNLCPFGEVFNATRFASVYAWNRKRISNCVADYSVLYNSASFSTFKCYGVSPTKLNDLCFTNVYADSFVIRGDEVRQIAPGQTGKIADYNYKLPDDFTGCVIAWNSNNLDSKVGGNYNYLYRLFRKSNLKPFERDISTEIYQAGSTPCNGVEGFNCYFPLQSYGFQPTNGVGYQPYRVVVLSFELLHAPATVCGPKKSTNLVKNKCVNFNFNGLTGTGVLTESNKKFLPFQQFGRDIADTTDAVRDPQTLEILDITPCSFGGVSVITPGTNTSNQVAVLYQDVNCTEVPVAIHADQLTPTWRVYSTGSNVFQTRAGCLIGAEHVNNSYECDIPIGAGICASYQTQTNSPRRARSVASQSIIAYTMSLGAENSVAYSNNSIAIPTNFTISVTTEILPVSMTKTSVDCTMYICGDSTECSNLLLQYGSFCTQLNRALTGIAVEQDKNTQEVFAQVKQIYKTPPIKDFGGFNFSQILPDPSKPSKRSFIEDLLFNKVTLADAGFIKQYGDCLGDIAARDLICAQKFNGLTVLPPLLTDEMIAQYTSALLAGTITSGWTFGAGAALQIPFAMQMAYRFNGIGVTQNVLYENQKLIANQFNSAIGKIQDSLSSTASALGKLQDVVNQNAQALNTLVKQLSSNFGCISSVLNDILSRLDKVEAEVQIDCLITGRLQSLQTYVTQQLIRAAEIRASANLAATKMSECVLGQSKRVDFCGKGYHLMSFPQSAPHGVVFLHVTYVPAQEKNFTTAPAICHDGKAHFPREGVFVSNGTHWFVTQRNFYEPQIITTDNTFVSGNCDVVIGIVNNTVYDPLQPELDSFKEELDKYFKNHTSPDVDLGDISGINASVVNIQKEIDRLNEVAKNLNESLIDLQELGKYEQYIKGGSGYIPEAPRDGQAYVRKDGEWVLLSTFL

SEQ ID NO: 6441 - protein, 1241 aa, Artificial Sequence
  SARS-CoV-2/Guangdong/20SF028/2020__EPI_ISL_403936 spike protein (1-1211)(A972C_R995C) Foldon construct
MFVFLVLLPLVSSQCVNLTTRTQLPPAYTNSFTRGVYYPDKVFRSSVLYSTQDLFLPFFSNVTWFHAIHVSGTNGTKRFDNPVLPFNDGVYFASTEKSNIIRGWIFGTTLDSKTQSLLIVNNATNVVIKVCEFQFCNDPFLGVYYHKNNKSWMESEFRVYSSANNCTFEYVSQPFLMDLEGKQGNFKNLREFVFKNIDGYFKIYSKHTPINLVRDLPQGFSALEPLVDLPIGINITRFQTLLALHRSYLTPGDSSSGWTAGAAAYYVGYLQPRTFLLKYNENGTITDAVDCALDPLSETKCTLKSFTVEKGIYQTSNFRVQPTESIVRFPNITNLCPFGEVFNATRFASVYAWNRKRISNCVADYSVLYNSASFSTFKCYGVSPTKLNDLCFTNVYADSFVIRGDEVRQIAPGQTGKIADYNYKLPDDFTGCVIAWNSNNLDSKVGGNYNYLYRLFRKSNLKPFERDISTEIYQAGSTPCNGVEGFNCYFPLQSYGFQPTNGVGYQPYRVVVLSFELLHAPATVCGPKKSTNLVKNKCVNFNFNGLTGTGVLTESNKKFLPFQQFGRDIADTTDAVRDPQTLEILDITPCSFGGVSVITPGTNTSNQVAVLYQDVNCTEVPVAIHADQLTPTWRVYSTGSNVFQTRAGCLIGAEHVNNSYECDIPIGAGICASYQTQTNSPRRARSVASQSIIAYTMSLGAENSVAYSNNSIAIPTNFTISVTTEILPVSMTKTSVDCTMYICGDSTECSNLLLQYGSFCTQLNRALTGIAVEQDKNTQEVFAQVKQIYKTPPIKDFGGFNFSQILPDPSKPSKRSFIEDLLFNKVTLADAGFIKQYGDCLGDIAARDLICAQKFNGLTVLPPLLTDEMIAQYTSALLAGTITSGWTFGAGAALQIPFAMQMAYRFNGIGVTQNVLYENQKLIANQFNSAIGKIQDSLSSTASALGKLQDVVNQNAQALNTLVKQLSSNFGCISSVLNDILSRLDKVEAEVQIDCLITGRLQSLQTYVTQQLIRAAEIRASANLAATKMSECVLGQSKRVDFCGKGYHLMSFPQSAPHGVVFLHVTYVPAQEKNFTTAPAICHDGKAHFPREGVFVSNGTHWFVTQRNFYEPQIITTDNTFVSGNCDVVIGIVNNTVYDPLQPELDSFKEELDKYFKNHTSPDVDLGDISGINASVVNIQKEIDRLNEVAKNLNESLIDLQELGKYEQYIKGGSGYIPEAPRDGQAYVRKDGEWVLLSTFL

SEQ ID NO: 6442 - protein, 1241 aa, Artificial Sequence
  SARS-CoV-2/Shenzhen/SZTH-001/2020__EPI_ISL_406592 spike protein (1-1211)(A972C_R995C) Foldon construct
MFVFLVLLPLVSSQCVNLTTRTQLPPAYTNSFTRGVYYPDKVFRSSVLHSTQDLFLPFFSNVTWFHAIHVSGTNGTKRFDNPVLPFNDGVYFASTEKSNIIRGWIFGTTLDSKTQSLLIVNNATNVVIKVCEFQFCNDPFLGVYYHKNNKSWMESEFRVYSSANNCTFEYVSQPFLMDLEGKQGNFKNLREFVFKNIDGYFKIYSKHTPINLVRDLPQGFSALEPLVDLPIGINITRFQTLLALHRSYLTPGDSSSGWTAGAAAYYVGYLQPRTFLLKYNENGTITDAVDCALDPLSETKCTLKSFTVEKGIYQTSNFRVQPTESIVRFPNITNLCPFGEVFNATRFASVYAWNRKRISNCVADYSVLYNSASFSTFKCYGVSPTKLNDLCFTNVYADSFVIRGDEVRQIAPGQTGKIADYNYKLPDDFTGCVIAWNSNNLDSKVGGNYNYLYRLFRKSNLKPFERDISTEIYQAGSTPCNGVEGFNCYFPLQSYGFQPTNGVGYQPYRVVVLSFELLHAPATVCGPKKSTNLVKNKCVNFNFNGLTGTGVLTESNKKFLPFQQFGRDIADTTDAVRDPQTLEILDITPCSFGGVSVITPGTNTSNQVAVLYQDVNCTEVPVAIHADQLTPTWRVYSTGSNVFQTRAGCLIGAEHVNNSYECDIPIGAGICASYQTQTNSPRRARSVASQSIIAYTMSLGAENSVAYSNNSIAIPTNFTISVTTEILPVSMTKTSVDCTMYICGDSTECSNLLLQYGSFCTQLNRALTGIAVEQDKNTQEVFAQVKQIYKTPPIKDFGGFNFSQILPDPSKPSKRSFIEDLLFNKVTLADAGFIKQYGDCLGDIAARDLICAQKFNGLTVLPPLLTDEMIAQYTSALLAGTITSGWTFGAGAALQIPFAMQMAYRFNGIGVTQNVLYENQKLIANQFNSAIGKIQDSLSSTASALGKLQDVVNQNAQALNTLVKQLSSNFGCISSVLNDILSRLDKVEAEVQIDCLITGRLQSLQTYVTQQLIRAAEIRASANLAATKMSECVLGQSKRVDFCGKGYHLMSFPQSAPHGVVFLHVTYVPAQEKNFTTAPAICHDGKAHFPREGVFVSNGTHWFVTQRNFYEPQIITTDNTFVSGNCDVLIGIVNNTVYDPLQPELDSFKEELDKYFKNHTSPDVDLGDISGINASVVNIQKEIDRLNEVAKNLNESLIDLQELGKYEQYIKGGSGYIPEAPRDGQAYVRKDGEWVLLSTFL

SEQ ID NO: 6443 - protein, 1241 aa, Artificial Sequence
  SARS-CoV-2/Shenzhen/SZTH-004/2020__EPI_ISL_406595 spike protein (1-1211)(A972C_R995C) Foldon construct
MFVFLVLLPLVSSQCVNLTTRTQLPPAYTNSFTRGVYYPDKVFRSSVLHSTQDLFLPFFSNVTWFHAIHVSGTNGTKRFDNPVLPFNDGVYFASTEKSNIIRGWIFGTTLDSKTQSLLIVNNATNVVIKVCEFQFCNDPFLGVYYHKNNKSWMESEFRVYSSANNCTFEYVSQPFLMDLEGKQGNFKNLREFVFKNIDGYFKIYSKHTPINLVRDLPQGFSALEPLVDLPIGINITRFQTLLALHRSYLTPGDSSSGWTAGAAAYYVGYLQPRTFLLKYNENGTITDAVDCALDPLSETKCTLKSFTVEKGIYQTSNFRVQPTESIVRFPNITNLCPFGEVFNATRFASVYAWDRKRISNCVAYYSVLYNSASFSTFKCYGVSPTKLNDLCFTNVYADSFVIRGDEVRQIAPGQTGKIADYNYKLPDDFTGCVIAWNSNNLDSKVGGNYNYLYRLFRKSNLKPFERDISTEIYQAGSTPCNGVEGFNCYFPLQSYGFQPTNGVGYQPYRVVVLSFELLHAPATVCGPKKSTNLVKNKCVNFNFNGLTGTGVLTESNKKFLPFQQFGRDIADTTDAVRDPQTLEILDITPCSFGGVSVITPGTNTSNQVAVLYQDVNCTEVPVAIHADQLTPTWRVYSTGSNVFQTRAGCLIGAEHVNNSYECDIPIGAGICASYQTQTNSPRRARSVASQSIIAYTMSLGAENSVAYSNNSIAIPTNFTISVTTEILPVSMTKTSVDCTMYICGDSTECSNLLLQYGSFCTQLNRALTGIAVEQDKNTQEVFAQVKQIYKTPPIKDFGGFNFSQILPDPSKPSKRSFIEDLLFNKVTLADAGFIKQYGDCLGDIAARDLICAQKFNGLTVLPPLLTDEMIAQYTSALLAGTITSGWTFGAGAALQIPFAMQMAYRFNGIGVTQNVLYENQKLIANQFNSAIGKIQDSLSSTASALGKLQDVVNQNAQALNTLVKQLSSNFGCISSVLNDILSRLDKVEAEVQIDCLITGRLQSLQTYVTQQLIRAAEIRASANLAATKMSECVLGQSKRVDFCGKGYHLMSFPQSAPHGVVFLHVTYVPAQEKNFTTAPAICHDGKAHFPREGVFVSNGTHWFVTQRNFYEPQIITTDNTFVSGNCDVVIGIVNNTVYDPLQPELDSFKEELDKYFKNHTSPDVDLGDISGINASVVNIQKEIDRLNEVAKNLNESLIDLQELGKYEQYIKGGSGYIPEAPRDGQAYVRKDGEWVLLSTFL

SEQ ID NO: 6444 - protein, 1241 aa, Artificial Sequence
  SARS-CoV-2/France/IDF0372/2020__EPI_ISL_406596 spike protein (1-1211)(A972C_R995C) Foldon construct
MFVFLVLLPLVSSQCVNLTTRTQLPPAYTNSFTRGVYYPDKVFRSSVLHSTQDLFLPFFSNVTWFHAIHVSGTNGTKRFDNPVLPFNDGVYFASTEKSNIIRGWIFGTTLDSKTQSLLIVNNATNVVIKVCEFQFCNDPFLGVYYHKNNKSWMESEFRVYSSANNCTFEYVSQPFLMDLEGKQGNFKNLREFVFKNIDGYFKIYSKHTPINLVRDLPQGFSALEPLVDLPIGINITRFQTLLALHRSYLTPGDSSSGWTAGAAAYYVGYLQPRTFLLKYNENGTITDAVDCALDPLSETKCTLKSFTVEKGIYQTSNFRVQPTESIVRFPNITNLCPFGEVFNATRFASVYAWNRKRISNCVADYSFLYNSASFSTFKCYGVSPTKLNDLCFTNVYADSFVIRGDEVRQIAPGQTGKIADYNYKLPDDFTGCVIAWNSNNLDSKVGGNYNYLYRLFRKSNLKPFERDISTEIYQAGSTPCNGVEGFNCYFPLQSYGFQPTNGVGYQPYRVVVLSFELLHAPATVCGPKKSTNLVKNKCVNFNFNGLTGTGVLTESNKKFLPFQQFGRDIADTTDAVRDPQTLEILDITPCSFGGVSVITPGTNTSNQVAVLYQDVNCTEVPVAIHADQLTPTWRVYSTGSNVFQTRAGCLIGAEHVNNSYECDIPIGAGICASYQTQTNSPRRARSVASQSIIAYTMSLGAENSVAYSNNSIAIPTNFTISVTTEILPVSMTKTSVDCTMYICGDSTECSNLLLQYGSFCTQLNRALTGIAVEQDKNTQEVFAQVKQIYKTPPIKDFGGFNFSQILPDPSKPSKRSFIEDLLFNKVTLADAGFIKQYGDCLGDIAARDLICAQKFNGLTVLPPLLTDEMIAQYTSALLAGTITSGWTFGAGAALQIPFAMQMAYRFNGIGVTQNVLYENQKLIANQFNSAIGKIQDSLSSTASALGKLQDVVNQNAQALNTLVKQLSSNFGCISSVLNDILSRLDKVEAEVQIDCLITGRLQSLQTYVTQQLIRAAEIRASANLAATKMSECVLGQSKRVDFCGKGYHLMSFPQSAPHGVVFLHVTYVPAQEKNFTTAPAICHDGKAHFPREGVFVSNGTHWFVTQRNFYEPQIITTDNTFVSGNCDVVIGIVNNTVYDPLQPELDSFKEELDKYFKNHTSPDVDLGDISGINASVVNIQKEIDRLNEVAKNLNESLIDLQELGKYEQYIKGGSGYIPEAPRDGQAYVRKDGEWVLLSTFL

SEQ ID NO: 6445 - protein, 1241 aa, Artificial Sequence
  SARS-CoV-2/Australia/VIC01/2020__EPI_ISL_406844 spike protein (1-1211)(A972C_R995C) Foldon construct
MFVFLVLLPLVSSQCVNLTTRTQLPPAYTNSFTRGVYYPDKVFRSSVLHSTQDLFLPFFSNVTWFHAIHVSGTNGTKRFDNPVLPFNDGVYFASTEKSNIIRGWIFGTTLDSKTQSLLIVNNATNVVIKVCEFQFCNDPFLGVYYHKNNKSWMESEFRVYSSANNCTFEYVSQPFLMDLEGKQGNFKNLREFVFKNIDGYFKIYSKHTPINLVRDLPQGFSALEPLVDLPIGINITRFQTLLALHRRYLTPGDSSSGWTAGAAAYYVGYLQPRTFLLKYNENGTITDAVDCALDPLSETKCTLKSFTVEKGIYQTSNFRVQPTESIVRFPNITNLCPFGEVFNATRFASVYAWNRKRISNCVADYSVLYNSASFSTFKCYGVSPTKLNDLCFTNVYADSFVIRGDEVRQIAPGQTGKIADYNYKLPDDFTGCVIAWNSNNLDSKVGGNYNYLYRLFRKSNLKPFERDISTEIYQAGSTPCNGVEGFNCYFPLQSYGFQPTNGVGYQPYRVVVLSFELLHAPATVCGPKKSTNLVKNKCVNFNFNGLTGTGVLTESNKKFLPFQQFGRDIADTTDAVRDPQTLEILDITPCSFGGVSVITPGTNTSNQVAVLYQDVNCTEVPVAIHADQLTPTWRVYSTGSNVFQTRAGCLIGAEHVNNSYECDIPIGAGICASYQTQTNSPRRARSVASQSIIAYTMSLGAENSVAYSNNSIAIPTNFTISVTTEILPVSMTKTSVDCTMYICGDSTECSNLLLQYGSFCTQLNRALTGIAVEQDKNTQEVFAQVKQIYKTPPIKDFGGFNFSQILPDPSKPSKRSFIEDLLFNKVTLADAGFIKQYGDCLGDIAARDLICAQKFNGLTVLPPLLTDEMIAQYTSALLAGTITSGWTFGAGAALQIPFAMQMAYRFNGIGVTQNVLYENQKLIANQFNSAIGKIQDSLSSTASALGKLQDVVNQNAQALNTLVKQLSSNFGCISSVLNDILSRLDKVEAEVQIDCLITGRLQSLQTYVTQQLIRAAEIRASANLAATKMSECVLGQSKRVDFCGKGYHLMSFPQSAPHGVVFLHVTYVPAQEKNFTTAPAICHDGKAHFPREGVFVSNGTHWFVTQRNFYEPQIITTDNTFVSGNCDVVIGIVNNTVYDPLQPELDSFKEELDKYFKNHTSPDVDLGDISGINASVVNIQKEIDRLNEVAKNLNESLIDLQELGKYEQYIKGGSGYIPEAPRDGQAYVRKDGEWVLLSTFL

SEQ ID NO: 6446 - protein, 1241 aa, Artificial Sequence
  SARS-CoV-2/Germany/BavPat1/2020__EPI_ISL_406862 spike protein (1-1211)(A972C_R995C) Foldon construct
MFVFLVLLPLVSSQCVNLTTRTQLPPAYTNSFTRGVYYPDKVFRSSVLHSTQDLFLPFFSNVTWFHAIHVSGTNGTKRFDNPVLPFNDGVYFASTEKSNIIRGWIFGTTLDSKTQSLLIVNNATNVVIKVCEFQFCNDPFLGVYYHKNNKSWMESEFRVYSSANNCTFEYVSQPFLMDLEGKQGNFKNLREFVFKNIDGYFKIYSKHTPINLVRDLPQGFSALEPLVDLPIGINITRFQTLLALHRSYLTPGDSSSGWTAGAAAYYVGYLQPRTFLLKYNENGTITDAVDCALDPLSETKCTLKSFTVEKGIYQTSNFRVQPTESIVRFPNITNLCPFGEVFNATRFASVYAWNRKRISNCVADYSVLYNSASFSTFKCYGVSPTKLNDLCFTNVYADSFVIRGDEVRQIAPGQTGKIADYNYKLPDDFTGCVIAWNSNNLDSKVGGNYNYLYRLFRKSNLKPFERDISTEIYQAGSTPCNGVEGFNCYFPLQSYGFQPTNGVGYQPYRVVVLSFELLHAPATVCGPKKSTNLVKNKCVNFNFNGLTGTGVLTESNKKFLPFQQFGRDIADTTDAVRDPQTLEILDITPCSFGGVSVITPGTNTSNQVAVLYQGVNCTEVPVAIHADQLTPTWRVYSTGSNVFQTRAGCLIGAEHVNNSYECDIPIGAGICASYQTQTNSPRRARSVASQSIIAYTMSLGAENSVAYSNNSIAIPTNFTISVTTEILPVSMTKTSVDCTMYICGDSTECSNLLLQYGSFCTQLNRALTGIAVEQDKNTQEVFAQVKQIYKTPPIKDFGGFNFSQILPDPSKPSKRSFIEDLLFNKVTLADAGFIKQYGDCLGDIAARDLICAQKFNGLTVLPPLLTDEMIAQYTSALLAGTITSGWTFGAGAALQIPFAMQMAYRFNGIGVTQNVLYENQKLIANQFNSAIGKIQDSLSSTASALGKLQDVVNQNAQALNTLVKQLSSNFGCISSVLNDILSRLDKVEAEVQIDCLITGRLQSLQTYVTQQLIRAAEIRASANLAATKMSECVLGQSKRVDFCGKGYHLMSFPQSAPHGVVFLHVTYVPAQEKNFTTAPAICHDGKAHFPREGVFVSNGTHWFVTQRNFYEPQIITTDNTFVSGNCDVVIGIVNNTVYDPLQPELDSFKEELDKYFKNHTSPDVDLGDISGINASVVNIQKEIDRLNEVAKNLNESLIDLQELGKYEQYIKGGSGYIPEAPRDGQAYVRKDGEWVLLSTFL

SEQ ID NO: 6447 - protein, 1241 aa, Artificial Sequence
  SARS-CoV-2/Wuhan/HBCDC-HB-02/2020__EPI_ISL_412978 spike protein (1-1211)(A972C_R995C) Foldon construct
MFVFLVLLPLVSSQCVNLTTRTQLPPAYTNSFTRGVYYPDKVFRSSVLHSTQDLFLPFFSNVTWFHAIHVSGTNGTKRFDNPVLPFNDGVYFASTEKSNIIRGWIFGTTLDSKTQSLLIVNNATNVVIKVCEFQFCNDPFLGVYYHKNNKSWMESEFRVYSSANNCTFEYVSQPFLMDLEGKQGNFKNLREFVFKNIDGYFKIYSKHTPINLVRDLPQGFSALEPLVDLPIGINITRFQTLLALHRSYLTPGDSSSGWTAGAAAYYVGYLQPRTFLLKYNENGTITDAVDCALDPLSETKCTLKSFTVEKGIYQTSNFRVQPTESIVRFPNITNLCPFGEVFNATRFASVYAWNRKRISNCVADYSVLYNSASFSTFKCYGVSPTKLNDLCFTNVYADSFVIRGDEVRQIAPGQTGKIADYNYKLPDDFTGCVIAWNSNNLDSKVGGNYNYLYRLFRKSNLKPFERDISTEIYQAGSTPCNGVEGFNCYFPLQSYGFQPTNGVGYQPYRVVVLSFELLHAPATVCGPKKSTNLVKNKCVNFNFNGLTGTGVLTESNKKFLPFQQFGRDIADTTDAVRDPQTLEILDITPCSFGGVSVITPGTNTSNQVAVLYQDVNCTEVPVAIHADQLTPTWRVYSTGSNVFQTRAGCLIGAEHVNNSYECDIPIGAGICASYQTQTNSPRRARSVASQSIIAYTMSLGAENSVAYSNNSIAIPTNFTISVTTEILPVSMTKTSVDCTMYICGDSTECSNFLLQYGSFCTQLNRALTGIAVEQDKNTQEVFAQVKQIYKTPPIKDFGGFNFSQILPDPSKPSKRSFIEDLLFNKVTLADAGFIKQYGDCLGDIAARDLICAQKFNGLTVLPPLLTDEMIAQYTSALLAGTITSGWTFGAGAALQIPFAMQMAYRFNGIGVTQNVLYENQKLIANQFNSAIGKIQDSLSSTASALGKLQDVVNQNAQALNTLVKQLSSNFGCISSVLNDILSRLDKVEAEVQIDCLITGRLQSLQTYVTQQLIRAAEIRASANLAATKMSECVLGQSKRVDFCGKGYHLMSFPQSAPHGVVFLHVTYVPAQEKNFTTAPAICHDGKAHFPREGVFVSNGTHWFVTQRNFYEPQIITTDNTFVSGNCDVVIGIVNNTVYDPLQPELDSFKEELDKYFKNHTSPDVDLGDISGINASVVNIQKEIDRLNEVAKNLNESLIDLQELGKYEQYIKGGSGYIPEAPRDGQAYVRKDGEWVLLSTFL

SEQ ID NO: 6448 - protein, 1241 aa, Artificial Sequence
  SARS-CoV-2/Australia/QLD02/2020__EPI_ISL_407896 spike protein (1-1211)(A972C_R995C) Foldon construct
MFVFLVLLPLVSSQCVNLTTRTQLPPAYTNSFTRGVYYPDKVFRSSVLHSTQDLFLPFFSNVTWFHAIHVSGTNGTKRFDNPVLPFNDGVYFASTEKSNIIRGWIFGTTLDSKTQSLLIVNNATNVVIKVCEFQFCNDPFLGVYYHKNNKSWMESEFRVYSSANNCTFEYVSQPFLMDLEGKQGNFKNLREFVFKNIDGYFKIYSKHTPINLVRDLPQGFSALEPLVDLPIGINITRFQTLLALHRSYLTPGDSSSGWTAGAAAYYVGYLQPRTFLLKYNENGTITDAVDCALDPLSETKCTLKSFTVEKGIYQTSNFRVQPTESIVRFPNITNLCPFGEVFNATRFASVYAWNRKRISNCVADYSVLYNSASFSTFKCYGVSPTKLNDLCFTNVYADSFVIRGDEVRQIAPGQTGKIADYNYKLPDDFTGCVIAWNSNNLDSKVGGNYNYLYRLFRKSNLKPFERDISTEIYQAGSTPCNGVEGFNCYFPLQSYGFQPTNGVGYQPYRVVVLSFELLHAPATVCGPKKSTNLVKNKCVNFNFNGLTGTGVLTESNKKFLPFQQFGRDIADTTDAVRDPQTLEILDITPCSFGGVSVITPGTNTSNQVAVLYQDVNCTEVPVAIHADQLTPTWRVYSTGSNVFQTRAGCLIGAEHVNNSYECDIPIGAGICASYQTQTNSPRRARSVASQSIIAYTMSLGAENSVAYSNNSIAIPTNFTISVTTEILPVSMTKTSVDCTMYICGDSTECSNLLLQYGSFCTQLNRALTGIAVEQDKNTQEVFAQVKQIYKTPPIKDFGGFNFSQILPDPSKPSKRSFIEDLLFNKVTLADAGFIKQYGDCLGDIAARDLICAQKFNGLTVLPPLLTDEMIAQYTSALLAGTITSGWTFGAGAALQIPFAMQMAYRFNGIGVTQNVLYENQKLIANQFNSAIGKIQDSLSSTASALGKLQDVVNQNAQALNTLVKQLSSNFGCISSVLNDILSRLDKVEAEVQIDCLITGRLQSLQTYVTQQLIRAAEIRASANLAATKMSECVLGQSKRVDFCGKGYHLMSFPQSAPHGVVFLHVTYVPAQEKNFTTAPAICHDGKAHFPREGVFVSNGTHWFVTQRNFYEPQIITTDNTFVSGNCDVVIGIVNNTVYDPLQLELDSFKEELDKYFKNHTSPDVDLGDISGINASVVNIQKEIDRLNEVAKNLNESLIDLQELGKYEQYIKGGSGYIPEAPRDGQAYVRKDGEWVLLSTFL

SEQ ID NO: 6449 - protein, 1241 aa, Artificial Sequence
  SARS-CoV-2/India/1-31/2020__EPI_ISL_413523 spike protein (1-1211)(A972C_R995C) Foldon construct
MFVFLVLLPLVSSQCVNLTTRTQLPPAYTNSFTRGVYYPDKVFRSSVLHSTQDLFLPFFSNVTWFHAIHVSGTNGTKRFDNPVLPFNDGVYFASTEKSNIIRGWIFGTTLDSKTQSLLIVNNATNVVIKVCEFQFCNDPFLGVYYHKNNKSWMESEFRVYSSANNCTFEYVSQPFLMDLEGKQGNFKNLREFVFKNIDGYFKIYSKHTPINLVRDLPQGFSALEPLVDLPIGINITRFQTLLALHRSYLTPGDSSSGWTAGAAAYYVGYLQPRTFLLKYNENGTITDAVDCALDPLSETKCTLKSFTVEKGIYQTSNFRVQPTESIVRFPNITNLCPFGEVFNATRFASVYAWNRKRISNCVADYSVLYNSASFSTFKCYGVSPTKLNDLCFTNVYADSFVIRGDEVRQIAPGQTGKIADYNYKLPDDFTGCVIAWNSNNLDSKVGGNYNYLYRLFRKSNLKPFERDISTEIYQAGSTPCNGVEGFNCYFPLQSYGFQPTNGVGYQPYRVVVLSFELLHAPATVCGPKKSTNLVKNKCVNFNFNGLTGTGVLTESNKKFLPFQQFGRDIADTTDAVRDPQTLEILDITPCSFGGVSVITPGTNTSNQVAVLYQDVNCTEVPVAIHADQLTPTWRVYSTGSNVFQTRAGCLIGAEHVNNSYECDIPIGAGICASYQTQTNSPRRARSVASQSIIAYTMSLGAENSVAYSNNSIAIPTNFTISVTTEILPVSMTKTSVDCTMYICGDSTECSNLLLQYGSFCTQLNRALTGIAVEQDKNTQEVFAQVKQIYKTPPIKDFGGFNFSQILPDPSKPSKRSFIEDLLFNKVTLADAGFIKQYGDCLGDIAARDLICAQKFNGLTVLPPLLTDEMIAQYTSALLAGTITSGWTFGAGAALQIPFAMQMAYRFNGIGVTQNVLYENQKLIANQFNSVIGKIQDSLSSTASALGKLQDVVNQNAQALNTLVKQLSSNFGCISSVLNDILSRLDKVEAEVQIDCLITGRLQSLQTYVTQQLIRAAEIRASANLAATKMSECVLGQSKRVDFCGKGYHLMSFPQSAPHGVVFLHVTYVPAQEKNFTTAPAICHDGKAHFPREGVFVSNGTHWFVTQRNFYEPQIITTDNTFVSGNCDVVIGIVNNTVYDPLQPELDSFKEELDKYFKNHTSPDVDLGDISGINASVVNIQKEIDRLNEVAKNLNESLIDLQELGKYEQYIKGGSGYIPEAPRDGQAYVRKDGEWVLLSTFL

SEQ ID NO: 6450 - protein, 1241 aa, Artificial Sequence
  SARS-CoV-2/Guangdong/GD2020087-P0008/2020__EPI_ISL_413863 spike protein (1-1211)(A972C_R995C) Foldon construct
MFVFLVLLPLVSSQCVNLTTRTQLPPAYTNSFTRGVYYPDKVFRSSVLHSTQDLFLPFFSNVTWFHAIHVSGTNGTKRFDNPVLPFNDGVYFASTEKSNIIRGWIFGTTLDSKTQSLLIVNNATNVVIKVCEFQFCNDPFLGVYYHKNNKSWMESEFRVYSSANNCTFEYVSQPFLMDLEGKQGNFKNLREFVFKNIDGYFKIYSKHTPINLVRDLPQGFSALEPLVDLPIGINITRFQTLLALHRSYLTPGDSSSGWTAGAAAYYVGYLQPRTFLLKYNENGTITDAVDCALDPLSETKCTLKSFTVEKGIYQTSNFRVQPTESIVRFPNITNLCPFGEVFNATRFASVYAWNRKRISNCVADYSVLYNSASFSTFKCYGVSPTKLNDLCFTNVYADSFVIRGDEVREIAPGQTGKIADYNYKLPDDFTGCVIAWNSNNLDSKVGGNYNYLYRLFRKSNLKPFERDISTEIYQAGSTPCNGVEGFNCYFPLQSYGFQPTNGVGYQPYRVVVLSFELLHAPATVCGPKKSTNLVKNKCVNFNFNGLTGTGVLTESNKKFLPFQQFGRDIADTTDAVRDPQTLEILDITPCSFGGVSVITPGTNTSNQVAVLYQDVNCTEVPVAIHADQLTPTWRVYSTGSNVFQTRAGCLIGAEHVNNSYECDIPIGAGICASYQTQTNSPRRARSVASQSIIAYTMSLGAENSVAYSNNSIAIPTNFTISVTTEILPVSMTKTSVDCTMYICGDSTECSNLLLQYGSFCTQLNRALTGIAVEQDKNTQEVFAQVKQIYKTPPIKDFGGFNFSQILPDPSKPSKRSFIEDLLFNKVTLADAGFIKQYGDCLGDIAARDLICAQKFNGLTVLPPLLTDEMIAQYTSALLAGTITSGWTFGAGAALQIPFAMQMAYRFNGIGVTQNVLYENQKLIANQFNSAIGKIQDSLSSTASALGKLQDVVNQNAQALNTLVKQLSSNFGCISSVLNDILSRLDKVEAEVQIDCLITGRLQSLQTYVTQQLIRAAEIRASANLAATKMSECVLGQSKRVDFCGKGYHLMSFPQSAPHGVVFLHVTYVPAQEKNFTTAPAICHDGKAHFPREGVFVSNGTHWFVTQRNFYEPQIITTDNTFVSGNCDVVIGIVNNTVYDPLQPELDSFKEELDKYFKNHTSPDVDLGDISGINASVVNIQKEIDRLNEVAKNLNESLIDLQELGKYEQYIKGGSGYIPEAPRDGQAYVRKDGEWVLLSTFL

SEQ ID NO: 6451 - protein, 1241 aa, Artificial Sequence
  SARS-CoV-2/Sweden/01/2020__EPI_ISL_411951 spike protein (1-1211)(A972C_R995C) Foldon construct
MFVFLVLLPLVSSQCVNLTTRTQLPPAYTNSFTRGVYYPDKVFRSSVLHSTQDLFLPFFSNVTWFHAIHVSGTNGTKRFDNPVLPFNDGVYFASTEKSNIIRGWIFGTTLDSKTQSLLIVNNATNVVIKVCEFQFCNDPFLGVYYHKNNKSWMESEFRVYSSANNCTFEYVSQPFLMDLEGKQGNFKNLREFVFKNIDGYFKIYSKHTPINLVRDLPQGFSALEPLVDLPIGINITRFQTLLALHRSYLTPGDSSSGWTAGAAAYYVGYLQPRTFLLKYNENGTITDAVDCALDPLSETKCTLKSFTVEKGIYQTSNFRVQPTESIVRFPNITNLCPFGEVFNATRFASVYAWNRKRISNCVADYSVLYNSASFSTFKCYGVSPTKLNDLCFTNVYADSFVIRGDEVRQIAPGQTGKIADYNYKLPDDFTGCVIAWNSNNLDSKVGGNYNYLYRLFRKSNLKPFERDISTEIYQAGSTPCNGVEGFNCYFPLQSYGFQPTNGVGYQPYRVVVLSFELLHAPATVCGPKKSTNLVKNKCVNFNFNGLTGTGVLTESNKKFLPFQQFGRDIADTTDAVRDPQTLEILDITPCSFGGVSVITPGTNTSNQVAVLYQDVNCTEVPVAIHADQLTPTWRVYSTGSNVFQTRAGCLIGAEHVNNSYECDIPIGAGICASYQTQTNSPRRARSVASQSIIAYTMSLGAENSVAYSNNSIAIPTNFTISVTTEILPVSMTKTSVDCTMYICGDSTECSNLLLQYGSFCTQLNRALTGIAVEQDKNTQEVFAQVKQIYKTPPIKDCGGFNFSQILPDPSKPSKRSFIEDLLFNKVTLADAGFIKQYGDCLGDIAARDLICAQKFNGLTVLPPLLTDEMIAQYTSALLAGTITSGWTFGAGAALQIPFAMQMAYRFNGIGVTQNVLYENQKLIANQFNSAIGKIQDSLSSTASALGKLQDVVNQNAQALNTLVKQLSSNFGCISSVLNDILSRLDKVEAEVQIDCLITGRLQSLQTYVTQQLIRAAEIRASANLAATKMSECVLGQSKRVDFCGKGYHLMSFPQSAPHGVVFLHVTYVPAQEKNFTTAPAICHDGKAHFPREGVFVSNGTHWFVTQRNFYEPQIITTDNTFVSGNCDVVIGIVNNTVYDPLQPELDSFKEELDKYFKNHTSPDVDLGDISGINASVVNIQKEIDRLNEVAKNLNESLIDLQELGKYEQYIKGGSGYIPEAPRDGQAYVRKDGEWVLLSTFL

SEQ ID NO: 6452 - protein, 1241 aa, Artificial Sequence
  SARS-CoV-2/Tianmen/HBCDC-HB-07/2020__EPI_ISL_412983 spike protein (1-1211)(A972C_R995C) Foldon construct
MFVFLVLLPLVSSQCVNLTTRTQLPPAYTNSFTRGVYYPDKVFRSSVLHSTQDLFLPFFSNVTWFHAIHVSGTNGTKRFDNPVLPFNDGVYFASTEKSNIIRGWIFGTTLDSKTQSLLIVNNATNVVIKVCEFQFCNDPFLGVYYHKNNKSWMESEFRVYSSANNCTFEYVSQPFLMDLEGKQGNFKNLREFVFKNIDGYFKIYSKHTPINLVRDLPQGFSALEPLVDLPIGINITRFQTLLALHRSYLTPGDSSSGWTAGAAAYYVGYLQPRTFLLKYNENGTITDAVDCALDPLSETKCTLKSFTVEKGIYQTSNFRVQPTESIVRFPNITNLCPFGEVFNATRFASVYAWNRKRISNCVADYSVLYNSASFSTFKCYGVSPTKLNDLCFTNVYADSFVIRGDEVRQIAPGQTGKIADYNYKLPDDFTGCVIAWNSNNLDSKVGGNYNYLYRLFRKSNLKPFERDISTEIYQAGSTPCNGVEGFNCYFPLQSYGFQPTNGVGYQPYRVVVLSFELLHAPATVCGPKKSTNLVKNKCVNFNFNGLTGTGVLTESNKKFLPFQQFGRDIADTTDAVRDPQTLEILDITPCSFGGVSVITPGTNTSNQVAVLYQDLNCTEVPVAIHADQLTPTWRVYSTGSNVFQTRAGCLIGAEHVNNSYECDIPIGAGICASYQTQTNSPRRARSVASQSIIAYTMSLGAENSVAYSNNSIAIPTNFTISVTTEILPVSMTKTSVDCTMYICGDSTECSNLLLQYGSFCTQLNRALTGIAVEQDKNTQEVFAQVKQIYKTPPIKDFGGFNFSQILPDPSKPSKRSFIEDLLFNKVTLADAGFIKQYGDCLGDIAARDLICAQKFNGLTVLPPLLTDEMIAQYTSALLAGTITSGWTFGAGAALQIPFAMQMAYRFNGIGVTQNVLYENQKLIANQFNSAIGKIQDSLSSTASALGKLQDVVNQNAQALNTLVKQLSSNFGCISSVLNDILSRLDKVEAEVQIDCLITGRLQSLQTYVTQQLIRAAEIRASANLAATKMSECVLGQSKRVDFCGKGYHLMSFPQSAPHGVVFLHVTYVPAQEKNFTTAPAICHDGKAHFPREGVFVSNGTHWFVTQRNFYEPQIITTDNTFVSGNCDVVIGIVNNTVYDPLQPELDSFKEELDKYFKNHTSPDVDLGDISGINASVVNIQKEIDRLNEVAKNLNESLIDLQELGKYEQYIKGGSGYIPEAPRDGQAYVRKDGEWVLLSTFL

SEQ ID NO: 6453 - protein, 1241 aa, Artificial Sequence
  SARS-CoV-2/Hong Kong/case42_VM20002493/2020__EPI_ISL_414527 spike protein (1-1211)(A972C_R995C) Foldon construct
MFVFLVLLPLVSSQCVNLTTRTQLPPAYTNSFTRGVYYPDKVFRSSVLHSTQDLFLPFFSNVTWFHAIHVSGTNGTKRFDNPVLPFNDGVYFASTEKSNIIRGWIFGTTLDSKTQSLLIVNNATNVVIKVCEFQFCNDPFLGVYYHKNNKSWMESEFRVYSSANNCTFEYVSQPFLMDLEGKQGNFKNLREFVFKNIDGYFKIYSKHTPINLVRDLPQGFSALEPLVDLPIGINITRFQTLLALHRSYLTPGDSSSGWTAGAAAYYVGYLQPRTFLLKYNENGTITDAVDCALDPLSETKCTLKSFTVEKGIYQTSNFRVQPTESIVRFPNITNLCPFGEVFNATRFASVYAWNRKRISNCVADYSVLYNSASFSTFKCYGVSPTKLNDLCFTNVYADSFVIRGDEVRQIAPGQTGKIADYNYKLPDDFTGCVIAWNSNNLDSKVGGNYNYLYRLFRKSNLKPFERDISTEIYQAGSTPCNGVEGFNCYFPLQSYGFQPTNGVGYQPYRVVVLSFELLHAPATVCGPKKSTNLVKNKCVNFNFNGLTGTGVLTESNKKFLPFQQFGRDIADTTDAVRDPQTLEILDITPCSFGGVSVITPGTNTSNQVAVLYQDVNCTEVPVAIHADQLTPTWRVYSTGSNVFQTRAGCLIGAEHVNNSYECDIPIGAGICASYQTQTNSPRRARSVASQSIIAYTMSLGAENSVAYSNNSIAIPTNFAISVTTEILPVSMTKTSVDCTMYICGDSTECSNLLLQYGSFCTQLNRALTGIAVEQDKNTQEVFAQVKQIYKTPPIKDFGGFNFSQILPDPSKPSKRSFIEDLLFNKVTLADAGFIKQYGDCLGDIAARDLICAQKFNGLTVLPPLLTDEMIAQYTSALLAGTITSGWTFGAGAALQIPFAMQMAYRFNGIGVTQNVLYENQKLIANQFNSAIGKIQDSLSSTASALGKLQDVVNQNAQALNTLVKQLSSNFGCISSVLNDILSRLDKVEAEVQIDCLITGRLQSLQTYVTQQLIRAAEIRASANLAATKMSECVLGQSKRVDFCGKGYHLMSFPQSAPHGVVFLHVTYVPAQEKNFTTAPAICHDGKAHFPREGVFVSNGTHWFVTQRNFYEPQIITTDNTFVSGNCDVVIGIVNNTVYDPLQPELDSFKEELDKYFKNHTSPDVDLGDISGINASVVNIQKEIDRLNEVAKNLNESLIDLQELGKYEQYIKGGSGYIPEAPRDGQAYVRKDGEWVLLSTFL

SEQ ID NO: 6454 - protein, 1241 aa, Artificial Sequence
  SARS-CoV-2/USA/CruiseA-23/2020__EPI_ISL_414482 spike protein (1-1211)(A972C_R995C) Foldon construct
MFVFLVLLPLVSSQCVNLTTRTQLPPAYTNSFTRGVYYPDKVFRSSVLHSTQDLFLPFFSNVTWFHAIHVSGTNGTKRFDNPVLPFNDGVYFASTEKSNIIRGWIFGTTLDSKTQSLLIVNNATNVVIKVCEFQFCNDPFLGVYYHKNNKSWMESEFRVYSSANNCTFEYVSQPFLMDLEVKQGNFKNLREFVFKNIDGYFKIYSKHTPINLVRDLPQGFSALEPLVDLPIGINITRFQTLLALHRSYLTPGDSSSGWTAGAAAYYVGYLQPRTFLLKYNENGTITDAVDCALDPLSETKCTLKSFTVEKGIYQTSNFRVQPTESIVRFPNITNLCPFGEVFNATRFASVYAWNRKRISNCVADYSVLYNSASFSTFKCYGVSPTKLNDLCFTNVYADSFVIRGDEVRQIAPGQTGKIADYNYKLPDDFTGCVIAWNSNNLDSKVGGNYNYLYRLFRKSNLKPFERDISTEIYQAGSTPCNGVEGFNCYFPLQSYGFQPTNGVGYQPYRVVVLSFELLHAPATVCGPKKSTNLVKNKCVNFNFNGLTGTGVLTESNKKFLPFQQFGRDIADTTDAVRDPQTLEILDITPCSFGGVSVITPGTNTSNQVAVLYQDVNCTEVPVAIHADQLTPTWRVYSTGSNVFQTRAGCLIGAEHVNNSYECDIPIGAGICASYQTQTNSPRRARSVASQSIIAYTMSLGAENSVAYSNNSIAIPTNFTISVTTEILPVSMTKTSVDCTMYICGDSTECSNLLLQYGSFCTQLNRALTGIAVEQDKNTQEVFAQVKQIYKTPPIKDFGGFNFSQILPDPSKPSKRSFIEDLLFNKVTLADAGFIKQYGDCLGDIAARDLICAQKFNGLTVLPPLLTDEMIAQYTSALLAGTITSGWTFGAGAALQIPFAMQMAYRFNGIGVTQNVLYENQKLIANQFNSAIGKIQDSLSSTASALGKLQDVVNQNAQALNTLVKQLSSNFGCISSVLNDILSRLDKVEAEVQIDCLITGRLQSLQTYVTQQLIRAAEIRASANLAATKMSECVLGQSKRVDFCGKGYHLMSFPQSAPHGVVFLHVTYVPAQEKNFTTAPAICHDGKAHFPREGVFVSNGTHWFVTQRNFYEPQIITTDNTFVSGNCDVVIGIVNNTVYDPLQPELDSFKEELDKYFKNHTSPDVDLGDISGINASVVNIQKEIDRLNEVAKNLNESLIDLQELGKYEQYIKGGSGYIPEAPRDGQAYVRKDGEWVLLSTFL

SEQ ID NO: 6455 - protein, 1241 aa, Artificial Sequence
  SARS-CoV-2/Hong Kong/case85_VM20002868/2020__EPI_ISL_414519 spike protein (1-1211)(A972C_R995C) Foldon construct
MFVFLVLVPLVSSQCVNLTTRTQLPPAYTNSFTRGVYYPDKVFRSSVLHSTQDLFLPFFSNVTWFHAIHVSGTNGTKRFDNPVLPFNDGVYFASTEKSNIIRGWIFGTTLDSKTQSLLIVNNATNVVIKVCEFQFCNDPFLGVYYHKNNKSWMESEFRVYSSANNCTFEYVSQPFLMDLEGKQGNFKNLREFVFKNIDGYFKIYSKHTPINLVRDLPQGFSALEPLVDLPIGINITRFQTLLALHRSYLTPGDSSSGWTAGAAAYYVGYLQPRTFLLKYNENGTITDAVDCALDPLSETKCTLKSFTVEKGIYQTSNFRVQPTESIVRFPNITNLCPFGEVFNATRFASVYAWNRKRISNCVADYSVLYNSASFSTFKCYGVSPTKLNDLCFTNVYADSFVIRGDEVRQIAPGQTGKIADYNYKLPDDFTGCVIAWNSNNLDSKVGGNYNYLYRLFRKSNLKPFERDISTEIYQAGSTPCNGVEGFNCYFPLQSYGFQPTNGVGYQPYRVVVLSFELLHAPATVCGPKKSTNLVKNKCVNFNFNGLTGTGVLTESNKKFLPFQQFGRDIADTTDAVRDPQTLEILDITPCSFGGVSVITPGTNTSNQVAVLYQDVNCTEVPVAIHADQLTPTWRVYSTGSNVFQTRAGCLIGAEHVNNSYECDIPIGAGICASYQTQTNSPRRARSVASQSIIAYTMSLGAENSVAYSNNSIAIPTNFTISVTTEILPVSMTKTSVDCTMYICGDSTECSNLLLQYGSFCTQLNRALTGIAVEQDKNTQEVFAQVKQIYKTPPIKDFGGFNFSQILPDPSKPSKRSFIEDLLFNKVTLADAGFIKQYGDCLGDIAARDLICAQKFNGLTVLPPLLTDEMIAQYTSALLAGTITSGWTFGAGAALQIPFAMQMAYRFNGIGVTQNVLYENQKLIANQFNSAIGKIQDSLSSTASALGKLQDVVNQNAQALNTLVKQLSSNFGCISSVLNDILSRLDKVEAEVQIDCLITGRLQSLQTYVTQQLIRAAEIRASANLAATKMSECVLGQSKRVDFCGKGYHLMSFPQSAPHGVVFLHVTYVPAQEKNFTTAPAICHDGKAHFPREGVFVSNGTHWFVTQRNFYEPQIITTDNTFVSGNCDVVIGIVNNTVYDPLQPELDSFKEELDKYFKNHTSPDVDLGDISGINASVVNIQKEIDRLNEVAKNLNESLIDLQELGKYEQYIKGGSGYIPEAPRDGQAYVRKDGEWVLLSTFL

SEQ ID NO: 6456 - protein, 1241 aa, Artificial Sequence; identical to SEQ ID NO: 6446
  SARS-CoV-2/England/200990660/2020__EPI_ISL_414523 spike protein (1-1211)(A972C_R995C) Foldon construct

SEQ ID NO: 6457 - protein, 1241 aa, Artificial Sequence
  SARS-CoV-2/Australia/NSW09/2020__EPI_ISL_413595 spike protein (1-1211)(A972C_R995C) Foldon construct
MFVFLVLLPLVSSQCVNLTTRTQLPPAYTNSFTRGVYYPDKVFRSSVLHSTQDLFLPFFSNVTWFHAIHVSGTNGTKRFDNPVLPFNDGVYFASTEKSNIIRGWIFGTTLDSKTQSLLIVNNATNVVIKVCEFQFCNDPFLGVYYHKNNKSWMESEFRVYSSANNCTFEYVSQPFLMDLEGKQGNFKNLREFVFKNIDGYFKIYSKHTPINLVRDLPQGFSALEPLVDLPIGINITRFQTLLALHRSYLTPGDSSSGWTAGAAAYYVGYLQPRTFLLKYNENGTITDAVDCALDPLSETKCTLKSFTVEKGIYQTSNFRVQPTESIVRFPNITNLCPFGEVFNATRFASVYAWNRKRISNCVADYSVLYNSASFSTFKCYGVSPTKLNDLCFTNVYADSFVIRGDEVRQIAPGQTGKIADYNYKLPDDFTGCVIAWNSNNLDSKVGGNYNYLYRLFRKSNLKPFERDISTEIYQAGSTPCNGVEGFNCYFPLQSYGFQPTNGVGYQPYRVVVLSFELLHAPATVCGPKKSTNLVKNKCVNFNFNGLTGTGVLTESNKKFLPFQQFGRDIADTTDAVRDPQTLEILDITPCSFGGVSVITPGTNTSNQVAVLYQDVNCTEVPVAIHADQLTPTWRVYSTGSNVFQTRAGCLIGAEHVNNSYECDIPIGAGICASYQTQTNSPRRARSVASQSIIAYTMSLGAENSVAYSNNSIAIPTNFTISVTTEILPVSMTKTSVDCTMYICGDSTECSNLLLQYGSFCTQLNRALTGIAVEQDKNTQEVFAQVKQIYKTPPIKDFGGFNFSQILPDPSKPSKRSFIEDLLFNKVTLADAGFIKQYGDCLGDIAARDLICAQKFNGLTVLPPLLTDEMIAQYTSALLAGTITSGWTFGAGAALQIPFAMQMAYRFNGIGVTQNVLYENQKLIANQFNSAIGKIQDSLSFTASALGKLQDVVNQNAQALNTLVKQLSSNFGCISSVLNDILSRLDKVEAEVQIDCLITGRLQSLQTYVTQQLIRAAEIRASANLAATKMSECVLGQSKRVDFCGKGYHLMSFPQSAPHGVVFLHVTYVPAQEKNFTTAPAICHDGKAHFPREGVFVSNGTHWFVTQRNFYEPQIITTDNTFVSGNCDVVIGIVNNTVYDPLQPELDSFKEELDKYFKNHTSPDVDLGDISGINASVVNIQKEIDRLNEVAKNLNESLIDLQELGKYEQYIKGGSGYIPEAPRDGQAYVRKDGEWVLLSTFL

SEQ ID NO: 6458 - protein, 1241 aa, Artificial Sequence; identical to SEQ ID NO: 6438
  SARS-CoV-2/Australia/NSW10/2020__EPI_ISL_413596 spike protein (1-1211)(A972C_R995C) Foldon construct

SEQ ID NO: 6459 - protein, 1241 aa, Artificial Sequence
  SARS-CoV-2/Switzerland/1000477797/2020__EPI_ISL_413023 spike protein (1-1211)(A972C_R995C) Foldon construct
MFVFLVLLPLVSSQCVNLTTRTQLPPAYTNSFTRGVYYPDKVFRSSVLHSTQDLFLPFFSNVTWFHAIHVSGTNGTKRFDNPVLPFNDGVYFASTEKSNIIRGWIFGTTLDSKTQSLLIVNNATNVVIKVCEFQFCNDPFLGVYYHKNNKSWMESEFRVYSSANNCTFEYVSQPFLMDLEGKQGNFKNLREFVFKNIDGYFNIYSKHTPINLVRDLPQGFSALEPLVDLPIGINITRFQTLLALHRSYLTPGDSSSGWTAGAAAYYVGYLQPRTFLLKYNENGTITDAVDCALDPLSETKCTLKSFTVEKGIYQTSNFRVQPTESIVRFPNITNLCPFGEVFNATRFASVYAWNRKRISNCVADYSVLYNSASFSTFKCYGVSPTKLNDLCFTNVYADSFVIRGDEVRQIAPGQTGKIADYNYKLPDDFTGCVIAWNSNNLDSKVGGNYNYLYRLFRKSNLKPFERDISTEIYQAGSTPCNGVEGFNCYFPLQSYGFQPTNGVGYQPYRVVVLSFELLHAPATVCGPKKSTNLVKNKCVNFNFNGLTGTGVLTESNKKFLPFQQFGRDIADTTDAVRDPQTLEILDITPCSFGGVSVITPGTNTSNQVAVLYQGVNCTEVPVAIHADQLTPTWRVYSTGSNVFQTRAGCLIGAEHVNNSYECDIPIGAGICASYQTQTNSPRRARSVASQSIIAYTMSLGAENSVAYSNNSIAIPTNFTISVTTEILPVSMTKTSVDCTMYICGDSTECSNLLLQYGSFCTQLNRALTGIAVEQDKNTQEVFAQVKQIYKTPPIKDFGGFNFSQILPDPSKPSKRSFIEDLLFNKVTLADAGFIKQYGDCLGDIAARDLICAQKFNGLTVLPPLLTDEMIAQYTSALLAGTITSGWTFGAGAALQIPFAMQMAYRFNGIGVTQNVLYENQKLIANQFNSAIGKIQDSLSSTASALGKLQDVVNQNAQALNTLVKQLSSNFGCISSVLNDILSRLDKVEAEVQIDCLITGRLQSLQTYVTQQLIRAAEIRASANLAATKMSECVLGQSKRVDFCGKGYHLMSFPQSAPHGVVFLHVTYVPAQEKNFTTAPAICHDGKAHFPREGVFVSNGTHWFVTQRNFYEPQIITTDNTFVSGNCDVVIGIVNNTVYDPLQPELDSFKEELDKYFKNHTSPDVDLGDISGINASVVNIQKEIDRLNEVAKNLNESLIDLQELGKYEQYIKGGSGYIPEAPRDGQAYVRKDGEWVLLSTFL

SEQ ID NO: 6460 - protein, 1241 aa, Artificial Sequence
  SARS-CoV-2/Belgium/BA-02291/2020__EPI_ISL_415159 spike protein (1-1211)(A972C_R995C) Foldon construct
MFVFLVLLPLVSSQCVNLTTRTQLPPAYTNSFTRGVYYPDKVFRSSVLHSTQDLFLPFFSNVTWFHAIHVSGTNGTKRFDNPVLPFNDGVYFASTEKSNIIRGWIFGTTLDSKTQSLLIVNNATNVVIKVCEFQFCNDPFLGVYYHKNNKSWMESEFRVYSSANNCTFEYVSQPFLMDLEGKQGNFKNLREFVFKNIDGYFKIYSKHTPINLVRDLPQGFSALEPLVDLPIGINITRFQTLLALHRSYLTPGDSSSGWTAGAAAYYVGYLQPRTFLLKYNENGTITDAVDCALDPLSETKCTLKSFTVEKGIYQTSNFRVQPTESIVRFPNITNLCPFGEVFNATRFASVYAWNRKRISNCVADYSVLYNSASFSTFKCYGVSPTKLNDLCFTNVYADSFVIRGDEVRQIAPGQTGKIADYNYKLPDDFTGCVIAWNSNNLDSKVGGNYNYLYRLFRRSNLKPFERDISTEIYQAGSTPCNGVEGFNCYFPLQSYGFQPTNGVGYQPYRVVVLSFELLPAPATVCGPKKSTNLVKNKCVNFNFNGLTGTGVLTESNKKFLPFQQFGRDIADTTDAVRDPQTLEILDITPCSFGGVSVITPGTNTSNQVAVLYQGVNCTEVPVAIHADQLTPTWRVYSTGSNVFQTRAGCLIGAEHVNNSYECDIPIGAGICASYQTQTNSPRRARSVASQSIIAYTMSLGAENSVAYSNNSIAIPTNFTISVTTEILPVSMTKTSVDCTMYICGDSTECSNLLLQYGSFCTQLNRALTGIAVEQDKNTQEVFAQVKQIYKTPPIKDFGGFNFSQILPDPSKPSKRSFIEDLLFNKVTLADAGFIKQYGDCLGDIAARDLICAQKFNGLTVLPPLLTDEMIAQYTSALLAGTITSGWTFGAGAALQIPFAMQMAYRFNGIGVTQNVLYENQKLIANQFNSAIGKIQDSLSSAAPALGKLQDVVNQNAQALNTLVKQLSSNFGCISSVLNDILSRLDKVEAEVQIDCLITGRLQSLQTYVTQQLIRAAEIRASANLAATKMSECVLGQSKRVDFCGKGYHLMSFPQSAPHGVVFLHVTYVPAQEKNFTTAPAICHDGKAHFPREGVFVSNGTHWFVTQRNFYEPQIITTDNTFVSGNCDVVIGIVNNTVYDPLQPELDSFKEELDKYFKNHTSPDVDLGDISGINASVVNIQKEIDRLNEVAKNLNESLIDLQELGKYEQYIKGGSGYIPEAPRDGQAYVRKDGEWVLLSTFL

SEQ ID NO: 6461 - protein, 1241 aa, Artificial Sequence
  SARS-CoV-2/USA/WA8-UW5/2020__EPI_ISL_413486 spike protein (1-1211)(A972C_R995C) Foldon construct
MFVFLVLLPLVSSQCVNLTTRTQLPPAYTNSFTRGVYYPDKVFRSSVLHSTQDLFLPFFSNVTWFHAIHVSGTNGTKRFDNPVLPFNDGVYFASTEKSNIIRGWIFGTTLDSKTQSLLIVNNATNVVIKVCEFQFCNDPFLGVYYHKNNKSWMESEFRVYSSANNCTFEYVSQPFLMDLEGKQGNFKNLREFVFKNIDGYFKIYSKHTPINLVRDLPQGFSALEPLVDLPIGINITRFQTLLALHRSYLTPGDSSSGWTAGAAAYYVGYLQPRTFLLKYNENGTITDAVDCALDPLSETKCTLKSFTVEKGIYQTSNFRVQPTESIVRFPNITNLCPFGEVFNATRFASVYAWNRKRISNCVADYSVLYNSASFSTFKCYGVSPTKLNDLCFTNVYADSFVIRGDEVRQIAPGQTGKIADYNYKLPDDFTGCVIAWNSNNLDSKVGGNYNYLYRLFRKSNLKPFERDISTEIYQAGSTPCNGVEGFNCYFPLQSYGFQPTNGVGYQPYRVVVLSFELLHAPATVCGPKKSTNLVKNKCVNFNFNGLTGTGVLTESNKKFLPFQQFGRDIADTTDAVRDPQTLEILDITPCSFGGVSVITPGTNTSNQVAVLYQDVNCTEVPVAIHADQLTPTWRVYSTGSNVFQTRAGCLIGAEYVNNSYECDIPIGAGICASYQTQTNSPRRARSVASQSIIAYTMSLGAENSVAYSNNSIAIPTNFTISVTTEILPVSMTKTSVDCTMYICGDSTECSNLLLQYGSFCTQLNRALTGIAVEQDKNTQEVFAQVKQIYKTPPIKDFGGFNFSQILPDPSKPSKRSFIEDLLFNKVTLADAGFIKQYGDCLGDIAARDLICAQKFNGLTVLPPLLTDEMIAQYTSALLAGTITSGWTFGAGAALQIPFAMQMAYRFNGIGVTQNVLYENQKLIANQFNSAIGKIQDSLSSTASALGKLQDVVNQNAQALNTLVKQLSSNFGCISSVLNDILSRLDKVEAEVQIDCLITGRLQSLQTYVTQQLIRAAEIRASANLAATKMSECVLGQSKRVDFCGKGYHLMSFPQSAPHGVVFLHVTYVPAQEKNFTTAPAICHDGKAHFPREGVFVSNGTHWFVTQRNFYEPQIITTDNTFVSGNCDVVIGIVNNTVYDPLQPELDSFKEELDKYFKNHTSPDVDLGDISGINASVVNIQKEIDRLNEVAKNLNESLIDLQELGKYEQYIKGGSGYIPEAPRDGQAYVRKDGEWVLLSTFL

SEQ ID NO: 6462 - protein, 1241 aa, Artificial Sequence
  SARS-CoV-2/England/20102000506/2020__EPI_ISL_415147 spike protein (1-1211)(A972C_R995C) Foldon construct
MFVFLVLLPLVSSQCVNLTTRTQLPPAYTNSFTRGVYYPDKVFRSSVLHSTQDLFLPFFSNVTWFHAIHVSGTNGTKRFDNPVLPFNDGVYFASTEKSNIIRGWIFGTTLDSKTQSLLIVNNATNVVIKVCEFQFCNDPFLGVYYHKNNKSWMESEFRVYSSANNCTFEYVSQPFLMDLEGKQGNFKNLREFVFKNIDGYFKIYSKHTPINLVRDLPQGFSALEPLVDLPIGINITRFQTLLALHRSYLTPGDSSSGWTAGAAAYYVGYLQPRTFLLKYNENGTITDAVDCALDPLSETKCTLKSFTVEKGIYQTSNFRVQPTESIVRFPNITNLCPFGEVFNATRFASVYAWNRKRISNCVADYSVLYNSASFSTFKCYGVSPTKLNDLCFTNVYADSFVIRGDEVRQIAPGQTGKIADYNYKLPDDFTGCVIAWNSNNLDSKVGGNYNYLYRLFRKSNLKPFERDISTEIYQAGSTPCNGVEGFNCYFPLQSYGFQPTNGVGYQPYRVVVLSFELLHAPATVCGPKKSTNLVKNKCVNFNFNGLTGTGVLTESNKKFLPFQQFGRDIADTTDAVRDPQTLEILDITPCSFGGVSVITPGTNTSNQVAVLYQGVNCTEVPVAIHADQLTPTWRVYSTGSNVFQTRAGCLIGAEHVNNSYECDIPIGAGICASYQTQTNSPRRARSVASQSIIAYTMSLGAENSVAYSNNSIAIPTNFTISVTTEILPVSMTKTSVDCTMYICGDSTECSNLLLQYGSFCTQLNRALTGIAVEQDKNTQEVFAQVKQIYKTPPIKDFGGFNFSQILPDPSKPSKRSFIEDLLFNKVTLADAGFIKQYGYCLGDIAARDLICAQKFNGLTVLPPLLTDEMIAQYTSALLAGTITSGWTFGAGAALQIPFAMQMAYRFNGIGVTQNVLYENQKLIANQFNSAIGKIQDSLSSTASALGKLQDVVNQNAQALNTLVKQLSSNFGCISSVLNDILSRLDKVEAEVQIDCLITGRLQSLQTYVTQQLIRAAEIRASANLAATKMSECVLGQSKRVDFCGKGYHLMSFPQSAPHGVVFLHVTYVPAQEKNFTTAPAICHDGKAHFPREGVFVSNGTHWFVTQRNFYEPQIITTDNTFVSGNCDVVIGIVNNTVYDPLQPELDSFKEELDKYFKNHTSPDVDLGDISGINASVVNIQKEIDRLNEVAKNLNESLIDLQELGKYEQYIKGGSGYIPEAPRDGQAYVRKDGEWVLLSTFL

SEQ ID NO: 6463 - protein, 1241 aa, Artificial Sequence
  SARS-CoV-2/Belgium/VAG-03013/2020__EPI_ISL_415155 spike protein (1-1211)(A972C_R995C) Foldon construct
MFVFLVLLPLVSSQCVNLTTRTQLPPAYTNSFTRGVYYPDKVFRSSVLHSTQDLFLPFFSNVTWFHAIHVSGTNGTKRFDNPVLPFNDGVYFASTEKSNIIRGWIFGTTLDSKTQSLLIVNNATNVVIKVCEFQFCNDPFLGVYYHKNNKSWMESEFRVYSSANNCTFEYVSQPFLMDLEGKQGNFKNLREFVFKNIDGYFKIYSKHTPINLVRDLPQGFSALEPLVDLPIGINITRFQTLLALHRSYLTPGDSSSGWTAGAAAYYVGYLQPRTFLLKYNENGTITDAVDCALDPLSETKCTLKSFTVEKGIYQTSNFRVQPTESIVRFPNITNLCPFGEVFNATRFASVYAWNRKRISNCVADYSVLYNSASFSTFKCYGVSPTKLNDLCFTNVYADSFVIRGDEVRQIAPGQTGKIADYNYKLPDDFTGCVIAWNSNNLDSKVGGNYNYLYRLFRKSNLKPFERDISTEIYQAGSTPCNGVEGFNCYFPLQSYGFQPTNGVGYQPYRVVVLSFELLHAPATVCGPKKSTNLVKNKCVNFNFNGLTGTGVLTESNKKFLPFQQFGRDIADTTDAVRDPQTLEILDITPCSFGGVSVITPGTNTSNQVAVLYQGVNCTEVPVAIHADQLTPTWRVYSTGSNVFQTRAGCLIGAEHVNNSYECDIPIGAGICASYQTQTNSPRRARSVASQSIIAYTMSLGAENSVAYSNNSIAIPTNFTISVTTEILPVSMTKTSVDCTMYICGDSTECSNLLLQYGSFCTQLNRALTGIAVEQDKNTQEVFAQVKQIYKTPPIKDFGGFNFSQILPDPSKPSKRSFIEDLLFNKVTLADAGFIKQYGDCLGDIAARDLICAQKFNGLTVLPPLLTDEMIAQYTSALLAGTITSGWTFGAGAALQIPFAMQMAYRFNGIGVTQNVLYENQKLIANQFNSAIGKIQDSLSSTATALGKLQDVVNQNAQALNTLVKQLSSNFGCISSVLNDILSRLDKVEAEVQIDCLITGRLQSLQTYVTQQLIRAAEIRASANLAATKMSECVLGQSKRVDFCGKGYHLMSFPQSAPHGVVFLHVTYVPAQEKNFTTAPAICHDGKAHFPREGVFVSNGTHWFVTQRNFYEPQIITTDNTFVSGNCDVVIGIVNNTVYDPLQPELDSFKEELDKYFKNHTSPDVDLGDISGINASVVNIQKEIDRLNEVAKNLNESLIDLQELGKYEQYIKGGSGYIPEAPRDGQAYVRKDGEWVLLSTFL

SEQ ID NO: 6464 - protein, 1241 aa, Artificial Sequence
  SARS-CoV-2/Belgium/BC-03016/2020__EPI_ISL_415157 spike protein (1-1211)(A972C_R995C) Foldon construct
MFVFLVLLPLVSSQCVNLTTRTQLPPAYTNSFTRGVYYPDKVFRSSVLHSTQDLFLPFFSNVTWFHAIHVSGTNGTKRFDNPVLPFNDGVYFASTEKSNIIRGWIFGTTLDSKTQSLLIVNNATNVVIKVCEFQFCNDPFLGVYYHKNNKSWMESEFRVYSSANNCTFEYVSQPFLMDLEGKQGNFKNLREFVFKNIDGYFKIYSKHTPINLVRDLPQGFSALEPLVDLPIGINITRFQTLLALHRSYLTPGDSSSGWTAGAAAYYVGYLQPRTFLLKYNENGTITDAVDCALDPLSETKCTLKSFTVEKGIYQTSNFRVQPTESIVRFPNITNLCPFGEVFNATRFASVYAWNRKRISNCVADYSVLYNSASFSTFKCYGVSPTKLNDLCFTNVYADSFVIRGDEVRQIAPGQTGKIADYNYKLPDDFTGCVIAWNSNNLDSKVGGNYNYLYRLFRKSNLKPFERDISTEIYQAGSTPCNGVEGFNCYFPLQSYGFQPTNGVGYQPYRVVVLSFELLHAPATVCGPKKSTNLVKNKCVNFNFNGLTGTGVLTESNKKFLPFQQFGRDIADTTDAVRDPQTLEILDITPCSFGGVSVITPGTNTSNQVAVLYQGVNCTEVPVAIHADQLTPTWRVYSTGSNVFQTRAGCLIGAEHVNNSYECDIPIGAGICASYQTQTNSPRRARSVASQSIIAYTMSLGAENSVAYSNNSIAIPTNFTISVTTEILPVSMTKTSVDCTMYICGDSTECSNLLLQYGSFCTQLNRALTGIAVEQDKNTQEVFAQVKQIYKTPPIKDFGGFNFSQILPDPSKPSKRSFIEDLLFNKVTLADAGFIKQYGDCLGDIAARDLICAQKFNGLTVLPPLLTDEMIAQYTSALLAGTITSGWTFGAGAALQIPFAMQMAYRFNGIGVTQNVLYENQKLIANQFNSAIGKIQDSLSSTAPALGKLQDVVNQNAQALNTLVKQLSSNFGCISSVLNDILSRLDKVEAEVQIDCLITGRLQSLQTYVTQQLIRAAEIRASANLAATKMSECVLGQSKRVDFCGKGYHLMSFPQSAPHGVVFLHVTYVPAQEKNFTTAPAICHDGKAHFPREGVFVSNGTHWFVTQRNFYEPQIITTDNTFVSGNCDVVIGIVNNTVYDPLQPELDSFKEELDKYFKNHTSPDVDLGDISGINASVVNIQKEIDRLNEVAKNLNESLIDLQELGKYEQYIKGGSGYIPEAPRDGQAYVRKDGEWVLLSTFL

SEQ ID NO: 6465 - protein, 1241 aa, Artificial Sequence
  SARS-CoV-2/Germany/BavPat3/2020__EPI_ISL_414521 spike protein (1-1211)(A972C_R995C) Foldon construct
MFVFLVLLPLVSSQCVNLTTRTQLPPAYTNSFTRGVYYPDKVFRSSVLHSTQDLFLPFFSNVTWFHAIHVSGTNGTKRFDNPVLPFNDGVYFASTEKSNIIRGWIFGTTLDSKTQSLLIVNNATNVVIKVCEFQFCNDPFLGVYYHKNNKSWMESEFRVYSSANNCTFEYVSQPFLMDLEGKQGNFKNLREFVFKNIDGYFKIYSKHTPINLVRDLPQGFSALEPLVDLPIGINITRFQTLLALHRSYLTPGDSSSGWTAGAAAYYVGYLQPRTFLLKYNENGTITDAVDCALDPLSETKCTLKSFTVEKGIYQTSNFRVQPTESIVRFPNITNLCPFGEVFNATRFASVYAWNRKRISNCVADYSVLYNSASFSTFKCYGVSPTKLNDLCFTNVYADSFVIRGDEVRQIAPGQTGKIADYNYKLPDDFTGCVIAWNSNNLDSKVGGNYNYLYRLFRKSNLKPFERDISTEIYQAGSTPCNGVEGFNCYFPLQSYGFQPTNGVGYQPYRVVVLSFELLHAPATVCGPKKSTNLVKNKCVNFNFNGLTGTGVLTESNKKFLPFQQFGRDIADTTDAVRDPQTLEILDITPCSFGGVSVITPGTNTSNQVAVLYQDVNCTEVPVAIHADQLTPTWRVYSTGSNVFQTRAGCLIGAEHVNNSYECDIPIGAGICASYQTQTNSPRRARSVASQSIIAYTMSLGAENSVAYSNNSIAIPTNFTISVTTEILPVSMTKTSVDCTMYICGDSTECSNLLLQYGSFCTQLNRALTGIAVEQDKNTQQVFAQVKQIYKTPPIKDFGGFNFSQILPDPSKPSKRSFIEDLLFNKVTLADAGFIKQYGDCLGDIAARDLICAQKFNGLTVLPPLLTDEMIAQYTSALLAGTITSGWTFGAGAALQIPFAMQMAYRFNGIGVTQNVLYENQKLIANQFNSAIGKIQDSLSSTASALGKLQDVVNQNAQALNTLVKQLSSNFGCISSVLNDILSRLDKVEAEVQIDCLITGRLQSLQTYVTQQLIRAAEIRASANLAATKMSECVLGQSKRVDFCGKGYHLMSFPQSAPHGVVFLHVTYVPAQEKNFTTAPAICHDGKAHFPREGVFVSNGTHWFVTQRNFYEPQIITTDNTFVSGNCDVVIGIVNNTVYDPLQPELDSFKEELDKYFKNHTSPDVDLGDISGINASVVNIQKEIDRLNEVAKNLNESLIDLQELGKYEQYIKGGSGYIPEAPRDGQAYVRKDGEWVLLSTFL

SEQ ID NO: 6466 - protein, 1241 aa, Artificial Sequence
  SARS-CoV-2/France/HF1805/2020__EPI_ISL_414628 spike protein (1-1211)(A972C_R995C) Foldon construct
MFVFLVLLPLVSSQCVNLTTRTQLPPAYTNSFTRGVYYPDKVFRSSVLHSTQDLFLPFFSNVTWFHAIHVSGTNGTKRFDNPVLPFNDGVYFASTEKSNIIRGWIFGTTLDSKTQSLLIVNNATNVVIKVCEFQFCNDPFLGVYYHKNNKSWMESEFRVYSSANNCTFEYVSQPFLMDLEGKQGNFKNLREFVFKNIDGYFKIYSKHTPINLVRDLPQGFSALEPLVDLPIGINITRFQTLLALHRSYLTPGDSSSGWTAGAAAYYVGYLQPRTFLLKYNENGTITDAVDCALDPLSETKCTLKSFTVEKGIYQTSNFRVQPTESIVRFPNITNLCPFGEVFNATRFASVYAWNRKRISNCVADYSVLYNSASFSTFKCYGVSPTKLNDLCFTNVYADSFVIRGDEVRQIAPGQTGKIADYNYKLPDDFTGCVIAWNSNNLDSKVGGNYNYLYRLFRKSNLKPFERDISTEIYQAGSTPCNGVEGFNCYFPLQSYGFQPTNGVGYQPYRVVVLSFELLHAPATVCGPKKSTNLVKNKCVNFNFNGLTGTGVLTESNKKFLPFQQFGRDIADTTDAVRDPQTLEILDITPCSFGGVSVITPGTNTSNQVAVLYQGVNCTEVPVAIHADQLTPTWRVYSTGSNVFQTRAGCLIGAEHVNNSYECDIPIGAGICASYQTQTNSPRRARSVASQSIIAYTMSLGAENSVAYSNNSIAIPTNFTISVTTEILPVSMTKTSVDCTMYICGDSTECSNLLLQYGSFCTQLNRALTGIAVEQDKNTQEVFAQVKQIYKTPPIKDFGGFNFSQILPDPSKPSKRSFIEDLLFNKVTLADAGFIKQYGDCLGDIAARDLICAQKFNGLTVLPPLLTDEMIAQYTSALLAGTITSGWTFGAGAALQIPFAMQMAYRFNGIGVTQNVLYENQKLIANQFNSAIGKIQDSLSSTASALGKLQDVVNQNAQALNTLVKQLSSNFGCISSVLNDILSRLDKVEAEVQIDCLITGRLQSLQTYVTQQLIRAAEIRASANLAATKMSECVLGQSKRVDFCGKGYHLMSFPQSAPHGVVFLHVTYVPAQEKNFTTAPAICHDGKAHFPREGVFVSNGTHWFVTQRNFYEPQIITTDNTFVSGNCDVVIGVVNNTVYDPLQPELDSFKEELDKYFKNHTSPDVDLGDISGINASVVNIQKEIDRLNEVAKNLNESLIDLQELGKYEQYIKGGSGYIPEAPRDGQAYVRKDGEWVLLSTFL

SEQ ID NO: 6467 - protein, 1241 aa, Artificial Sequence
  SARS-CoV-2/Netherlands/ZuidHolland_9/2020__EPI_ISL_414445 spike protein (1-1211)(A972C_R995C) Foldon construct
MFVFLVLLPLVSSQCVNLTTRTQLPPAYTNSFTRGVYYPDKVFRSSVLHSTQDLFLPFFSNVTWFHAIHVSGTNGTKRFDNPVLPFNDGVYFASTEKSNIIRGWIFGTTLDSKTQSLLIVNNATNVVIKVCEFQFCNDPFLGVYYHKNNKSWMESEFRVYSSANNCTFEYVSQPFLMDLEGKQGNFKNLREFVFKNIDGYFKIYSKHTPINLVRDLPQGFSALEPLVDLPIGINITRFQTLLALHRSYLTPGDSSSGWTAGAAAYYVGYLQPRTFLLKYNENGTITDAVDCALDPLSETKCTLKSFTVEKGIYQTSNFRVQPTESIVRFPNITNLCPFGEVFNATRFASVYAWNRKRISNCVADYSVLYNSASFSTFKCYGVSPTKLNDLCFTNVYADSFVIRGDEVRQIAPGQTGKIADYNYKLPDDFTGCVIAWNSNNLDSKVGGNYNYLYRLFRKSNLKPFERDISTEIYQAGSTPCNGVEGFNCYFPLQSYGFQPTNGVGYQPYRVVVLSFELLHAPATVCGPKKSTNLVKNKCVNFNFNGLTGTGVLTESNKKFLPFQQFGRDIADTTDAVRDPQTLEILDITPCSFGGVSVITPGTNTSNQVAVLYQGVNCTEVPVAIHADQLTPTWRVYSTGSNVFQTRAGCLIGAEHVNNSYECDIPIGAGICASYQTQTNSPRRARSVASQSIIAYTMSLGAENSVAYSNNSIAIPTNFTISVTTEILPVSMTKTSVDCTMYICGDSTECSNLLLQYGSFCTQLNRALTGIAVEQDKNTQEVFAQVKQIYKTPPIKDFGGFNFSQILPDPSKPSKRSFIEDLLFNKVTLADAGFIKQYGDCLGDIAARDLICVQKFNGLTVLPPLLTDEMIAQYTSALLAGTITSGWTFGAGAALQIPFAMQMAYRFNGIGVTQNVLYENQKLIANQFNSAIGKIQDSLSSTASALGKLQDVVNQNAQALNTLVKQLSSNFGCISSVLNDILSRLDKVEAEVQIDCLITGRLQSLQTYVTQQLIRAAEIRASANLAATKMSECVLGQSKRVDFCGKGYHLMSFPQSAPHGVVFLHVTYVPAQEKNFTTAPAICHDGKAHFPREGVFVSNGTHWFVTQRNFYEPQIITTDNTFVSGNCDVVIGIVNNTVYDPLQPELDSFKEELDKYFKNHTSPDVDLGDISGINASVVNIQKEIDRLNEVAKNLNESLIDLQELGKYEQYIKGGSGYIPEAPRDGQAYVRKDGEWVLLSTFL

SEQ ID NO: 6468 - protein, 1241 aa, Artificial Sequence
  SARS-CoV-2/Finland/FIN03032020A/2020__EPI_ISL_413602 spike protein (1-1211)(A972C_R995C) Foldon construct
MFVFLVLLPLVSSQCVNLTTRTQLPPAYTNSFTRGVYYPDKVFRSSVLHSTQDLFLPFFSNVTWFHAIHVSGTNGTKRFDNPVLPFNDGVYFASTEKSNIIRGWIFGTTLDSKTQSLLIVNNATNVVIKVCEFQFCNDPFLGVYYHKNNKSWMESEFRVYSSANNCTFEYVSQPFLMDLEGKQGNFKNLREFVFKNIDGYFKIYSKHTPINLVRDLPQGFSALEPLVDLPIGINITRFQTLLALHRSYLTPGDSSSGWTAGAAAYYVGYLQPRTFLLKYNENGTITDAVDCALDPLSETKCTLKSFTVEKGIYQTSNFRVQPTESIVRFPNITNLCPFGEVFNATRFASVYAWNRKRISNCVADYSVLYNSASFSTFKCYGVSPTKLNDLCFTNVYADSFVIRGDEVRQIAPGQTGKIADYNYKLPDDFTGCVISWNSNNLDSKVGGNYNYLYRLFRKSNLKPFERDISTEIYQAGSTPCNGVEGFNCYFPLQSYGFQPTNGVGYQPYRVVVLSFELLHAPATVCGPKKSTNLVKNKCVNFNFNGLTGTGVLTESNKKFLPFQQFGRDIADTTDAVRDPQTLEILDITPCSFGGVSVITPGTNTSNQVAVLYQGVNCTEVPVAIHADQLTPTWRVYSTGSNVFQTRAGCLIGAEHVNNSYECDIPIGAGICASYQTQTNSPRRARSVASQSIIAYTMSLGAENSVAYSNNSIAIPTNFTISVTTEILPVSMTKTSVDCTMYICGDSTECSNLLLQYGSFCTQLNRALTGIAVEQDKNTQEVFAQVKQIYKTPPIKDFGGFNFSQILPDPSKPSKRSFIEDLLFNKVTLADAGFIKQYGDCLGDIAARDLICAQKFNGLTVLPPLLTDEMIAQYTSALLAGTITSGWTFGAGAALQIPFAMQMAYRFNGIGVTQNVLYENQKLIANQFNSAIGKIQDSLSSTASALGKLQDVVNQNAQALNTLVKQLSSNFGCISSVLNDILSRLDKVEAEVQIDCLITGRLQSLQTYVTQQLIRAAEIRASANLAATKMSECVLGQSKRVDFCGKGYHLMSFPQSAPHGVVFLHVTYVPAQEKNFTTAPAICHDGKAHFPREGVFVSNGTHWFVTQRNFYEPQIITTDNTFVSGNCDVVIGIVNNTVYDPLQPELDSFKEELDKYFKNHTSPDVDLGDISGINASVVNIQKEIDRLNEVAKNLNESLIDLQELGKYEQYIKGGSGYIPEAPRDGQAYVRKDGEWVLLSTFL

SEQ ID NO: 6469 - protein, 1241 aa, Artificial Sequence
  SARS-CoV-2/France/GE1977/2020__EPI_ISL_414632 spike protein (1-1211)(A972C_R995C) Foldon construct
MFVFLVLLPLVSSQCVNLTTRTQLPPAYTNSFTRGVYYPDKVFRSSVLHSTQDLFLPFFSNVTWFHAIHVSGTNGTKRFDNPVLPFNDGVYFASTEKSNIIRGWIFGTTLDSKTQSLLIVNNATNVVIKVCEFQFCNDPFLGVYYHKNNKSWMESEFRVYSSANNCTFEYVSQPFLMDLEGKQGNFKNLREFVFKNIDGYFKIYSKHTPINLVRDLPQGFSALEPLVDLPIGINITRFQTLLALHRSYLTPGDSSSGWTAGAAAYYVGYLQPRTFLLKYNENGTITDAVDCALDPLSETKCTLKSFTVEKGIYQTSNFRVQPTESIVRFPNITNLCPFGEVFNATRFASVYAWNRKRISNCVADYSVLYNSASFSTFKCYGVSPTKLNDLCFTNVYADSFVIRGDEVRQIAPGQTGKIADYNYKLPDDFTGCVIAWNSNNLDSKVGGNYNYLYRLFRKSNLKPFERDISTEIYQAGSTPCNGVEGFNCYFPLQSYGFQPTNGVGYQPYRVVVLSFELLHAPATVCGPKKSTNLVKNKCVNFNFNGLTGTGVLTESNKKFLPFQQFGRDIADTTDAVRDPQTLEILDITPCSFGGVSVITPGTNTSNQVAVLYQGVNCTEVPVAIHADQLTPTWRVYSTGSNVFQTRAGCLIGAEHVNNSYECDIPIGAGICASYQTQTNSPRRARSVASQSIIAYTMSLGAENSVAYSNNSIAIPTNFTISVTTEILPVSMTKTSVDCTMYICGDSTECSNLLLQYGSFCTQLNRALTGIAVEQDKNTQEVFAQVKQIYKTPPIKDFGGFNFSQILPDPSKPSKRSFIEDLLFNKVTLADAGFIKQYGDCLGDIAARDLICAQKFNGLTVLPPLLTDEMIAQYTSALLAGTITSGWTFGAGAALQIPFAMQMAYRFNGIGVTQNVLYENQKLIANQFNSAIGKIQDSLFSTASALGKLQDVVNQNAQALNTLVKQLSSNFGCISSVLNDILSRLDKVEAEVQIDCLITGRLQSLQTYVTQQLIRAAEIRASANLAATKMSECVLGQSKRVDFCGKGYHLMSFPQSAPHGVVFLHVTYVPAQEKNFTTAPAICHDGKAHFPREGVFVSNGTHWFVTQRNFYEPQIITTDNTFVSGNCDVVIGIVNNTVYDPLQPELDSFKEELDKYFKNHTSPDVDLGDISGINASVVNIQKEIDRLNEVAKNLNESLIDLQELGKYEQYIKGGSGYIPEAPRDGQAYVRKDGEWVLLSTFL

SEQ ID NO: 6470 - protein, 1241 aa, Artificial Sequence
  SARS-CoV-2/Finland/FIN-313/2020__EPI_ISL_414641 spike protein (1-1211)(A972C_R995C) Foldon construct
MFVFLVLLPLVSSQCVNLTTRTQLPPAYTNSFTRGVYYPDKVFRSSVLHSTQDLFLPFFSNVTWFHAIHVSGTNGTKRFDNPVLPFNDGVYFASTEKSNIIRGWIFGTTLDSKTQSLLIVNNATNVVIKVCEFQFCNDPFLGVYYHKNNKSWMESEFRVYSSANNCTFEYVSQPFLMDLEGKQGNFKNLREFVFKNIDGYFKIYSKHTPINLVRDLPQGFSALEPLVDLPIGINITRFKTLLALHRSYLTPGDSSSGWTAGAAAYYVGYLQPRTFLLKYNENGTITDAVDCALDPLSETKCTLKSFTVEKGIYQTSNFRVQPTESIVRFPNITNLCPFGEVFNATRFASVYAWNRKRISNCVADYSVLYNSASFSTFKCYGVSPTKLNDLCFTNVYADSFVIRGDEVRQIAPGQTGKIADYNYKLPDDFTGCVIAWNSNNLDSKVGGNYNYLYRLFRKSNLKPFERDISTEIYQAGSTPCNGVEGFNCYFPLQSYGFQPTNGVGYQPYRVVVLSFELLHAPATVCGPKKSTNLVKNKCVNFNFNGLTGTGVLTESNKKFLPFQQFGRDIADTTDAVRDPQTLEILDITPCSFGGVSVITPGTNTSNQVAVLYQGVNCTEVPVAIHADQLTPTWRVYSTGSNVFQTRAGCLIGAEHVNNSYECDIPIGAGICASYQTQTNSPRRARSVASQSIIAYTMSLGAENSVAYSNNSIAIPTNFTISVTTEILPVSMTKTSVDCTMYICGDSTECSNLLLQYGSFCTQLNRALTGIAVEQDKNTQEVFAQVKQIYKTPPIKDFGGFNFSQILPDPSKPSKRSFIEDLLFNKVTLADAGFIKQYGDCLGDIAARDLICAQKFNGLTVLPPLLTDEMIAQYTSALLAGTITSGWTFGAGAALQIPFAMQMAYRFNGIGVTQNVLYENQKLIANQFNSAIGKIQDSLSSTASALGKLQDVVNQNAQALNTLVKQLSSNFGCISSVLNDILSRLDKVEAEVQIDCLITGRLQSLQTYVTQQLIRAAEIRASANLAATKMSECVLGQSKRVDFCGKGYHLMSFPQSAPHGVVFLHVTYVPAQEKNFTTAPAICHDGKAHFPREGVFVSNGTHWFVTQRNFYEPQIITTDNTFVSGNCDVVIGIVNNTVYDPLQPELDSFKEELDKYFKNHTSPDVDLGDISGINASVVNIQKEIDRLNEVAKNLNESLIDLQELGKYEQYIKGGSGYIPEAPRDGQAYVRKDGEWVLLSTFL

SEQ ID NO: 6471 - protein, 1241 aa, Artificial Sequence
  SARS-CoV-2/Netherlands/ZuidHolland_2/2020__EPI_ISL_414556 spike protein (1-1211)(A972C_R995C) Foldon construct
MFVFLVLLPLVSSQCVNLTTRTQLPPAYTNSFTRGVYYPDKVFRSSVLHSTQDLFLPFFSNVTWFHAIHVSGTNGTKRFDNPVLPFNDGVYFASTEKSNIIRGWIFGTTLDSKTQSLLIVNNATNVVIKVCEFQFCNDPFLGVYYHKNNKSWMESEFRVYSSANNCTFEYVSQPFLMDLEGKQGNFKNLREFVFKNIDGYFKIYSKHTPINLVRDLPQGFSALEPLVDLPIGINITRFQTLLALHRSYLTPGDSSSGWTAGAAAYYVGYLQPRTFLLKYNENGTITDAVDCALDPLSETKCTLKSFTVEKGIYQTSNFRVQPTESIVRFPNITNLCPFGEVFNATRFASVYAWNRKRISNCVADYSVLYNSASFSTFKCYGVSPTKLNDLCFTNVYADSFVIRGDEVRQIAPGQTGKIADYNYKLPDDFTGCVIAWNSNNLDSKVGGNYNYLYRLFRKSNLKPFERDISTEIYQAGSTPCNGVEGFNCYFPLQSYGFQPTNGVGYQPYRVVVLSFELLHAPATVCGPKKSTNLVKNKCVNFNFNGLTGTGVLTESNKKFLPFQQFGRDIADTTDAVRDPQTLEILDITPCSFGGVSVITPGTNTSNQVAVLYQGVNCTEVPVAIHADQLTPTWRVYSTGSNVFQTRAGCLIGAEHVNNSYECDIPIGAGICASYQTQTNSPRRARSVASQSIIAYTMSLGAENSVAYSNNSIAIPTNFTISVTTEILPVSMTKTSVDCTMYICGDSTECSNLLLQYGSFCTQLNRALTGIALEQDKNTQEVFAQVKQIYKTPPIKDFGGFNFSQILPDPSKPSKRSFIEDLLFNKVTLADAGFIKQYGDCLGDIAARDLICAQKFNGLTVLPPLLTDEMIAQYTSALLAGTITSGWTFGAGAALQIPFAMQMAYRFNGIGVTQNVLYENQKLIANQFNSAIGKIQDSLSSTASALGKLQDVVNQNAQALNTLVKQLSSNFGCISSVLNDILSRLDKVEAEVQIDCLITGRLQSLQTYVTQQLIRAAEIRASANLAATKMSECVLGQSKRVDFCGKGYHLMSFPQSAPHGVVFLHVTYVPAQEKNFTTAPAICHDGKAHFPREGVFVSNGTHWFVTQRNFYEPQIITTDNTFVSGNCDVVIGIVNNTVYDPLQPELDSFKEELDKYFKNHTSPDVDLGDISGINASVVNIQKEIDRLNEVAKNLNESLIDLQELGKYEQYIKGGSGYIPEAPRDGQAYVRKDGEWVLLSTFL

SEQ ID NO: 6472 - protein, 1241 aa, Artificial Sequence
  SARS-CoV-2/USA/WA-UW31/2020__EPI_ISL_414618 spike protein (1-1211)(A972C_R995C) Foldon construct
MFVFLVLLPLVSSQCVNLTTRTQLPPAYTNSFTRGVYYPDKVFRSSVLHSTQDLFLPFFSNVTWFHAIHVSGTNGTKRFDNPVLPFNDGVYFASTEKSNIIRGWIFGTTLDSKTQSLLIVNNATNVVIKVCEFQFCNDPFLGVYYHKNNKSWMESEFRVYSSANNCTFEYVSQPFLMDLEGKQGNFKNLREFVFKNIDGYFKIYSKHTPINLVRDLPQGFSALEPLVDLPIGINITRFQTLLALHRSYLTPGDSSSGWTAGAAAYYVGYLQPRTFLLKYNENGTITDAVDCALDPLSETKCTLKSFTVEKGIYQTSNFRVQPTESIVRFPNITNLCPFGEVFNATRFASVYAWNRKRISNCVADYSVLYNSASFSTFKCYGVSPTKLNDLCFTNVYADSFVIRGDEVRQIAPGQTGKIADYNYKLPDDFTGCVIAWNSNNLDSKVGGNYNYLYRLFRKSNLKPFERDISTEIYQAGSTPCNGAEGFNCYFPLQSYGFQPTNGVGYQPYRVVVLSFELLHAPATVCGPKKSTNLVKNKCVNFNFNGLTGTGVLTESNKKFLPFQQFGRDIADTTDAVRDPQTLEILDITPCSFGGVSVITPGTNTSNQVAVLYQDVNCTEVPVAIHADQLTPTWRVYSTGSNVFQTRAGCLIGAEHVNNSYECDIPIGAGICASYQTQTNSPRRARSVASQSIIAYTMSLGAENSVAYSNNSIAIPTNFTISVTTEILPVSMTKTSVDCTMYICGDSTECSNLLLQYGSFCTQLNRALTGIAVEQDKNTQEVFAQVKQIYKTPPIKDFGGFNFSQILPDPSKPSKRSFIEDLLFNKVTLADAGFIKQYGDCLGDIAARDLICAQKFNGLTVLPPLLTDEMIAQYTSALLAGTITSGWTFGAGAALQIPFAMQMAYRFNGIGVTQNVLYENQKLIANQFNSAIGKIQDSLSSTASALGKLQDVVNQNAQALNTLVKQLSSNFGCISSVLNDILSRLDKVEAEVQIDCLITGRLQSLQTYVTQQLIRAAEIRASANLAATKMSECVLGQSKRVDFCGKGYHLMSFPQSAPHGVVFLHVTYVPAQEKNFTTAPAICHDGKAHFPREGVFVSNGTHWFVTQRNFYEPQIITTDNTFVSGNCDVVIGIVNNTVYDPLQPELDSFKEELDKYFKNHTSPDVDLGDISGINASVVNIQKEIDRLNEVAKNLNESLIDLQELGKYEQYIKGGSGYIPEAPRDGQAYVRKDGEWVLLSTFL

SEQ ID NO: 6473 - protein, 1241 aa, Artificial Sequence
  SARS-CoV-2/South Korea/SNU01/2020__EPI_ISL_411929 spike protein (1-1211)(A972C_R995C) Foldon construct
MFVFLVLLPLVSSQCVNLTTRTQLPPAYTNSFTRGVYYPDKVFRSSVLHSTQDLFLPFFSNVTWFHAIHVSGTNGTKRFDNPVLPFNDGVYFASTEKSNIIRGWIFGTTLDSKTQSLLIVNNATNVVIKVCEFQFCNDPFLGVYYHKNNKSWMESEFRVYSSANNCTFEYVSQPFLMDLEGKQGNFKNLREFVFKNIDGYFKIYSKHTPINLVRDLPQGFWALEPLVDLPIGINITRFQTLLALHRSYLTPGDSSSGWTAGAAAYYVGYLQPRTFLLKYNENGTITDAVDCALDPLSETKCTLKSFTVEKGIYQTSNFRVQPTESIVRFPNITNLCPFGEVFNATRFASVYAWNRKRISNCVADYSVLYNSASFSTFKCYGVSPTKLNDLCFTNVYADSFVIRGDEVRQIAPGQTGKIADYNYKLPDDFTGCVIAWNSNNLDSKVGGNYNYLYRLFRKSNLKPFERDISTEIYQAGSTPCNGVEGFNCYFPLQSYGFQPTNGVGYQPYRVVVLSFELLHAPATVCGPKKSTNLVKNKCVNFNFNGLTGTGVLTESNKKFLPFQQFGRDIADTTDAVRDPQTLEILDITPCSFGGVSVITPGTNTSNQVAVLYQDVNCTEVPVAIHADQLTPTWRVYSTGSNVFQTRAGCLIGAEHVNNSYECDIPIGAGICASYQTQTNSPRRARSVASQSIIAYTMSLGAENSVAYSNNSIAIPTNFTISVTTEILPVSMTKTSVDCTMYICGDSTECSNLLLQYGSFCTQLNRALTGIAVEQDKNTQEVFAQVKQIYKTPPIKDFGGFNFSQILPDPSKPSKRSFIEDLLFNKVTLADAGFIKQYGDCLGDIAARDLICAQKFNGLTVLPPLLTDEMIAQYTSALLAGTITSGWTFGAGAALQIPFAMQMAYRFNGIGVTQNVLYENQKLIANQFNSAIGKIQDSLSSTASALGKLQDVVNQNAQALNTLVKQLSSNFGCISSVLNDILSRLDKVEAEVQIDCLITGRLQSLQTYVTQQLIRAAEIRASANLAATKMSECVLGQSKRVDFCGKGYHLMSFPQSAPHGVVFLHVTYVPAQEKNFTTAPAICHDGKAHFPREGVFVSNGTHWFVTQRNFYEPQIITTDNTFVSGNCDVVIGIVNNTVYDPLQPELDSFKEELDKYFKNHTSPDVDLGDISGINASVVNIQKEIDRLNEVAKNLNESLIDLQELGKYEQYIKGGSGYIPEAPRDGQAYVRKDGEWVLLSTFL

SEQ ID NO: 6474 - protein, 1241 aa, Artificial Sequence
  SARS-CoV-2/China/WF0004/2020__EPI_ISL_413694 spike protein (1-1211)(A972C_R995C) Foldon construct
MFVFLVLLPLVSSQCVNLTTRTQLPPAYTNSFTRGVYYPDKVFRSSVLHSTQDLFLPFFSNVTWFHAIHVSGTNGTKRFDNPVLPFNDGVYFASTEKSNIIRGWIFGTTLDSKTQSLLIVNNATNVVIKVCEFQFCNDPFLGVYYHKNNKSWTESEFRVYSSANNCTFEYVSQPFLMDLEGKQGNFKNLREFVFKNIDGYFKIYSKHTPINLVRDLPQGFSALEPLVDLPIGINITRFQTLLALHRSYLTPGDSSSGWTAGAAAYYVGYLQPRTFLLKYNENGTITDAVDCALDPLSETKCTLKSFTVEKGIYQTSNFRVQPTESIVRFPNITNLCPFGEVFNATRFASVYAWNRKRISNCVADYSVLYNSASFSTFKCYGVSPTKLNDLCFTNVYADSFVIRGDEVRQIAPGQTGKIADYNYKLPDDFTGCVIAWNSNNLDSKVGGNYNYLYRLFRKSNLKPFERDISTEIYQAGSTPCNGVEGFNCYFPLQSYGFQPTNGVGYQPYRVVVLSFELLHAPATVCGPKKSTNLVKNKCVNFNFNGLTGTGVLTESNKKFLPFQQFGRDIADTTDAVRDPQTLEILDITPCSFGGVSVITPGTNTSNQVAVLYQDVNCTEVPVAIHADQLTPTWRVYSTGSNVFQTRAGCLIGAEHVNNSYECDIPIGAGICASYQTQTNSPRRARSVASQSIIAYTMSLGAENSVAYSNNSIAIPTNFTISVTTEILPVSMTKTSVDCTMYICGDSTECSNLLLQYGSFCTQLNRALTGIAVEQDKNTQEVFAQVKQIYKTPPIKDFGGFNFSQILPDPSKPSKRSFIEDLLFNKVTLADAGFIKQYGDCLGDIAARDLICAQKFNGLTVLPPLLTDEMIAQYTSALLAGTITSGWTFGAGAALQIPFAMQMAYRFNGIGVTQNVLYENQKLIANQFNSAIGKIQDSLSSTASALGKLQDVVNQNAQALNTLVKQLSSNFGCISSVLNDILSRLDKVEAEVQIDCLITGRLQSLQTYVTQQLIRAAEIRASANLAATKMSECVLGQSKRFDFCGKGYHLMSFPQSAPHGVVFLHVTYVPAQEKNFTTAPAICHDGKAHFPREGVFVSNGTHWFVTQRNFYEPQIITTDNTFVSGNCDVVIGIVNNTVYDPLQPELDSFKEELDKYFKNHTSPDVDLGDISGINASVVNIQKEIDRLNEVAKNLNESLIDLQELGKYEQYIKGGSGYIPEAPRDGQAYVRKDGEWVLLSTFL

SEQ ID NO: 6475 - protein, 1241 aa, Artificial Sequence
  SARS-CoV-2/China/WF0028/2020__EPI_ISL_413791 spike protein (1-1211)(A972C_R995C) Foldon construct
MFVFLVLLPLVSSQCVNLTTRTQLPPAYTNSFTRGVYYPDKVFRSSVLHSTQDLFLPFFSNVTWFHAIHVSGTNGTKRFDNPVLPFNDGVYFASTEKSNIIRGWIFGTTLDSKTQSLLIVNNATNVVIKVCEFQFCNDPFLGVYYHKNNKSWMESEFRVYSSANNCTFEYVSQPFLMDLEGKQGNFKNLREFVFKNIDGYFKIYSKHTPINLVRDLPQGFSALEPLVDLPIGINITRFQTLLALHRSYLTPGDSSSGWTAGAAAYYVGYLQPRTFLLKYNENGTITDAVDCALDPLSETKCTLKSFTVEKGIYQTSNFRVQPTESIVRFPNITNLCPFGEVFNATRFASVYAWNRKRISNCVADYSVLYNSASFSTFKCYGVSPTKLNDLCFTNVYADSFVIRGDEVRQIAPGQTGKIADYNYKLPDDFTGCVIAWNSNNLDSKVGGNYNYLYRLFRKSNLKPFERDISTEIYQAGSTPCNGVEGFNCYFPLQSYGFQPTNGVGYQPYRVVVLSFELLHAPATVCGPKKSTNLVKNKCVNFNFNGLTGTGVLTESNKKFLPFQQFGRDIADTTDAVRDPQTLEILDITPCSFGGVSVITPGTNTSNQVAVLYQDVNCTEVPVAIHADQLTPTWRVYSTGSNVFQTRAGCLIGAEHVNNSYECDIPIGAGICASYQTQTNSPRRARSVASQSIIAYTMSLGAENSVAYSNNSIAIPTNFTISVTTEILPVSMTKTSVDCTMYICGDSTECSNLLLQYGSFCTQLNRALTGIAVEQDKNTQEVFAQVKQIYKTPPIKDFGGFNFSQILPDPSKPSKRSFIEDLLFNKVTLADAGFIKQYGDCLGDIAARDLICAQKFNGLTVLPPLLTDEMIAQYTSALLAGTITSGWTFGAGAALQIPFAMQMAYRFNGIGVTQNVLYENQKLIANQFNSAIGKIQDSLSSTASALGKLQDVVNQNAQALNTLVKQLSSNFGCISSVLNDILSRLDKVEAEVQIDCLITGRLQSLQTYVTQQLIRAAEIRASANLAATKMSECVLGQSKRVDFCGKGYHLMSFPQSAPHGVVFLHVTYVPAQEKNFTTAPAICHDGKAHFPREGVFVSNGTHWFVTQRNFYEPQIITTDNTFVSGNCDVVIGIVNNTVYDPLQPELESFKEELDKYFKNHTSPDVDLGDISGINASVVNIQKEIDRLNEVAKNLNESLIDLQELGKYEQYIKGGSGYIPEAPRDGQAYVRKDGEWVLLSTFL

SEQ ID NO: 6476 - protein, 1241 aa, Artificial Sequence
  SARS-CoV-2/2019-nCoV/USA-CruiseA-18/2020__MT159716.1 spike protein (1-1211)(A972C_R995C) Foldon construct
MFVFLVLLPLVSSQCVNLTTRTQLPPAYTNSFTRGVYYPDKVFRSSVLHSTQDLFLPFFSNVTWFHAIHVSGTNGTKRFDNPVLPFNDGVYFASTEKSNIIRGWIFGTTLDSKTQSLLIVNNATNVVIKVCEFQFCNDPFLGVYYHKNNKSWMESELRVYSSANNCTFEYVSQPFLMDLEGKQGNFKNLREFVFKNIDGYFKIYSKHTPINLVRDLPQGFSALEPLVDLPIGINITRFQTLLALHRSYLTPGDSSSGWTAGAAAYYVGYLQPRTFLLKYNENGTITDAVDCALDPLSETKCTLKSFTVEKGIYQTSNFRVQPTESIVRFPNITNLCPFGEVFNATRFASVYAWNRKRISNCVADYSVLYNSASFSTFKCYGVSPTKLNDLCFTNVYADSFVIRGDEVRQIAPGQTGKIADYNYKLPDDFTGCVIAWNSNNLDSKVGGNYNYLYRLFRKSNLKPFERDISTEIYQAGSTPCNGVEGFNCYFPLQSYGFQPTNGVGYQPYRVVVLSFELLHAPATVCGPKKSTNLVKNKCVNFNFNGLTGTGVLTESNKKFLPFQQFGRDIADTTDAVRDPQTLEILDITPCSFGGVSVITPGTNTSNQVAVLYQDVNCTEVPVAIHADQLTPTWRVYSTGSNVFQTRAGCLIGAEHVNNSYECDIPIGAGICASYQTQTNSPRRARSVASQSIIAYTMSLGAENSVAYSNNSIAIPTNFTISVTTEILPVSMTKTSVDCTMYICGDSTECSNLLLQYGSFCTQLNRALTGIAVEQDKNTQEVFAQVKQIYKTPPIKDFGGFNFSQILPDPSKPSKRSFIEDLLFNKVTLADAGFIKQYGDCLGDIAARDLICAQKFNGLTVLPPLLTDEMIAQYTSALLAGTITSGWTFGAGAALQIPFAMQMAYRFNGIGVTQNVLYENQKLIANQFNSAIGKIQDSLSSTASALGKLQDVVNQNAQALNTLVKQLSSNFGCISSVLNDILSRLDKVEAEVQIDCLITGRLQSLQTYVTQQLIRAAEIRASANLAATKMSECVLGQSKRVDFCGKGYHLMSFPQSAPHGVVFLHVTYVPAQEKNFTTAPAICHDGKAHFPREGVFVSNGTHWFVTQRNFYEPQIITTDNTFVSGNCDVVIGIVNNTVYDPLQPELDSFKEELDKYFKNHTSPDVDLGDISGINASVVNIQKEIDRLNEVAKNLNESLIDLQELGKYEQYIKGGSGYIPEAPRDGQAYVRKDGEWVLLSTFL

SEQ ID NO: 6477 - protein, 1241 aa, Artificial Sequence
  SARS-CoV-2/SARS-CoV-2/Yunnan-01/human/2020/CHN__MT049951.1 spike protein (1-1211)(A972C_R995C) Foldon construct
MFVFLVLLPLVSSQCVNLTTRTQLPPANTNSFTRGVYYPDKVFRSSVLHSTQDLFLPFFSNVTWFHAIHVSGTNGTKRFDNPVLPFNDGVYFASTEKSNIIRGWIFGTTLDSKTQSLLIVNNATNVVIKVCEFQFCNDPFLGVYYHKNNKSWMESEFRVYSSANNCTFEYVSQPFLMDLEGKQGNFKNLREFVFKNIDGYFKIYSKHTPINLVRDLPQGFSALEPLVDLPIGINITRFQTLLALHRSYLTPGDSSSGWTAGAAAYYVGYLQPRTFLLKYNENGTITDAVDCALDPLSETKCTLKSFTVEKGIYQTSNFRVQPTESIVRFPNITNLCPFGEVFNATRFASVYAWNRKRISNCVADYSVLYNSASFSTFKCYGVSPTKLNDLCFTNVYADSFVIRGDEVRQIAPGQTGKIADYNYKLPDDFTGCVIAWNSNNLDSKVGGNYNYLYRLFRKSNLKPFERDISTEIYQAGSTPCNGVEGFNCYFPLQSYGFQPTNGVGYQPYRVVVLSFELLHAPATVCGPKKSTNLVKNKCVNFNFNGLTGTGVLTESNKKFLPFQQFGRDIADTTDAVRDPQTLEILDITPCSFGGVSVITPGTNTSNQVAVLYQDVNCTEVPVAIHADQLTPTWRVYSTGSNVFQTRAGCLIGAEHVNNSYECDIPIGAGICASYQTQTNSPRRARSVASQSIIAYTMSLGAENSVAYSNNSIAIPTNFTISVTTEILPVSMTKTSVDCTMYICGDSTECSNLLLQYGSFCTQLNRALTGIAVEQDKNTQEVFAQVKQIYKTPPIKDFGGFNFSQILPDPSKPSKRSFIEDLLFNKVTLADAGFIKQYGDCLGDIAARDLICAQKFNGLTVLPPLLTDEMIAQYTSALLAGTITSGWTFGAGAALQIPFAMQMAYRFNGIGVTQNVLYENQKLIANQFNSAIGKIQDSLSSTASALGKLQDVVNQNAQALNTLVKQLSSNFGCISSVLNDILSRLDKVEAEVQIDCLITGRLQSLQTYVTQQLIRAAEIRASANLAATKMSECVLGQSKRVDFCGKGYHLMSFPQSAPHGVVFLHVTYVPAQEKNFTTAPAICHDGKAHFPREGVFVSNGTHWFVTQRNFYEPQIITTDNTFVSGNCDVVIGIVNNTVYDPLQPELDSFKEELDKYFKNHTSPDVDLGDISGINASVVNIQKEIDRLNEVAKNLNESLIDLQELGKYEQYIKGGSGYIPEAPRDGQAYVRKDGEWVLLSTFL

SEQ ID NO: 6478 - protein, 1241 aa, Artificial Sequence
  SARS-CoV-2/USA/WA-UW292/2020__EPI_ISL_418077 spike protein (1-1211)(A972C_R995C) Foldon construct
MFVFLVLLPLVSSQCVNLTTRTQLPPAYTNSFTRGVYYPDKVFRSSVLHSTQDLFLPFFSNVTWFHAIHVSGTNGTKRFDNPVLPFNDGVYFASTEKSNIIRGWIFGTTLDSKTQSLLIVNNATNVVIKVCEFQFCNDPFLGVYYHKNNKSWMESEFRVYSSANNCTFEYVSQPFLMDLEGKQGNFKNLREFVFKNIDGYFKIYSKHTPINLVRDLPQGFSALEPLVDLPIGINITRFQTLLALHRSYLTPGDSSSGWTAGAAAYYVGYLQPRTFLLKYNENGTITDAVDCALDPLSETKCTLKSFTVEKGIYQTSNFRVQPTESIVRFPNITNLCPFGEVFNATRFASVYAWNRKRISNCVADYSVLYNSASFSTFKCYGVSPTKLNDLCFTNVYADSFVIRGDEVRQIAPGQTGKIADYNYKLPDDFTGCVIAWNSNNLDSKVGGNYNYLYRLFRKSNLKPFERDISTEIYQASSTPCNGVEGFNCYFPLQSYGFQPTNGVGYQPYRVVVLSFELLHAPATVCGPKKSTNLVKNKCVNFNFNGLTGTGVLTESNKKFLPFQQFGRDIADTTDAVRDPQTLEILDITPCSFGGVSVITPGTNTSNQVAVLYQDVNCTEVPVAIHADQLTPTWRVYSTGSNVFQTRAGCLIGAEHVNNSYECDIPIGAGICASYQTQTNSPRRARSVASQSIIAYTMSLGAENSVAYSNNSIAIPTNFTISVTTEILPVSMTKTSVDCTMYICGDSTECSNLLLQYGSFCTQLNRALTGIAVEQDKNTQEVFAQVKQIYKTPPIKDFGGFNFSQILPDPSKPSKRSFIEDLLFNKVTLADAGFIKQYGDCLGDIAARDLICAQKFNGLTVLPPLLTDEMIAQYTSALLAGTITSGWTFGAGAALQIPFAMQMAYRFNGIGVTQNVLYENQKLIANQFNSAIGKIQDSLSSTASALGKLQDVVNQNAQALNTLVKQLSSNFGCISSVLNDILSRLDKVEAEVQIDCLITGRLQSLQTYVTQQLIRAAEIRASANLAATKMSECVLGQSKRVDFCGKGYHLMSFPQSAPHGVVFLHVTYVPAQEKNFTTAPAICHDGKAHFPREGVFVSNGTHWFVTQRNFYEPQIITTDNTFVSGNCDVVIGIVNNTVYDPLQPELDSFKEELDKYFKNHTSPDVDLGDISGINASVVNIQKEIDRLNEVAKNLNESLIDLQELGKYEQYIKGGSGYIPEAPRDGQAYVRKDGEWVLLSTFL

SEQ ID NO: 6479 - protein, 1241 aa, Artificial Sequence
  SARS-CoV-2/Iceland/192/2020__EPI_ISL_417819 spike protein (1-1211)(A972C_R995C) Foldon construct
MFVFFVLLPLVSSQCVNLTTRTQLPPAYTNSFTRGVYYPDKVFRSSVLHSTQDLFLPFFSNVTWFHAIHVSGTNGTKRFDNPVLPFNDGVYFASTEKSNIIRGWIFGTTLDSKTQSLLIVNNATNVVIKVCEFQFCNDPFLGVYYHKNNKSWMESEFRVYSSANNCTFEYVSQPFLMDLEGKQGNFKNLREFVFKNIDGYFKIYSKHTPINLVRDLPQGFSALEPLVDLPIGINITRFQTLLALHRSYLTPGDSSSGWTAGAAAYYVGYLQPRTFLLKYNENGTITDAVDCALDPLSETKCTLKSFTVEKGIYQTSNFRVQPTESIVRFPNITNLCPFGEVFNATRFASVYAWNRKRISNCVADYSVLYNSASFSTFKCYGVSPTKLNDLCFTNVYADSFVIRGDEVRQIAPGQTGKIADYNYKLPDDFTGCVIAWNSNNLDSKVGGNYNYLYRLFRKSNLKPFERDISTEIYQAGSTPCNGVEGFNCYFPLQSYGFQPTNGVGYQPYRVVVLSFELLHAPATVCGPKKSTNLVKNKCVNFNFNGLTGTGVLTESNKKFLPFQQFGRDIADTTDAVRDPQTLEILDITPCSFGGVSVITPGTNTSNQVAVLYQGVNCTEVPVAIHADQLTPTWRVYSTGSNVFQTRAGCLIGAEHVNNSYECDIPIGAGICASYQTQTNSPRRARSVASQSIIAYTMSLGAENSVAYSNNSIAIPTNFTISVTTEILPVSMTKTSVDCTMYICGDSTECSNLLLQYGSFCTQLNRALTGIAVEQDKNTQEVFAQVKQIYKTPPIKDFGGFNFSQILPDPSKPSKRSFIEDLLFNKVTLADAGFIKQYGDCLGDIAARDLICAQKFNGLTVLPPLLTDEMIAQYTSALLAGTITSGWTFGAGAALQIPFAMQMAYRFNGIGVTQNVLYENQKLIANQFNSAIGKIQDSLSSTASALGKLQDVVNQNAQALNTLVKQLSSNFGCISSVLNDILSRLDKVEAEVQIDCLITGRLQSLQTYVTQQLIRAAEIRASANLAATKMSECVLGQSKRVDFCGKGYHLMSFPQSAPHGVVFLHVTYVPAQEKNFTTAPAICHDGKAHFPREGVFVSNGTHWFVTQRNFYEPQIITTDNTFVSGNCDVVIGIVNNTVYDPLQPELDSFKEELDKYFKNHTSPDVDLGDISGINASVVNIQKEIDRLNEVAKNLNESLIDLQELGKYEQYIKGGSGYIPEAPRDGQAYVRKDGEWVLLSTFL

SEQ ID NO: 6480 - protein, 1241 aa, Artificial Sequence
  SARS-CoV-2/Belgium/ULG-6939/2020__EPI_ISL_417020 spike protein (1-1211)(A972C_R995C) Foldon construct
MFVFLVLLPLVSSQCVNLTTRTQLPPAYTNSFTRGVYYPDKVFRSSVLHSTQDLFLPFFSNVTWFHAIHVSGTNGTKRFDNPVLPFNDGVYFASTEKSNIIRGWIFGTTLDSKTQSLLIVNNATNVVIKVCEFQFCNDPFLGVYYHKNNKSWMESEFRVYSSANNCTFEYVSQPFLMDLEGKQGNFKNLREFVFKNIDGYFKIYSKHTPINLVRDLPQGFSALEPLVDLPIGINITRFQTLLALHRSYLTPGDSSSGWTAGAAAYYVGYLQPRTFLLKYNENGTITDAVDCALDPLSETKCTLKSFTVEKGIYQTSNFRVQPTESIVRFPNITNLCPFGEVFNATRFASVYAWNRKRISNCVADYSVLYNSASFSTFKCYGVSPTKLNDLCFTNVYADSFVIRGDEVRQIAPGQTGKIADYNYKLPDDFTGCVIAWNSNNLDSKVGGNYNYLYRLFRKSNLKPFERDISTEIYQAGSTPCNGVEGFNCYFPLQSYGFQPTNGVGYQPYRVVVLSFELLHAPATVCGPKKSTNLVKNKCVNFNFNGLTGTGVLTESNKKFLPFQQFGRDIADTTDAVRDPQTLEILDITPCSFGGVSVITPGTNTSNQVAVLYQGVNCTEVPVAIHADQLTPTWRVYSTGSNVFQTRAGCLIGAEHVNNSYECDIPIGAGICASYQTQTNSPRRARSVASQSIIAYTMSLGAENSVVYSNNSIAIPTNFTISVTTEILPVSMTKTSVDCTMYICGDSTECSNLLLQYGSFCTQLNRALTGIAVEQDKNTQEVFAQVKQIYKTPPIKDFGGFNFSQILPDPSKPSKRSFIEDLLFNKVTLADAGFIKQYGDCLGDIAARDLICAQKFNGLTVLPPLLTDEMIAQYTSALLAGTITSGWTFGAGAALQIPFAMQMAYRFNGIGVTQNVLYENQKLIANQFNSAIGKIQDSLSSTASALGKLQDVVNQNAQALNTLVKQLSSNFGCISSVLNDILSRLDKVEAEVQIDCLITGRLQSLQTYVTQQLIRAAEIRASANLAATKMSECVLGQSKRVDFCGKGYHLMSFPQSAPHGVVFLHVTYVPAQEKNFTTAPAICHDGKAHFPREGVFVSNGTHWFVTQRNFYEPQIITTDNTFVSGNCDVVIGIVNNTVYDPLQPELDSFKEELDKYFKNHTSPDVDLGDISGINASVVNIQKEIDRLNEVAKNLNESLIDLQELGKYEQYIKGGSGYIPEAPRDGQAYVRKDGEWVLLSTFL

SEQ ID NO: 6481 - protein, 1241 aa, Artificial Sequence
  SARS-CoV-2/France/HF2496/2020__EPI_ISL_418231 spike protein (1-1211)(A972C_R995C) Foldon construct
MFVFLVLLPLVSSQCVNLTTRTQLPPAYTNSFTRGVYYPDKVFRSSVLHSTQDLFLPFFSNVTWFHAIHVSGTNGTKRFDNPVLPFNDGVYFASTEKSNIIRGWIFGTTLDSKTQSLLIVNNATNVVIKVCEFQFCNDPFLGVYYHKNNKSWMESEFRVYSSANNCTFEYVSQPFLMDLEGKQGNFKNLREFVFKNIDGYFKIYSKHTPINLVRDLPQGFSALEPLVDLPIGINITRFQTLLALHRSYLTPGDSSSGWTAGAAAYYVGYLQPRTFLLKYNENGTITDAVDCALDPLSETKCTLKSFTVEKGIYQTSNFRVQPTESIVRFPNITNLCPFGEVFNATRFASVYAWNRKRISNCVADYSVLYNSASFSTFKCYGVSPTKLNDLCFTNVYADSFVIRGDEVRQIAPGQTGKIADYNYKLPDDFTGCVIAWNSNNLDSKVGGNYNYLYRLFRKSNLKPFERDISTEIYQAGSTPCNGVEGFNCYFPLQSYGFQPTNGVGYQPYRVVVLSFELLHAPATVCGPKKSTNLVKNKCVNFNFNGLTGTGVLTESNKKFLPFQQFGRDIADTTDAVRDPQTLEILDITPCSFGGVSVITPGTNTSNQVAVLYQGVNCTEVPVAIHADQLTPTWRVYSTGSNVFQTRAGCLIGAEHVNNSYECDIPIGAGICASYQTQTNSPRRARSVASQSIIAYTMSLGAENSVAYSNNSIAIPTNFTISVTTEILPVSMTKTSVDCTMYICGDSTECSNLLLQYGSFCTQLNRALTGIAVEQDKNTQEVFAQVKQIYKTPPIKDFGGFNFSQILPDPSKPSKRSFIEDLLFNKVTLADAGFIKQYGDCLGDIVARDLICAQKFNGLTVLPPLLTDEMIAQYTSALLAGTITSGWTFGAGAALQIPFAMQMAYRFNGIGVTQNVLYENQKLIANQFNSAIGKIQDSLSSTASALGKLQDVVNQNAQALNTLVKQLSSNFGCISSVLNDILSRLDKVEAEVQIDCLITGRLQSLQTYVTQQLIRAAEIRASANLAATKMSECVLGQSKRVDFCGKGYHLMSFPQSAPHGVVFLHVTYVPAQEKNFTTAPAICHDGKAHFPREGVFVSNGTHWFVTQRNFYEPQIITTDNTFVSGNCDVVIGIVNNTVYDPLQPELDSFKEELDKYFKNHTSPDVDLGDISGINASVVNIQKEIDRLNEVAKNLNESLIDLQELGKYEQYIKGGSGYIPEAPRDGQAYVRKDGEWVLLSTFL

SEQ ID NO: 6482 - protein, 1241 aa, Artificial Sequence
  SARS-CoV-2/USA/WA-UW291/2020__EPI_ISL_418076 spike protein (1-1211)(A972C_R995C) Foldon construct
MFVFLVLLPLVSSQCVNLTTRTQLPPAYTNSFTRGVYYPDKVFRSSVLHSTQDLFLPFFSNVTWFHAIHVSGTNGTKRFDNPVLPFNDGVYFASTEKSNIIRGWIFGTTLDSKTQSLLIVNNATNVVIKVCEFQFCNDPFLGVYYHKNNKSWMESEFRVYSSANNCTFEYVSQPFLMDLEGKQGNFKNLREFVFKNIDGYFKIYSKHTPINLVRDLPQGFSALEPLVDLPIGINITRFQTLLALHRSYLTPGDSSSGWTAGAAAYYVGYLQPRTFLLKYNENGTITDAVDCALDPLSETKCTLKSFTVEKGIYQTSNFRVQPTESIVRFPNITNLCPFGEVFNATRFASVYAWNRKRISNCVADYSVLYNSASFSTFKCYGVSPTKLNDLCFTNVYADSFVIRGDEVRQIAPGQTGKIADYNYKLPDDFTGCVIAWNSNNLDSKVGGNYNYLYRLFRKSNLKPFERDISTEIYQAGSTPCNGVEGFNCYFPLQSYGFQPTNGVGYQPYRVVVLSFELLHAPATVCGPKKSTNLVKNKCVNFNFNGLTGTGVLTESNKKFLPFQQFGRDIADTTDAVRDPQTLEILDITPCSFGGVSVITPGTNTSNQVAVLYQGVNCTEVPVAIHADQLTPTWRVYSTGSNVFQTRAGCLIGAEHVNNSYECDIPIGAGICASYQTQTNSPRRARSVASQSIIAYTMSLGAENSVAYSNNSIAIPTNFTISVTTEILPVSMTKTSVDCTMYICGDSTECSNLLLQYGSFCTQLNRALTGIAVEQDKNTQEVFAQVKQIYKTPPIKDFGGFNFSQILPDPSKPSKRSFIEDLLFNKVTLADAGFIKQYGDCLGDIAARDLICAQKFNGLTVLPPLLTDEMIAQYTSALLAGTITSGWTFGAGAALQIPFAMQMAYRFNGIGVTQNVLYENQKLIANQFNSAIGKIQYSLSSTASALGKLQDVVNQNAQALNTLVKQLSSNFGCISSVLNDILSRLDKVEAEVQIDCLITGRLQSLQTYVTQQLIRAAEIRASANLAATKMSECVLGQSKRVDFCGKGYHLMSFPQSAPHGVVFLHVTYVPAQEKNFTTAPAICHDGKAHFPREGVFVSNGTHWFVTQRNFYEPQIITTDNTFVSGNCDVVIGIVNNTVYDPLQPELDSFKEELDKYFKNHTSPDVDLGDISGINASVVNIQKEIDRLNEVAKNLNESLIDLQELGKYEQYIKGGSGYIPEAPRDGQAYVRKDGEWVLLSTFL

SEQ ID NO: 6483 - protein, 1241 aa, Artificial Sequence; identical to SEQ ID NO: 6446
  SARS-CoV-2/Portugal/PT0034/2020__EPI_ISL_418019 spike protein (1-1211)(A972C_R995C) Foldon construct

SEQ ID NO: 6484 - protein, 1241 aa, Artificial Sequence
  SARS-CoV-2/Iceland/202/2020__EPI_ISL_417750 spike protein (1-1211)(A972C_R995C) Foldon construct
MFVFLVLLPLVSSQCVNLTTRTQLPPAYTNSFTRGVYYPDKVFRSSVLHSTQDLFLPFFSNVTWFHAIHVSGTNGTKRFDNPVLPFNDGVYFASTEKSNIIRGWIFGTTLDSKTQSLLIVNNATNVVIKVCEFQFCNDPFLGVYYHKNNKSWMESEFRVYSSANNCTFEYVSQPFLMDLEGKQGNFKNLREFVFKNIDGYFKIYSKHTPINLVRDLPQGFSALEPLVDLPIGINITRFQTLLALHRSYLTPGDSSSGWTAGAAAYYVGYLQPRTFLLKYNENGTITDAVDCALDPLSETKCTLKSFTVEKGIYQTSNFRVQPTESIVRFPNITNLCPFGEVFNATRFASVYAWNRKRISNCVADYSVLYNSASFSTFKCYGVSPTKLNDLCFTNVYADSFVIRGDEVRQIAPGQTGKIADYNYKLPDDFTGCVIAWNSNNLDSKVGGNYNYLYRLFRKSNLKPFERDISTEIYQAGSTPCNGVEGFNCYFPLQSYGFQPTNGVGYQPYRVVVLSFELLHAPATVCGPKKSTNLVKNKCVNFNFNGLTGTGVLTESNKKFLPFQQFGRDIADTTDAVRDPQTLEILDITPCSFGGVSVITPGTNTSNQVAVLYQDVNCTEVPVAIHADQLTPTWRVYSTGSNVFQTRAGCLIGAEHVNNSYECDIPIGAGICASYQTQTNSPRRARSVASQSIIAYTMSLGAENSVAYSNNSIAIPTNFTISVTTEILPVSMTKTSVDCTMYICGDSTECSNLLLQYGSFCTQLNRALTGIAVEQDKNTQEVFAQVKQIYKTPPIKDFGGFNFSQILPDPSKPSKRSFIEDLLFNKVTLADAGFIKQYGDCLGDIAARDLICAQKFNGLTVLPPLLTDEMIAQYTSALLAGTITSGWTFGAGAALQIPFAMQMAYRFNGIGVTQNVLYENQKLIANQFNSAIGKIQDSLSSTASALGKLQDVVNQNAQALNTLVKQLSSNFGCISSVLNDILSRLDKVEAEVQIDCLITGRLQSLQTYVTQQLIRAAEIRASANLAATKMSECVLGQSKRVDFCGKGYHLMSFPQSAPHGVVFLHVTYVPAQEKNFTTAPAICHDGKAHFPREGVFVSNGTHWFVTQRNFYEPQIITTDNTFVSGNCDVVIGIVNNTVYDPLQPELDSFKEELDKYFKNHTSPDVDLGDIPGINASVVNIQKEIDRLNEVAKNLNESLIDLQELGKYEQYIKGGSGYIPEAPRDGQAYVRKDGEWVLLSTFL

SEQ ID NO: 6485 - protein, 1241 aa, Artificial Sequence
  SARS-CoV-2/USA/WA-UW261/2020__EPI_ISL_418046 spike protein (1-1211)(A972C_R995C) Foldon construct
MFVFLVLLPLVSSQCVNLTTRTQLPPAYTNSFTRGVYYPDKVFRSSVLHSTQDLFLPFFSNVTWFHAIHVSGTNGTKRFDNPVLPFNDGVYFASTEKSNIIRGWIFGTTLDSKTQSLLIVNNATNVVIKVCEFQFCNDPFLGVYYHKNNKSWMESEFRVYSSANNCTFEYVSQPFLMDLEGKQGNFKNLREFVFKNIDGYFKIYSKHTPINLVRDLPQGFSALEPLVDLPIGINITRFQTLLALHRSYLTPGDSSSGWTAGAAAYYVGYLQPRTFLLKYNENGTITDAVDCALDPLSETKCTLKSFTVEKGIYQTSNFRVQPTESIVRFPNITNLCPFGEVFNATRFTSVYAWNRKRISNCVADYSVLYNSASFSTFKCYGVSPTKLNDLCFTNVYADSFVIRGDEVRQIAPGQTGKIADYNYKLPDDFTGCVIAWNSNNLDSKVGGNYNYLYRLFRKSNLKPFERDISTEIYQAGSTPCNGVEGFNCYFPLQSYGFQPTNGVGYQPYRVVVLSFELLHAPATVCGPKKSTNLVKNKCVNFNFNGLTGTGVLTESNKKFLPFQQFGRDIADTTDAVRDPQTLEILDITPCSFGGVSVITPGTNTSNQVAVLYQDVNCTEVPVAIHADQLTPTWRVYSTGSNVFQTRAGCLIGAEHVNNSYECDIPIGAGICASYQTQTNSPRRARSVASQSIIAYTMSLGAENSVAYSNNSIAIPTNFTISVTTEILPVSMTKTSVDCTMYICGDSTECSNLLLQYGSFCTQLNRALTGIAVEQDKNTQEVFAQVKQIYKTPPIKDFGGFNFSQILPDPSKPSKRSFIEDLLFNKVTLADAGFIKQYGDCLGDIAARDLICAQKFNGLTVLPPLLTDEMIAQYTSALLAGTITSGWTFGAGAALQIPFAMQMAYRFNGIGVTQNVLYENQKLIANQFNSAIGKIQDSLSSTASALGKLQDVVNQNAQALNTLVKQLSSNFGCISSVLNDILSRLDKVEAEVQIDCLITGRLQSLQTYVTQQLIRAAEIRASANLAATKMSECVLGQSKRVDFCGKGYHLMSFPQSAPHGVVFLHVTYVPAQEKNFTTAPAICHDGKAHFPREGVFVSNGTHWFVTQRNFYEPQIITTDNTFVSGNCDVVIGIVNNTVYDPLQPELDSFKEELDKYFKNHTSPDVDLGDISGINASVVNIQKEIDRLNEVAKNLNESLIDLQELGKYEQYIKGGSGYIPEAPRDGQAYVRKDGEWVLLSTFL

SEQ ID NO: 6486 - protein, 1241 aa, Artificial Sequence
  SARS-CoV-2/Portugal/PT0035/2020__EPI_ISL_418020 spike protein (1-1211)(A972C_R995C) Foldon construct
MFVFLVLLPLVSSQCVNLTTRTQLPPAYTNSFTRGVYYPDKVFRSSVLHSTQDLFLPFFSNVTWFHAIHVSGTNGTKRFDNPVLPFNDGVYFASTEKSNIIRGWIFGTTLDSKTQSLLIVNNATNVVIKVCEFQFCNDPFLGVYYHKNNKSWMESEFRVYSSANNCTFEYVSQPFLMDLEGKQGNFKNLREFVFKNIDGYFKIYSKHTPINLVRDLPQGFSALEPLVDLPIGINITRFQTLLALHRSYLTPGDSSSGWTAGAAAYYVGYLQPRTFLLKYNENGTITDAVDCALDPLSETKCTLKSFTVEKGIYQTSNFRVQPTESIVRFPNITNLCPFGEVFNATRFASVYAWNRKRISNCVADYSVLYNSASFSTFKCYGVSPTKLNDLCFTNVYADSFVIRGDEVRQIAPGQTGKIADYNYKLPDDFTGCVIAWNSNNLDSKVGGNYNYLYRLFRKSNLKPFERDISTEIYQAGSTPCNGVEGFNCYFPLQSYGFQPTNGVGYQPYRVVVLSFELLHAPATVCGPKKSTNLVKNKCVNFNFNGLTGTGVLTESNKKFLPFQQFGRDIADTTDAVRDPQTLEILDITPCSFGGVSVITPGTNTSNQVAVLYQDVNCTEVPVAIHADQLTPTWRVYSTGSNVFQTRAGCLIGAEHVNNSYECDIPIGAGICASYQTQTNSPRRARSVASQSIIAYTMSLGAENSVAYSNNSIAIPTNFTISVTTEILPVSMTKTSVDCTMYICGDSTECSNLLLQYGSFCTQLNRALTGIAVEQDKNTQEVFAQVKQIYKTPPIKDFGGFNFSQILPDPSKPSKRSFIEDLLFNKVTLADAGFIKQYGDCLGDISARDLICAQKFNGLTVLPPLLTDEMIAQYTSALLAGTITSGWTFGAGAALQIPFAMQMAYRFNGIGVTQNVLYENQKLIANQFNSAIGKIQDSLSSTASALGKLQDVVNQNAQALNTLVKQLSSNFGCISSVLNDILSRLDKVEAEVQIDCLITGRLQSLQTYVTQQLIRAAEIRASANLAATKMSECVLGQSKRVDFCGKGYHLMSFPQSAPHGVVFLHVTYVPAQEKNFTTAPAICHDGKAHFPREGVFVSNGTHWFVTQRNFYEPQIITTDNTFVSGNCDVVIGIVNNTVYDPLQPELDSFKEELDKYFKNHTSPDVDLGDISGINASVVNIQKEIDRLNEVAKNLNESLIDLQELGKYEQYIKGGSGYIPEAPRDGQAYVRKDGEWVLLSTFL

SEQ ID NO: 6487 - protein, 1241 aa, Artificial Sequence
  SARS-CoV-2/USA/NY-NYUMC7/2020__EPI_ISL_418192 spike protein (1-1211)(A972C_R995C) Foldon construct
MFVFLVLLPLVSSQCVNLTTRTQLPPAYTNSFTRGVYYPDKVFRSSVLHSTQDLFLPFFSNVTWFHAIHVSGTNGTKRFDNPVLPFNDGVYFASTEKSNIIRGWIFGTTLDSKTQSLLIVNNATNVVIKVCEFQFCNDPFLGVYHHKNNKSWMESEFRVYSSANNCTFEYVSQPFLMDLEGKQGNFKNLREFVFKNIDGYFKIYSKHTPINLVRDLPQGFSALEPLVDLPIGINITRFQTLLALHRSYLTPGDSSSGWTAGAAAYYVGYLQPRTFLLKYNENGTITDAVDCALDPLSETKCTLKSFTVEKGIYQTSNFRVQPTESIVRFPNITNLCPFGEVFNATRFASVYAWNRKRISNCVADYSVLYNSASFSTFKCYGVSPTKLNDLCFTNVYADSFVIRGDEVRQIAPGQTGKIADYNYKLPDDFTGCVIAWNSNNLDSKVGGNYNYLYRLFRKSNLKPFERDISTEIYQAGSTPCNGVEGFNCYFPLQSYGFQPTNGVGYQPYRVVVLSFELLHAPATVCGPKKSTNLVKNKCVNFNFNGLTGTGVLTESNKKFLPFQQFGRDIADTTDAVRDPQTLEILDITPCSFGGVSVITPGTNTSNQVAVLYQGVNCTEVPVAIHADQLTPTWRVYSTGSNVFQTRAGCLIGAEHVNNSYECDIPIGAGICASYQTQTNSPRRARSVASQSIIAYTMSLGAENSVAYSNNSIAIPTNFTISVTTEILPVSMTKTSVDCTMYICGDSTECSNLLLQYGSFCTQLNRALTGIAVEQDKNTQEVFAQVKQIYKTPPIKDFGGFNFSQILPDPSKPSKRSFIEDLLFNKVTLADAGFIKQYGDCLGDIAARDLICAQKFNGLTVLPPLLTDEMIAQYTSALLAGTITSGWTFGAGAALQIPFAMQMAYRFNGIGVTQNVLYENQKLIANQFNSAIGKIQDSLSSTASALGKLQDVVNQNAQALNTLVKQLSSNFGCISSVLNDILSRLDKVEAEVQIDCLITGRLQSLQTYVTQQLIRAAEIRASANLAATKMSECVLGQSKRVDFCGKGYHLMSFPQSAPHGVVFLHVTYVPAQEKNFTTAPAICHDGKAHFPREGVFVSNGTHWFVTQRNFYEPQIITTDNTFVSGNCDVVIGIVNNTVYDPLQPELDSFKEELDKYFKNHTSPDVDLGDISGINASVVNIQKEIDRLNEVAKNLNESLIDLQELGKYEQYIKGGSGYIPEAPRDGQAYVRKDGEWVLLSTFL

SEQ ID NO: 6488 - protein, 1241 aa, Artificial Sequence
  SARS-CoV-2/Iceland/189/2020__EPI_ISL_417709 spike protein (1-1211)(A972C_R995C) Foldon construct
MFVFLVLLPLVSSQCVNLTTRTQLPPAYTNSFTRGVYYPDKVFRSSVLHSTQDLFLPFFSNVTWFHAIHVSGTNGTKRFDNPVLPFNDGVYFASTEKSNIIRGWIFGTTLDSKTQSLLIVNNATNVVIKVCEFQFCNDPFLGVYYHKNNKSWMESEFRVYSSANNCTFEYVSQPFLMDLEGKQGNFKNLREFVFKNIDGYFKIYSKHTPINLVRDLPQGFSALEPLVDLPIGINITRFQTLLALHRSYLTPGDSSSGWTAGAAAYYVGYLQPRTFLLKYNENGTITDAVDCALDPLSETKCTLKSFTVEKGIYQTSNFRVQPTESIVRFPNITNLCPFGEVFNATRFASVYAWNRKRISNCVADYSVLYNSASFSTFKCYGVSPTKLNDLCFTNVYADSFVIRGDEVRQIAPGQTGKIADYNYKLPDDFTGCVIAWNSNNLDSKVGGNYNYLYRLFRKSNLKPFERDISTEIYQAGSTPCNGVEGFNCYFPLQSYGFQPTNGVGYQPYRVVVLSFELLHAPATVCGPKKSTNLVKNKCVNFNFNGLTGTGVLTESNKKFLPFQQFGRDIADTTDAVRDPQTLEILDITPCSFGGVSVITPGTNTSNQVAVLYQGVNCTEVPVAIHADQLTPTWRVYSTGSNVFQTRAGCLIGAEHVNNSYECDIPIGAGICASYQTQTNSPRRARSVASQSIIAYTMSLGAENSVAYSNNSIAIPTNFTISVTTEILPVSMTKTSVDCTMYICGDSTECSNLLLQYGSFCTQLNRALTGIAVEQDKNTQEVFAQVKQIYKTPPIKDFGGFNFSQILPDPSKPSKRSFIEDLLFNKVTLADAGFTKQYGDCLGDIAARDLICAQKFNGLTVLPPLLTDEMIAQYTSALLAGTITSGWTFGAGAALQIPFAMQMAYRFNGIGVTQNVLYENQKLIANQFNSAIGKIQDSLSSTASALGKLQDVVNQNAQALNTLVKQLSSNFGCISSVLNDILSRLDKVEAEVQIDCLITGRLQSLQTYVTQQLIRAAEIRASANLAATKMSECVLGQSKRVDFCGKGYHLMSFPQSAPHGVVFLHVTYVPAQEKNFTTAPAICHDGKAHFPREGVFVSNGTHWFVTQRNFYEPQIITTDNTFVSGNCDVVIGIVNNTVYDPLQPELDSFKEELDKYFKNHTSPDVDLGDISGINASVVNIQKEIDRLNEVAKNLNESLIDLQELGKYEQYIKGGSGYIPEAPRDGQAYVRKDGEWVLLSTFL

SEQ ID NO: 6489 - protein, 1241 aa, Artificial Sequence
  SARS-CoV-2/Australia/NSW56/2020__EPI_ISL_417408 spike protein (1-1211)(A972C_R995C) Foldon construct
MFVFLVLLPLVSSQCVNLTTRTQLPPAYTNSFTRGVYYPDKVFRSSVLHSTQDLFLPFFSNVTWFHAIHVSGTNGTKRFDNPVLPFNDGVYFASTEKSNIIRGWIFGTTLDSKTQSLLIVNNATNVVIKVCEFQFCNDPFLGVYYHKNNKSWMESEFRVYSSANNCTFEYVSQPFLMDLEGKQGNFKNLREFVFKNIDGYFKIYSKHTPINLVRDLPQGFSALEPLVDLPIGINITRFQTLLALHRSYLTPGDSSSGWTAGAAAYYVGYLQPRTFLLKYNENGTITDAVDCALDPLSETKCTLKSFTVEKGIYQTSNFRVQPTESIVRFPNITNLCPFGEVFNATRFASVYAWNRKRISNCVADYSVLYNSASFSTFKCYGVSPTKLNDLCFTNVYADSFVIRGDEVRQIAPGQTGKIADYNYKLPDDFTGCVIAWNSNNLDSKVGGNYNYLYRLFRKSNLKPFERDISTEIYQAGSTPCNGVEGFNCYFPLQSYGFQPTNGVGYQPYRVVVLSFELLHAPATVCGPKKSTNLVKNKCVNFNFNGLTGTGVLTESNKKFLPFQQFGRDIADTTDAVRDPQTLEILDITPCSFGGVSVITPGTNTSNQVAVLYQDVNCTEVPVAIHADQLTPTWRVYSTGSNVFQTRAGCLIGAEHVNNSYECDIPIGAGICASYQTQTNSPRRARSVASQSIIAYTMSLGAENSVAYSNNSIAIPTNFTISVTTEILPVSMTKTSVDCTMYICGDSTECSNLLLQYGSFCTQLNRALTGIAVEQDKNTQEVFAQVKQIYKTPPIKDFGGFNFSQILPDSSKPSKRSFIEDLLFNKVTLADAGFIKQYGDCLGDIAARDLICAQKFNGLTVLPPLLTDEMIAQYTSALLAGTITSGWTFGAGAALQIPFAMQMAYRFNGIGVTQNVLYENQKLIANQFNSAIGKIQDSLSSTASALGKLQDVVNQNAQALNTLVKQLSSNFGCISSVLNDILSRLDKVEAEVQIDCLITGRLQSLQTYVTQQLIRAAEIRASANLAATKMSECVLGQSKRVDFCGKGYHLMSFPQSAPHGVVFLHVTYVPAQEKNFTTAPAICHDGKAHFPREGVFVSNGTHWFVTQRNFYEPQIITTDNTFVSGNCDVVIGIVNNTVYDPLQPELDSFKEELDKYFKNHTSPDVDLGDISGINASVVNIQKEIDRLNEVAKNLNESLIDLQELGKYEQYIKGGSGYIPEAPRDGQAYVRKDGEWVLLSTFL

SEQ ID NO: 6490 - protein, 1241 aa, Artificial Sequence
  SARS-CoV-2/Iceland/280/2020__EPI_ISL_417608 spike protein (1-1211)(A972C_R995C) Foldon construct
MFVFLVLLPLVSSQCVNLTTRTQLPPAYTNSFTRGVYYPDKVFRSSVLHSTQDLFLPFFSNVTWFHAIHVSGTNGTKRFDNPVLPFNDGVYFASTEKSNIIRGWIFGTTLDSKTQSLLIVNNATNVVIKVCEFQFCNDPFLGVYYHKNNKSWMESEFRVYSSANNCTFEYVSQPFLMDLEGKQGNFKNLREFVFKNIDGYFKIYSKHTPINLVRDLPQGFSALEPLVDLPIGINITRFQTLLALHRSYLTPGDSSSGWTAGAAAYYVGYLQPRTFLLKYNENGTITDAVDCALDPLSETKCTLKSFTVEKGIYQTSNFRVQPTESIVRFPNITNLCPFGEVFNATRFASVYAWNRKRISNCVADYSVLYNSASFSTFKCYGVSPTKLNDLCFTNVYADSFVIRGDEVRQIAPGQTGKIADYNYKLPDDFTGCVIAWNSNNLDSKVGGNYNYLYRLFRKSNLKPFERDISTEIYQAGSTPCNGVEGFNCYFPLQSYGFQPTNGVGYQPYRVVVLSFELLHAPATVCGPKKSTNLVKNKCVNFNFNGLTGTGVLTESNKKFLPFQQFGRDIADTTDAVRDPQTLEILDITPCSFGGVSVITPGTNTSNQVAVLYQGVNCTEVPVAIHADQLTPTWRVYSTGSNVFQTRAGCLIGAEHVNNSYECDIPIGAGICASYHTQTNSPRRARSVASQSIIAYTMSLGAENSVAYSNNSIAIPTNFTISVTTEILPVSMTKTSVDCTMYICGDSTECSNLLLQYGSFCTQLNRALTGIAVEQDKNTQEVFAQVKQIYKTPPIKDFGGFNFSQILPDPSKPSKRSFIEDLLFNKVTLADAGFIKQYGDCLGDIAARDLICAQKFNGLTVLPPLLTDEMIAQYTSALLAGTITSGWTFGAGAALQIPFAMQMAYRFNGIGVTQNVLYENQKLIANQFNSAIGKIQDSLSSTASALGKLQDVVNQNAQALNTLVKQLSSNFGCISSVLNDILSRLDKVEAEVQIDCLITGRLQSLQTYVTQQLIRAAEIRASANLAATKMSECVLGQSKRVDFCGKGYHLMSFPQSAPHGVVFLHVTYVPAQEKNFTTAPAICHDGKAHFPREGVFVSNGTHWFVTQRNFYEPQIITTDNTFVSGNCDVVIGIVNNTVYDPLQPELDSFKEELDKYFKNHTSPDVDLGDISGINASVVNIQKEIDRLNEVAKNLNESLIDLQELGKYEQYIKGGSGYIPEAPRDGQAYVRKDGEWVLLSTFL

SEQ ID NO: 6491 - protein, 1241 aa, Artificial Sequence; identical to SEQ ID NO: 6446
  SARS-CoV-2/Iceland/247/2020__EPI_ISL_417575 spike protein (1-1211)(A972C_R995C) Foldon construct

SEQ ID NO: 6492 - protein, 1241 aa, Artificial Sequence
  SARS-CoV-2/Iceland/238/2020__EPI_ISL_417566 spike protein (1-1211)(A972C_R995C) Foldon construct
MFVFLVLLPLVSSQCVNLTTRTQLPPAYTNSFTRGVYYPDKVFRSSVLHSTQDLFLPFFSNVTWFHAIHVSGTNGTKRFDNPVLPFNDGVYFASTEKSNIIRGWIFGTTLDSKTQSLLIVNNATNVVIKVCEFQFCNDPFLGVYYHKNNKSWMESEFRVYSSANNCTFEYVSQPFLMDLEGKQGNFKNLREFVFKNIDGYFKIYSKHTPINLVRDLPQGFSALEPLVDLPIGINITRFQTLLALHRSYLTPGDSSSGWTAGAAAYYVGYLQPRTFLLKYNENGTITDAVDCALDPLSETKCTLKSFTVEKGIYQTSNFRVQPTESIVRFPNITNLCPFGEVFNATRFASVYAWNRKRISNCVADYSVLYNSASFSTFKCYGVSPTKLNDLCFTNVYADSFVIRGDEVRQIAPGQTGKIADYNYKLPDDFTGCVIAWNSNNLDSKVGGNYNYLYRLFRKSNLKPFERDISTEIYQAGSTPCNGVEGFNCYFPLQSYGFQPTNGVGYQPYRVVVLSFELLHAPATVCGPKKSTNLVKNKCVNFNFNGLTGTGVLTESNKKFLPFQQFGRDIADTTDAVRDPQTLEILDITPCSFGGVSVITPGTNTSNQVAVLYQGVNCTEVPVAIHADQLTPTWRVYSTGSNVFQTRAGCLIGAEHVNNSYECDIPIGAGICASYQTQTNSPRRARSVASQSIIAYTMSLGAENSVAYSNNSIAIPTNFTISVTTEILPVSMTKTSVDCTMYICGDSTECSNLLLQYGSFCTQLNRALTGIAVEQDKNTQEVFAQVKQIYKTPPIKDFGGFNFSQILPDPSKPSKRSFIEDLLFNKVTLADVGFIKQYGDCLGDIAARDLICAQKFNGLTVLPPLLTDEMIAQYTSALLAGTITSGWTFGAGAALQIPFAMQMAYRFNGIGVTQNVLYENQKLIANQFNSAIGKIQDSLSSTASALGKLQDVVNQNAQALNTLVKQLSSNFGCISSVLNDILSRLDKVEAEVQIDCLITGRLQSLQTYVTQQLIRAAEIRASANLAATKMSECVLGQSKRVDFCGKGYHLMSFPQSAPHGVVFLHVTYVPAQEKNFTTAPAICHDGKAHFPREGVFVSNGTHWFVTQRNFYEPQIITTDNTFVSGNCDVVIGIVNNTVYDPLQPELDSFKEELDKYFKNHTSPDVDLGDISGINASVVNIQKEIDRLNEVAKNLNESLIDLQELGKYEQYIKGGSGYIPEAPRDGQAYVRKDGEWVLLSTFL

SEQ ID NO: 6493 - protein, 1241 aa, Artificial Sequence
  SARS-CoV-2/Greece/16/2020__EPI_ISL_418265 spike protein (1-1211)(A972C_R995C) Foldon construct
MFVFLVLLPLVSSQCVNLTTRTQLPPAYTNSFTRGVYYPDKVFRSSVLHSTQDLFLPFFSNVTWFHAIHVSGTNGTKRFDNPVLPFNDGVYFASTEKSNIIRGWIFGTTLDSKTQSLLIVNNATNVVIKVCEFQFCNDPFLGVYYHKNNKSWMESEFRVYSSANNCTFEYVSQPFLMDLEGKQGNFKNLREFVFKNVDGYFKIYSKHTPINLVRDLPQGFSALEPLVDLPIGINITRFQTLLALHRSYLTPGDSSSGWTAGAAAYYVGYLQPRTFLLKYNENGTITDAVDCALDPLSETKCTLKSFTVEKGIYQTSNFRVQPTESIVRFPNITNLCPFGEVFNATRFASVYAWNRKRISNCVADYSVLYNSASFSTFKCYGVSPTKLNDLCFTNVYADSFVIRGDEVRQIAPGQTGKIADYNYKLPDDFTGCVIAWNSNNLDSKVGGNYNYLYRLFRKSNLKPFERDISTEIYQAGSTPCNGVEGFNCYFPLQSYGFQPTNGVGYQPYRVVVLSFELLHAPATVCGPKKSTNLVKNKCVNFNFNGLTGTGVLTESNKKFLPFQQFGRDIADTTDAVRDPQTLEILDITPCSFGGVSVITPGTNTSNQVAVLYQDVNCTEVPVAIHADQLTPTWRVYSTGSNVFQTRAGCLIGAEHVNNSYECDIPIGAGICASYQTQTNSPRRARSVASQSIIAYTMSLGAENSVAYSNNSIAIPTNFTISVTTEILPVSMTKTSVDCTMYICGDSTECSNLLLQYGSFCTQLNRALTGIAVEQDKNTQEVFAQVKQIYKTPPIKDFGGFNFSQILPDPSKPSKRSFIEDLLFNKVTLADAGFIKQYGDCLGDIAARDLICAQKFNGLTVLPPLLTDEMIAQYTSALLAGTITSGWTFGAGAALQIPFAMQMAYRFNGIGVTQNVLYENQKLIANQFNSAIGKIQDSLSSTASALGKLQDVVNQNAQALNTLVKQLSSNFGCISSVLNDILSRLDKVEAEVQIDCLITGRLQSLQTYVTQQLIRAAEIRASANLAATKMSECVLGQSKRVDFCGKGYHLMSFPQSAPHGVVFLHVTYVPAQEKNFTTAPAICHDGKAHFPREGVFVSNGTHWFVTQRNFYEPQIITTDNTFVSGNCDVVIGIVNNTVYDPLQPELDSFKEELDKYFKNHTSPDVDLGDISGINASVVNIQKEIDRLNEVAKNLNESLIDLQELGKYEQYIKGGSGYIPEAPRDGQAYVRKDGEWVLLSTFL

SEQ ID NO: 6494 - protein, 1241 aa, Artificial Sequence
  SARS-CoV-2/Iceland/319/2020__EPI_ISL_417648 spike protein (1-1211)(A972C_R995C) Foldon construct
MFVFLVLLPLVSSQCVNLTTRTQLPPAYTNSFTRGVYYPDKVFRSSVLHSTQDLFLPFFSNVTWFHAIHVSGTNGTKRFDNPVLPFNDGVYFASTEKSNIIRGWIFGTTLDSKTQSLLIVNNATNVVIKVCEFQFCNDPFLGVYYHKNNKSWMESEFRVYSSANNCTFEYVSQPFLIDLEGKQGNFKNLREFVFKNIDGYFKIYSKHTPINLVRDLPQGFSALEPLVDLPIGINITRFQTLLALHRSYLTPGDSSSGWTAGAAAYYVGYLQPRTFLLKYNENGTITDAVDCALDPLSETKCTLKSFTVEKGIYQTSNFRVQPTESIVRFPNITNLCPFGEVFNATRFASVYAWNRKRISNCVADYSVLYNSASFSTFKCYGVSPTKLNDLCFTNVYADSFVIRGDEVRQIAPGQTGKIADYNYKLPDDFTGCVIAWNSNNLDSKVGGNYNYLYRLFRKSNLKPFERDISTEIYQAGSTPCNGVEGFNCYFPLQSYGFQPTNGVGYQPYRVVVLSFELLHAPATVCGPKKSTNLVKNKCVNFNFNGLTGTGVLTESNKKFLPFQQFGRDIADTTDAVRDPQTLEILDITPCSFGGVSVITPGTNTSNQVAVLYQGVNCTEVPVAIHADQLTPTWRVYSTGSNVFQTRAGCLIGAEHVNNSYECDIPIGAGICASYQTQTNSPRRARSVASQSIIAYTMSLGAENSVAYSNNSIAIPTNFTISVTTEILPVSMTKTSVDCTMYICGDSTECSNLLLQYGSFCTQLNRALTGIAVEQDKNTQEVFAQVKQIYKTPPIKDFGGFNFSQILPDPSKPSKRSFIEDLLFNKVTLADAGFIKQYGDCLGDIAARDLICAQKFNGLTVLPPLLTDEMIAQYTSALLAGTITSGWTFGAGAALQIPFAMQMAYRFNGIGVTQNVLYENQKLIANQFNSAIGKIQDSLSSTASALGKLQDVVNQNAQALNTLVKQLSSNFGCISSVLNDILSRLDKVEAEVQIDCLITGRLQSLQTYVTQQLIRAAEIRASANLAATKMSECVLGQSKRVDFCGKGYHLMSFPQSAPHGVVFLHVTYVPAQEKNFTTAPAICHDGKAHFPREGVFVSNGTHWFVTQRNFYEPQIITTDNTFVSGNCDVVIGIVNNTVYDPLQPELDSFKEELDKYFKNHTSPDVDLGDISGINASVVNIQKEIDRLNEVAKNLNESLIDLQELGKYEQYIKGGSGYIPEAPRDGQAYVRKDGEWVLLSTFL

SEQ ID NO: 6495 - protein, 1241 aa, Artificial Sequence
  SARS-CoV-2/Congo/94/2020__EPI_ISL_417947 spike protein (1-1211)(A972C_R995C) Foldon construct
MFVFLVLLPLVSSQCVNLTTRTQLPPAYTNSFTRGVYYPDKVFRSSVLHSTQDLFLPFFSNVTWFHAIHVSGTNGTKRFDNPVLPFNDGVYFASTEKSNIIRGWIFGTTLDSKTQSLLIVNNATNVVIKVCEFQFCNDPFLGVYYHKNNKSWMESEFRVYSSANNCTFEYVSQPFLMDLEGKQGNFKNLREFVFKNIDGYFKIYSKHTPINLVRDLPQGFSALEPLVDLPIGINITRFQTLLALHRSYLTPGDSSSGWTAGAAAYYVGYLQPRTFLLKYNENGTITDAVDCALDPLSETKCTLKSFTVEKGIYQTSNFRVQPTESIVRFPNITNLCPFGEVFNATRFASVYAWNRKRISNCVADYSVLYNSASFSTFKCYGVSPTKLNDLCFTNVYADSFVIRGDEVRQIAPGQTGKIADYNYKLPDDFTGCVIAWNSNNLDSKVGGNYNYLYRLFRKSNLKPFERDISTEIYQAGSTPCNGVEGFNCYFPLQSYGFQPTNGVGYQPYRVVVLSFELLHAPATVCGPKKSTNLVKNKCVNFNFNGLTGTGVLTESNKKFLPFQQFGRDIADTTDAVRDPQTLEILDITPCSFGGVSVITPGTNTSNQVAVLYQGVNCTEVPVAIHADQLTPTWRVYSTGSNVFQTRAGCLIGAEHVNNSYECDIPIGAGICASYQTQTNSPRRARSVASQSIIAYTMSLGAENSVAYSNNSIAIPTNFTISVTTEILPVSMTKTSVDCTMYICGDSTECSNLLLQYGSFCTQLNRALTGIAVEQDKNTQEVFAQVKQIYKTPPIKDFGGFNFSQILPDPSKPSKRSFIEDILFNKVTLADAGFIKQYGDCLGDIAARDLICAQKFNGLTVLPPLLTDEMIAQYTSALLAGTITSGWTFGAGAALQIPFAMQMAYRFNGIGVTQNVLYENQKLIANQFNSAIGKIQDSLSSTASALGKLQDVVNQNAQALNTLVKQLSSNFGCISSVLNDILSRLDKVEAEVQIDCLITGRLQSLQTYVTQQLIRAAEIRASANLAATKMSECVLGQSKRVDFCGKGYHLMSFPQSAPHGVVFLHVTYVPAQEKNFTTAPAICHDGKAHFPREGVFVSNGTHWFVTQRNFYEPQIITTDNTFVSGNCDVVIGIVNNTVYDPLQPELDSFKEELDKYFKNHTSPDVDLGDISGINASVVNIQKEIDRLNEVAKNLNESLIDLQELGKYEQYIKGGSGYIPEAPRDGQAYVRKDGEWVLLSTFL

SEQ ID NO: 6496 - protein, 1241 aa, Artificial Sequence
  SARS-CoV-2/Congo/158/2020__EPI_ISL_417950 spike protein (1-1211)(A972C_R995C) Foldon construct
MFVFLVLLPLVSSQCVNLTTRTQLPPAYTNSFTRGVYYPDKVFRSSVLHSTQDLFLPFFSNVTWFHAIHVSGTNGTKRFDNPVLPFNDGVYFASTEKSNIIRGWIFGTTLDSKTQSLLIVNNATNVVIKVCEFQFCNDPFLGVYYHKNNKSWMESEFRVYSSANNCTFEYVSQPFLMDLEGKQGNFKNLREFVFKNIDGYFKIYSKHTPINLVRDLPQGFSALEPLVDLPIGINITRFQTLLALHRSYLTPGDSSSGWTAGAAAYYVGYLQPRTFLLKYNENGTITDAVDCALDPLSETKCTLKSFTVEKGIYQTSNFRVQPTESIVRFPNITNLCPFGEVFNATRFASVYAWNRKRISNCVADYSVLYNSASFSTFKCYGVSPTKLNDLCFTNVYADSFVIRGDEVRQIAPGQTGKIADYNYKLPDDFTGCVIAWNSNNLDSKVGGNYNYLYRLFRKSNLKPFERDISTEIYQAGSTPCNGVEGFNCYFPLQSYGFQPTNGVGYQPYRVVVLSFELLHAPATVCGPKKSTNLVKNKCVNFNFNGLTGTGVLTESNKKFLPFQQFGRDIADTTDAVRDPQTLEILDITPCSFGGVSVITPGTNTSNQVAVLYQDVNCTEVPVAIHADQLTPTWRVYSTGSNVFQTRAGCLIGAEHVNNSYECDIPIGAGICASYQTQTNSPRRARSVASQSIIAYTMSLGAENSVAYSNNSIAIPTNFTISVTTEILPVSMTKTSVDCTMYICGDSTECSNLLLQYGSFCTQLNRALTGIAVEQDKNTQEVFAQVKQIYKTPPIKDFGGFNFSQILPDPSKPSKRSFIEDLLFNKVTLADAGFIKQYGDCLGDIAARDLICAQKFNGLTVLPPLLTDEMIAQYTSALLAGTITSGWTFGAGAALQIPFAMQMAYRFNGIGVTQNVLYENQKLIANQFNSAIGKIQDSLSSTASALGKLQDVVNQNAQALNTLVKQLSSNFGCISSVLNDILSRLDKVEAEVQIDCLITGRLQSLQTYVTQQLIRAAEIRASANLAATKMSECVLGQSKRVDFCGKGYHLMSFPQSAPHGVVFLHVTYVPAQEKNFTTAPAICHDGKAHFPREGVFVSNGTHWFVTQRNFYEPQIITTDNTFLSGNCDVVIGIVNNTVYDPLQPELDSFKEELDKYFKNHTSPDVDLGDISGINASVVNIQKEIDRLNEVAKNLNESLIDLQELGKYEQYIKGGSGYIPEAPRDGQAYVRKDGEWVLLSTFL

SEQ ID NO: 6497 - protein, 1241 aa, Artificial Sequence
  SARS-CoV-2/USA/UT-00034/2020__EPI_ISL_417977 spike protein (1-1211)(A972C_R995C) Foldon construct
MFVFLVLLPLVSSQCVNLTTRTQLPPAYTNSFTRGVYYPDKVFRSSVLHSTQDLFLPFFSNVTWFHAIHVSGTNGTKRFDNPVLPFNDGVYFASTEKSNIIRGWIFGTTLDSKTQSLLIVNNATNVVIKVCEFQFCNDPFLGVYYYKNNKSWMESEFRVYSSANNCTFEYVSQPFLMDLEGKQGNFKNLREFVFKNIDGYFKIYSKHTPINLVRDLPQGFSALEPLVDLPIGINITRFQTLLALHRSYLTPGDSSSGWTAGAAAYYVGYLQPRTFLLKYNENGTITDAVDCALDPLSETKCTLKSFTVEKGIYQTSNFRVQPTESIVRFPNITNLCPFGEVFNATRFASVYAWNRKRISNCVADYSVLYNSASFSTFKCYGVSPTKLNDLCFTNVYADSFVIRGDEVRQIAPGQTGKIADYNYKLPDDFTGCVIAWNSNNLDSKVGGNYNYLYRLFRKSNLKPFERDISTEIYQAGSTPCNGVEGFNCYFPLQSYGFQPTNGVGYQPYRVVVLSFELLHAPATVCGPKKSTNLVKNKCVNFNFNGLTGTGVLTESNKKFLPFQQFGRDIADTTDAVRDPQTLEILDITPCSFGGVSVITPGTNTSNQVAVLYQGVNCTEVPVAIHADQLTPTWRVYSTGSNVFQTRAGCLIGAEHVNNSYECDIPIGAGICASYQTQTNSPRRARSVASQSIIAYTMSLGAENSVAYSNNSIAIPTNFTISVTTEILPVSMTKTSVDCTMYICGDSTECSNLLLQYGSFCTQLNRALTGIAVEQDKNTQEVFAQVKQIYKTPPIKDFGGFNFSQILPDPSKPSKRSFIEDLLFNKVTLADAGFIKQYGDCLGDIAARDLICAQKFNGLTVLPPLLTDEMIAQYTSALLAGTITSGWTFGAGAALQIPFAMQMAYRFNGIGVTQNVLYENQKLIANQFNSAIGKIQDSLSSTASALGKLQDVVNQNAQALNTLVKQLSSNFGCISSVLNDILSRLDKVEAEVQIDCLITGRLQSLQTYVTQQLIRAAEIRASANLAATKMSECVLGQSKRVDFCGKGYHLMSFPQSAPHGVVFLHVTYVPAQEKNFTTAPAICHDGKAHFPREGVFVSNGTHWFVTQRNFYEPQIITTDNTFVSGNCDVVIGIVNNTVYDPLQPELDSFKEELDKYFKNHTSPDVDLGDISGINASVVNIQKEIDRLNEVAKNLNESLIDLQELGKYEQYIKGGSGYIPEAPRDGQAYVRKDGEWVLLSTFL

SEQ ID NO: 6498 - protein, 1241 aa, Artificial Sequence
  SARS-CoV-2/USA/UT-00033/2020__EPI_ISL_417976 spike protein (1-1211)(A972C_R995C) Foldon construct
MFVFLVLLPLVSSQCVNLTTRTQLPPAYTNSFTRGVYYPDKVFRSSVLHSTQDLFLPFFSNVTWFHAIHVSGTNGTKRFDNPVLPFNDGVYFASTEKSNIIRGWIFGTTLDSKTQSLLIVNNATNVVIKVCEFQFCNDPFLGVYYHKNNKSWMESEFRVYSSANNCTFEYVSQPFLMDLEGKQGNFKNLREFVFKNIDGYFKIYSKHTPINLVRDLPQGFSALEPLVDLPIGINITRFQTLLALHRSYLTPGDSSSGLTAGAAAYYVGYLQPRTFLLKYNENGTITDAVDCALDPLSETKCTLKSFTVEKGIYQTSNFRVQPTESIVRFPNITNLCPFGEVFNATRFASVYAWNRKRISNCVADYSVLYNSASFSTFKCYGVSPTKLNDLCFTNVYADSFVIRGDEVRQIAPGQTGKIADYNYKLPDDFTGCVIAWNSNNLDSKVGGNYNYLYRLFRKSNLKPFERDISTEIYQAGSTPCNGVEGFNCYFPLQSYGFQPTNGVGYQPYRVVVLSFELLHAPATVCGPKKSTNLVKNKCVNFNFNGLTGTGVLTESNKKFLPFQQFGRDIADTTDAVRDPQTLEILDITPCSFGGVSVITPGTNTSNQVAVLYQGVNCTEVPVAIHADQLTPTWRVYSTGSNVFQTRAGCLIGAEHVNNSYECDIPIGAGICASYQTQTNSPRRARSVASQSIIAYTMSLGAENSVAYSNNSIAIPTNFTISVTTEILPVSMTKTSVDCTMYICGDSTECSNLLLQYGSFCTQLNRALTGIAVEQDKNTQEVFAQVKQIYKTPPIKDFGGFNFSQILPDPSKPSKRSFIEDLLFNKVTLADAGFIKQYGDCLGDIAARDLICAQKFNGLTVLPPLLTDEMIAQYTSALLAGTITSGWTFGAGAALQIPFAMQMAYRFNGIGVTQNVLYENQKLIANQFNSAIGKIQDSLSSTASALGKLQDVVNQNAQALNTLVKQLSSNFGCISSVLNDILSRLDKVEAEVQIDCLITGRLQSLQTYVTQQLIRAAEIRASANLAATKMSECVLGQSKRVDFCGKGYHLMSFPQSAPHGVVFLHVTYVPAQEKNFTTAPAICHDGKAHFPREGVFVSNGTHWFVTQRNFYEPQIITTDNTFVSGNCDVVIGIVNNTVYDPLQPELDSFKEELDKYFKNHTSPDVDLGDISGINASVVNIQKEIDRLNEVAKNLNESLIDLQELGKYEQYIKGGSGYIPEAPRDGQAYVRKDGEWVLLSTFL

SEQ ID NO: 6499 - protein, 1241 aa, Artificial Sequence
  SARS-CoV-2/USA/WI-13/2020__EPI_ISL_417516 spike protein (1-1211)(A972C_R995C) Foldon construct
MFVFLVLLPLVSSQCVNLTTRTQLPPAYTNSFTRGVYYPDKVFRSSVLHSTQDLFLPFFSNVTWFHAIHVSGTNGTKRFDNPVLPFNDGVYFASTEKSNIIRGWIFGTTLDSKTQSLLIVNNATNVVIKVCEFQFCNDPFLGVYYHKNNKSWMESEFRVYSSANNCTFEYVSQPFLMDLEGKQGNFKNLREFVFKNIDGYFKIYSKHTPINLVRDLPQGFSALEPLVDLPIGINITRFQTLLALHRSYLTPGDSSSGWTAGAAAYYVGYLQPRTFLLKYNENGTITDAVDCALDPLSETKCTLKSFTVEKGIYQTSNFRVLPTESIVRFPNITNLCPFGEVFNATRFASVYAWNRKRISNCVADYSVLYNSASFSTFKCYGVSPTKLNDLCFTNVYADSFVIRGDEVRQIAPGQTGKIADYNYKLPDDFTGCVIAWNSNNLDSKVGGNYNYLYRLFRKSNLKPFERDISTEIYQAGSTPCNGVEGFNCYFPLQSYGFQPTNGVGYQPYRVVVLSFELLHAPATVCGPKKSTNLVKNKCVNFNFNGLTGTGVLTESNKKFLPFQQFGRDIADTTDAVRDPQTLEILDITPCSFGGVSVITPGTNTSNQVAVLYQGVNCTEVPVAIHADQLTPTWRVYSTGSNVFQTRAGCLIGAEHVNNSYECDIPIGAGICASYQTQTNSPRRARSVASQSIIAYTMSLGAENSVAYSNNSIAIPTNFTISVTTEILPVSMTKTSVDCTMYICGDSTECSNLLLQYGSFCTQLNRALTGIAVEQDKNTQEVFAQVKQIYKTPPIKDFGGFNFSQILPDPSKPSKRSFIEDLLFNKVTLADAGFIKQYGDCLGDIAARDLICAQKFNGLTVLPPLLTDEMIAQYTSALLAGTITSGWTFGAGAALQIPFAMQMAYRFNGIGVTQNVLYENQKLIANQFNSAIGKIQDSLSSTASALGKLQDVVNQNAQALNTLVKQLSSNFGCISSVLNDILSRLDKVEAEVQIDCLITGRLQSLQTYVTQQLIRAAEIRASANLAATKMSECVLGQSKRVDFCGKGYHLMSFPQSAPHGVVFLHVTYVPAQEKNFTTAPAICHDGKAHFPREGVFVSNGTHWFVTQRNFYEPQIITTDNTFVSGNCDVVIGIVNNTVYDPLQPELDSFKEELDKYFKNHTSPDVDLGDISGINASVVNIQKEIDRLNEVAKNLNESLIDLQELGKYEQYIKGGSGYIPEAPRDGQAYVRKDGEWVLLSTFL

SEQ ID NO: 6500 - protein, 1240 aa, Artificial Sequence
  SARS-CoV-2/India/1-27/2020__EPI_ISL_413522 spike protein (1-1210)(A971C_R994C) Foldon construct
MFVFLVLLPLVSSQCVNLTTRTQLPPAYTNSFTRGVYYPDKVFRSSVLHSTQDLFLPFFSNVTWFHAIHVSGTNGTKRFDNPVLPFNDGVYFASTEKSNIIRGWIFGTTLDSKTQSLLIVNNATNVVIKVCEFQFCNDPFLGVYHKNNKSWMESEFRVYSSANNCTFEYVSQPFLMDLEGKQGNFKNLREFVFKNIDGYFKIYSKHTPINLVRDLPQGFSALEPLVDLPIGINITRFQTLLALHRSYLTPGDSSSGWTAGAAAYYVGYLQPRTFLLKYNENGTITDAVDCALDPLSETKCTLKSFTVEKGIYQTSNFRVQPTESIVRFPNITNLCPFGEVFNATRFASVYAWNRKRISNCVADYSVLYNSASFSTFKCYGVSPTKLNDLCFTNVYADSFVIRGDEVIQIAPGQTGKIADYNYKLPDDFTGCVIAWNSNNLDSKVGGNYNYLYRLFRKSNLKPFERDISTEIYQAGSTPCNGVEGFNCYFPLQSYGFQPTNGVGYQPYRVVVLSFELLHAPATVCGPKKSTNLVKNKCVNFNFNGLTGTGVLTESNKKFLPFQQFGRDIADTTDAVRDPQTLEILDITPCSFGGVSVITPGTNTSNQVAVLYQDVNCTEVPVAIHADQLTPTWRVYSTGSNVFQTRAGCLIGAEHVNNSYECDIPIGAGICASYQTQTNSPRRARSVASQSIIAYTMSLGAENSVAYSNNSIAIPTNFTISVTTEILPVSMTKTSVDCTMYICGDSTECSNLLLQYGSFCTQLNRALTGIAVEQDKNTQEVFAQVKQIYKTPPIKDFGGFNFSQILPDPSKPSKRSFIEDLLFNKVTLADAGFIKQYGDCLGDIAARDLICAQKFNGLTVLPPLLTDEMIAQYTSALLAGTITSGWTFGAGAALQIPFAMQMAYRFNGIGVTQNVLYENQKLIANQFNSAIGKIQDSLSSTASALGKLQDVVNQNAQALNTLVKQLSSNFGCISSVLNDILSRLDKVEAEVQIDCLITGRLQSLQTYVTQQLIRAAEIRASANLAATKMSECVLGQSKRVDFCGKGYHLMSFPQSAPHGVVFLHVTYVPAQEKNFTTAPAICHDGKAHFPREGVFVSNGTHWFVTQRNFYEPQIITTDNTFVSGNCDVVIGIVNNTVYDPLQPELDSFKEELDKYFKNHTSPDVDLGDISGINASVVNIQKEIDRLNEVAKNLNESLIDLQELGKYEQYIKGGSGYIPEAPRDGQAYVRKDGEWVLLSTFL

SEQ ID NO: 6501 - protein, 1235 aa, Artificial Sequence
  SARS-CoV-2/pangolin/Guangxi/P4L/2017__EPI_ISL_410538 spike protein (1-1205)(A966C_R989C) Foldon construct
MFVFLFVLPLVSSQCVNLTTRTGIPPGYTNSSTRGVYYPDKVFRSSILHLTQDLFLPFFSNVTWFNTINYQGGFKKFDNPVLPFNDGVYFASTEKSNIIRGWIFGTTLDARTQSLLIVNNATNVVIKVCEFQFCTDPFLGVYYHNNNKTWVENEFRVYSSANNCTFEYISQPFLMDLEGKQGNFKNLREFVFKNVDGYFKIYSKHTPIDLVRDLPRGFAALEPLVDLPIGINITRFQTLLALHRSYLTPGNLESGWTTGAAAYYVGYLQQRTFLLSYNQNGTITDAVDCSLDPLSETKCTLKSLTVEKGIYQTSNFRVQPTISIVRFPNITNLCPFGEVFNASKFASVYAWNRKRISNCVADYSVLYNSTSFSTFKCYGVSPTKLNDLCFTNVYADSFVVKGDEVRQIAPGQTGVIADYNYKLPDDFTGCVIAWNSVKQDALTGGNYGYLYRLFRKSKLKPFERDISTEIYQAGSTPCNGQVGLNCYYPLERYGFHPTTGVNYQPFRVVVLSFELLNGPATVCGPKLSTTLVKDKCVNFNFNGLTGTGVLTTSKKQFLPFQQFGRDISDTTDAVRDPQTLEILDITPCSFGGVSVITPGTNTSNQVAVLYQDVNCTEVPMAIHAEQLTPAWRVYSAGANVFQTRAGCLVGAEHVNNSYECDIPVGAGICASYHSMSSLRSVNQRSIIAYTMSLGAENSVAYSNNSIAIPTNFTISVTTEILPVSMTKTSVDCTMYICGDSIECSNLLLQYGSFCTQLNRALTGIAVEQDKNTQEVFAQVKQIYKTPPIKDFGGFNFSQILPDPSKPSKRSFIEDLLFNKVTLADAGFIKQYGDCLGDIAARDLICAQKFNGLTVLPPLLTDEMIAQYTSALLAGTITSGWTFGAGAALQIPFAMQMAYRFNGIGVTQNVLYENQKLIANQFNSAIGKIQDSLSSTASALGKLQDVVNQNAQALNTLVKQLSSNFGCISSVLNDILSRLDKVEAEVQIDCLITGRLQSLQTYVTQQLIRAAEIRASANLAATKMSECVLGQSKRVDFCGKGYHLMSFPQSAPHGVVFLHVTYVPAQEKNFTTAPAICHEGKAHFPREGVFVSNGTHWFITQRNFYEPQIITTDNTFVSGSCDVVIGIVNNTVYDPLQPELDSFKEELDKYFKNHTSPDVDLGDISGINASVVNIQKEIDRLNEVAKNLNESPIDLQELGKYEQYIKGGSGYIPEAPRDGQAYVRKDGEWVLLSTFL

SEQ ID NO: 6502 - protein, 1235 aa, Artificial Sequence
  SARS-CoV-2/pangolin/Guangxi/P5L/2017__EPI_ISL_410540 spike protein (1-1205)(A966C_R989C) Foldon construct
MFVFLFVLPLVSSQCVNLTTRTGIPPGYTNSSTRGVYYPDKVFRSSILHLTQDLFLPFFSNVTWFNTINYQGGFKKFDNPVLPFNDGVYFASTEKSNIIRGWIFGTTLDARTQSLLIVNNATNVVIKVCEFQFCTDPFLGVYYHNNNKTWVENEFRVYSSANNCTFEYISQPFLMDLEGKQGNFKNLREFVFKNVDGYFKIYSKHTPIDLVRDLPRGFAALEPLVDLPIGINITRFQTLLALHRSYLTPGKLESGWTTGAAAYYVGYLQQRTFLLSYNQNGTITDAVDCSLDPLSETKCTLKSLTVEKGIYQTSNFRVQPTISIVRFPNITNLCPFGEVFNASKFASVYAWNRKRISNCVADYSVLYNSTSFSTFKCYGVSPTKLNDLCFTNVYADSFVVKGDEVRQIAPGQTGVIADYNYKLPDDFTGCVIAWNSVKQDALTGGNYGYLYRLFRKSKLKPFERDISTEIYQAGSTPCNGQVGLNCYYPLERYGFHPTTGVNYQPFRVVVLSFELLNGPATVCGPKLSTTLVKDKCVNFNFNGLTGTGVLTTSKKQFLPFQQFGRDISDTTDAVRDPQTLEILDITPCSFGGVSVITPGTNTSNQVAVLYQDVNCTEVPMAIHAEQLTPAWRVYSAGANVFQTRAGCLVGAEHVNNSYECDIPVGAGICASYHSMSSFRSVNQRSIIAYTMSLGAENSVAYSNNSIAIPTNFTISVTTEILPVSMTKTSVDCTMYICGDSIECSNLLLQYGSFCTQLNRALTGIAVEQDKNTQEVFAQVKQIYKTPPIKDFGGFNFSQILPDPSKPSKRSFIEDLLFNKVTLADAGFIKQYGDCLGDIAARDLICAQKFNGLTVLPPLLTDEMIAQYTSALLAGTITSGWTFGAGAALQIPFAMQMAYRFNGIGVTQNVLYENQKLIANQFNSAIGKIQDSLSSTASALGKLQDVVNQNAQALNTLVKQLSSNFGCISSVLNDILSRLDKVEAEVQIDCLITGRLQSLQTYVTQQLIRAAEIRASANLAATKMSECVLGQSKRVDFCGKGYHLMSFPQSAPHGVVFLHVTYVPAQEKNFTTAPAICHEGKAHFPREGVFVSNGTHWFITQRNFYEPQIITTDNTFVSGSCDVVIGIVNNTVYDPLQPELDSFKEELDKYFKNHTSPDVDLGDISGINASVVNIQKEIDRLNEVAKNLNESLIDLQELGKYEQYIKGGSGYIPEAPRDGQAYVRKDGEWVLLSTFL

SEQ ID NO: 6503 - protein, 1235 aa, Artificial Sequence
  SARS-CoV-2/pangolin/Guangxi/P5E/2017__EPI_ISL_410541 spike protein (1-1205)(A966C_R989C) Foldon construct
MFVFLFVLPLVSSQCVNLTTRTGIPPGYTNSSTRGVYYPDKVFRSSILHLTQDLFLPFFSNVTWFNTITYQGGSKKFDNPVLPFNDGVYFASTEKSNIIRGWIFGTTLDARTQSLLIVNNATNVVIKVCEFQFCTDPFLGVYYHNNNKTWVENEFRVYSSANNCTFEYISQPFLMDLEGKQGNFKNLREFVFKNVDGYFKIYSKHTPIDLVRDLPRGFAALEPLVDLPIGINITRFQTLLALHRSYLTPGKLESGWTTGAAAYYVGYLQQRTFLLSYNQNGTITDAVDCSLDPLSETKCTLKSLTVEKGIYQTSNFRVQPTISIVRFPNITNLCPFGEVFNASKFASVYAWNRKRISNCVADYSVLYNSTSFSTFKCYGVSPTKLNDLCFTNVYADSFVVKGDEVRQIAPGQTGVIADYNYKLPDDFTGCVIAWNSVKQDALTGDNYGYLYRLFRKSKLKPFERDISTEIYQAGSTPCNGQVGLNCYYPLERYGFHPTTGVNYQPFRVVVLSFELLNGPATVCGPKLSTTLVKDKCVNFNFNGLTGTGVLTTSKKQFLPFQQFGRDISDTTDAVRDPQTLEILDITPCSFGGVSVITPGTNTSNQVAVLYQDVNCTEVPMAIHAEQLTPAWRVYSAGANVFQTRAGCLVGAEHVNNSYECDIPVGAGICASYHSMSSFRSVNQRSIIAYTMSLGAENSVAYSNNSIAIPTNFTISVTTEILPVSMTKTSVDCTMYICGDSIECSNLLLQYGSFCTQLNRALTGIAVEQDKNTQEVFAQVKQIYKTPPIKDFGGFNFSQILPDPSKPSKRSFIEDLLFNKVTLADAGFIKQYGDCLGDIAARDLICAQKFNGLTVLPPLLTDEMIAQYTSALLAGTITSGWTFGAGAALQIPFAMQMAYRFNGIGVTQNVLYENQKLIANQFNSAIGKIQDSLSSTASALGKLQDVVNQNAQALNTLVKQLSSNFGCISSVLNDILSRLDKVEAEVQIDCLITGRLQSLQTYVTQQLIRAAEIRASANLAATKMSECVLGQSKRVDFCGKGYHLMSFPQSAPHGVVFLHVTYVPAQEKNFTTAPAICHEGKAHFPREGVFVSNGTHWFITQRNFYEPQIITTDNTFVSGSCDVVIGIVNNTVYDPLQPELDSFKEELDKYFKNHTSPDVDLGDISGINASVVNIQKEIDRLNEVAKNLNESLIDLQELGKYEQYIKGGSGYIPEAPRDGQAYVRKDGEWVLLSTFL

SEQ ID NO: 6504 - protein, 1233 aa, Artificial Sequence
  SARS-CoV-2/pangolin/Guangxi/P1E/2017__EPI_ISL_410539 spike protein (1-1203)(A964C_R987C) Foldon construct
MFVFLFVLPLVSSQCVNLTTRTGIQPGYTNSSTRGVYYPDKVFRSSILHLTQDLFLPFFSNVTWFNTINYQGGFKKFDNPVLPFNDGVYFASTEKSNIIRGWIFGTTLDARTQSLLIVNNATNVVIKVCEFQFCTDPFLGVYYHNNNKTWVENEFRVYSSANNCTFEYISQPFLMDLEGKQGNFKNLREFVFKNVDGYFKIYSKHTPIDLVRDLPRGFAALEPLVDLPIGINITRFQTLLALHRSYLTPGKLESGWTTGAAAYYVGYLQQRTFLLSYNQNGTITDAVDCSLDPLSETKCTLKSLTVEKGIYQTSNFRVQPTISIVRFPNITNLCPFGEVFNASKFASVYAWNRKRISNCVADYSVLYNSTSFSTFKCYGVSPTKLNDLCFTNVYADSFVVKGDEVRQIAPGQTGVIADYNYKLPDDFTGCVIAWNSVKQDALTGGNYLYRLFRKSKLKPFERDISTEIYQAGSTPCNGQVGLNCYYPLERYGFHPTTGVNYQPFRVVVLSFELLNGPATVCGPKLSTTLVKDKCVNFNFNGLTGTGVLTTSKKQFLPFQQFGRDISDTTDAVRDPQTLEILDITPCSFGGVSVITPGTNTSNQVAVLYQDVNCTEVPMAIHAEQLTPAWRVYSAGANVFQTRAGCLVGAEHVNNSYECDIPVGAGICASYHSMSSLRSVNQRSIIAYTMSLGAENSVAYSNNSIAIPTNFTISVTTEILPVSMTKTSVDCTMYICGDSIECSNLLLQYGSFCTQLNRALTGIAVEQDKNTQEVFAQVKQIYKTPPIKDFGGFNFSQILPDPSKPSKRSFIEDLLFNKVTLADAGFIKQYGDCLGDIAARDLICAQKFNGLTVLPPLLTDEMIAQYTSALLAGTITSGWTFGAGAALQIPFAMQMAYRFNGIGVTQNVLYENQKLIANQFNSAIGKIQDSLSSTASALGKLQDVVNQNAQALNTLVKQLSSNFGCISSVLNDILSRLDKVEAEVQIDCLITGRLQSLQTYVTQQLIRAAEIRASANLAATKMSECVLGQSKRVDFCGKGYHLMSFPQSAPHGVVFLHVTYVPAQEKNFTTAPAICHEGKAHFPREGVFVSNGTHWFITQRNFYEPQIITTDNTFVSGSCDVVIGIVNNTVYDPLQPELDSFKEELDKYFKNHTSPDVDLGDISGINASVVNIQKEIDRLNEVAKNLNESLIDLQELGKYEQYIKGGSGYIPEAPRDGQAYVRKDGEWVLLSTFL

SEQ ID NO: 6505 - protein, 1241 aa, Artificial Sequence
  SARS-CoV-2/Wuhan/WIV05/2019__EPI_ISL_402128 spike protein (1-1211)(A890C_V1040C) Foldon construct
MFVFLVLLPLVSSQCVNLTTRTQLPPAYTNSFTRGVYYPDKVFRSSVLHSTQDLFLPFFSNVTWFHAIHVSGTNGTKRFDNPVLPFNDGVYFASTEKSNIIRGWIFGTTLDSKTQSLLIVNNATNVVIKVCEFQFCNDPFLGVYYHKNNKSWMESEFRVYSSANNCTFEYVSQPFLMDLEGKQGNFKNLREFVFKNIDGYFKIYSKHTPINLVRDLPQGFSALEPLVDLPIGINITRFQTLLALHRSYLTPGDSSSGWTAGAAAYYVGYLQPRTFLLKYNENGTITDAVDCALDPLSETKCTLKSFTVEKGIYQTSNFRVQPTESIVRFPNITNLCPFGEVFNATRFASVYAWNRKRISNCVADYSVLYNSASFSTFKCYGVSPTKLNDLCFTNVYADSFVIRGDEVRQIAPGQTGKIADYNYKLPDDFTGCVIAWNSNNLDSKVGGNYNYLYRLFRKSNLKPFERDISTEIYQAGSTPCNGVEGFNCYFPLQSYGFQPTNGVGYQPYRVVVLSFELLHAPATVCGPKKSTNLVKNKCVNFNFNGLTGTGVLTESNKKFLPFQQFGRDIADTTDAVRDPQTLEILDITPCSFGGVSVITPGTNTSNQVAVLYQDVNCTEVPVAIHADQLTPTWRVYSTGSNVFQTRAGCLIGAEHVNNSYECDIPIGAGICASYQTQTNSPRRARSVASQSIIAYTMSLGAENSVAYSNNSIAIPTNFTISVTTEILPVSMTKTSVDCTMYICGDSTECSNLLLQYGSFCTQLNRALTGIAVEQDKNTQEVFAQVKQIYKTPPIKDFGGFNFSQILPDPSKPSKRSFIEDLLFNKVTLADAGFIKQYGDCLGDIAARDLICAQKFNGLTVLPPLLTDEMIAQYTSALLAGTITSGWTFGCGAALQIPFAMQMAYRFNGIGVTQNVLYENQKLIANQFNSAIGKIQDSLSSTASALGKLQDVVNQNAQALNTLVKQLSSNFGAISSVLNDILSRLDKVEAEVQIDRLITGRLQSLQTYVTQQLIRAAEIRASANLAATKMSECVLGQSKRCDFCGKGYHLMSFPQSAPHGVVFLHVTYVPAQEKNFTTAPAICHDGKAHFPREGVFVSNGTHWFVTQRNFYEPQIITTDNTFVSGNCDVVIGIVNNTVYDPLQPELDSFKEELDKYFKNHTSPDVDLGDISGINASVVNIQKEIDRLNEVAKNLNESLIDLQELGKYEQYIKGGSGYIPEAPRDGQAYVRKDGEWVLLSTFL

SEQ ID NO: 6506 - protein, 1237 aa, Artificial Sequence; identical to SEQ ID NO: 6238
  SARS-CoV-2/bat/Yunnan/RaTG13/2013__EPI_ISL_402131 spike protein (1-1207)(A886C_V1036C) Foldon construct

SEQ ID NO: 6507 - protein, 1241 aa, Artificial Sequence; identical to SEQ ID NO: 6239
  SARS-CoV-2/Wuhan/HBCDC-HB-01/2019__EPI_ISL_402132 spike protein (1-1211)(A890C_V1040C) Foldon construct

SEQ ID NO: 6508 - protein, 1241 aa, Artificial Sequence; identical to SEQ ID NO: 6240
  SARS-CoV-2/Guangdong/20SF028/2020__EPI_ISL_403936 spike protein (1-1211)(A890C_V1040C) Foldon construct

SEQ ID NO: 6509 - protein, 1241 aa, Artificial Sequence; identical to SEQ ID NO: 6241
  SARS-CoV-2/Shenzhen/SZTH-001/2020__EPI_ISL_406592 spike protein (1-1211)(A890C_V1040C) Foldon construct

SEQ ID NO: 6510 - protein, 1241 aa, Artificial Sequence; identical to SEQ ID NO: 6242
  SARS-CoV-2/Shenzhen/SZTH-004/2020__EPI_ISL_406595 spike protein (1-1211)(A890C_V1040C) Foldon construct

SEQ ID NO: 6511 - protein, 1241 aa, Artificial Sequence; identical to SEQ ID NO: 6243
  SARS-CoV-2/France/IDF0372/2020__EPI_ISL_406596 spike protein (1-1211)(A890C_V1040C) Foldon construct

SEQ ID NO: 6512 - protein, 1241 aa, Artificial Sequence; identical to SEQ ID NO: 6244
  SARS-CoV-2/Australia/VIC01/2020__EPI_ISL_406844 spike protein (1-1211)(A890C_V1040C) Foldon construct

SEQ ID NO: 6513 - protein, 1241 aa, Artificial Sequence; identical to SEQ ID NO: 6245
  SARS-CoV-2/Germany/BavPat1/2020__EPI_ISL_406862 spike protein (1-1211)(A890C_V1040C) Foldon construct

SEQ ID NO: 6514 - protein, 1241 aa, Artificial Sequence; identical to SEQ ID NO: 6246
  SARS-CoV-2/Wuhan/HBCDC-HB-02/2020__EPI_ISL_412978 spike protein (1-1211)(A890C_V1040C) Foldon construct

SEQ ID NO: 6515 - protein, 1241 aa, Artificial Sequence; identical to SEQ ID NO: 6247
  SARS-CoV-2/Australia/QLD02/2020__EPI_ISL_407896 spike protein (1-1211)(A890C_V1040C) Foldon construct

SEQ ID NO: 6516 - protein, 1241 aa, Artificial Sequence; identical to SEQ ID NO: 6248
  SARS-CoV-2/India/1-31/2020__EPI_ISL_413523 spike protein (1-1211)(A890C_V1040C) Foldon construct

SEQ ID NO: 6517 - protein, 1241 aa, Artificial Sequence; identical to SEQ ID NO: 6249
  SARS-CoV-2/Guangdong/GD2020087-P0008/2020__EPI_ISL_413863 spike protein (1-1211)(A890C_V1040C) Foldon construct

SEQ ID NO: 6518 - protein, 1241 aa, Artificial Sequence; identical to SEQ ID NO: 6250
  SARS-CoV-2/Sweden/01/2020__EPI_ISL_411951 spike protein (1-1211)(A890C_V1040C) Foldon construct

SEQ ID NO: 6519 - protein, 1241 aa, Artificial Sequence; identical to SEQ ID NO: 6251
  SARS-CoV-2/Tianmen/HBCDC-HB-07/2020__EPI_ISL_412983 spike protein (1-1211)(A890C_V1040C) Foldon construct

SEQ ID NO: 6520 - protein, 1241 aa, Artificial Sequence; identical to SEQ ID NO: 6252
  SARS-CoV-2/Hong Kong/case42_VM20002493/2020__EPI_ISL_414527 spike protein (1-1211)(A890C_V1040C) Foldon construct

SEQ ID NO: 6521 - protein, 1241 aa, Artificial Sequence; identical to SEQ ID NO: 6253
  SARS-CoV-2/USA/CruiseA-23/2020__EPI_ISL_414482 spike protein (1-1211)(A890C_V1040C) Foldon construct

SEQ ID NO: 6522 - protein, 1241 aa, Artificial Sequence; identical to SEQ ID NO: 6254
  SARS-CoV-2/Hong Kong/case85_VM20002868/2020__EPI_ISL_414519 spike protein (1-1211)(A890C_V1040C) Foldon construct

SEQ ID NO: 6523 - protein, 1241 aa, Artificial Sequence; identical to SEQ ID NO: 6245
  SARS-CoV-2/England/200990660/2020__EPI_ISL_414523 spike protein (1-1211)(A890C_V1040C) Foldon construct

SEQ ID NO: 6524 - protein, 1241 aa, Artificial Sequence; identical to SEQ ID NO: 6256
  SARS-CoV-2/Australia/NSW09/2020__EPI_ISL_413595 spike protein (1-1211)(A890C_V1040C) Foldon construct

SEQ ID NO: 6525 - protein, 1241 aa, Artificial Sequence; identical to SEQ ID NO: 6237
  SARS-CoV-2/Australia/NSW10/2020__EPI_ISL_413596 spike protein (1-1211)(A890C_V1040C) Foldon construct

SEQ ID NO: 6526 - protein, 1241 aa, Artificial Sequence; identical to SEQ ID NO: 6258
  SARS-CoV-2/Switzerland/1000477797/2020__EPI_ISL_413023 spike protein (1-1211)(A890C_V1040C) Foldon construct

SEQ ID NO: 6527 - protein, 1241 aa, Artificial Sequence; identical to SEQ ID NO: 6259
  SARS-CoV-2/Belgium/BA-02291/2020__EPI_ISL_415159 spike protein (1-1211)(A890C_V1040C) Foldon construct

SEQ ID NO: 6528 - protein, 1241 aa, Artificial Sequence; identical to SEQ ID NO: 6260
  SARS-CoV-2/USA/WA8-UW5/2020__EPI_ISL_413486 spike protein (1-1211)(A890C_V1040C) Foldon construct

SEQ ID NO: 6529 - protein, 1241 aa, Artificial Sequence; identical to SEQ ID NO: 6261
  SARS-CoV-2/England/20102000506/2020__EPI_ISL_415147 spike protein (1-1211)(A890C_V1040C) Foldon construct

SEQ ID NO: 6530 - protein, 1241 aa, Artificial Sequence; identical to SEQ ID NO: 6262
  SARS-CoV-2/Belgium/VAG-03013/2020__EPI_ISL_415155 spike protein (1-1211)(A890C_V1040C) Foldon construct

SEQ ID NO: 6531 - protein, 1241 aa, Artificial Sequence; identical to SEQ ID NO: 6263
  SARS-CoV-2/Belgium/BC-03016/2020__EPI_ISL_415157 spike protein (1-1211)(A890C_V1040C) Foldon construct

SEQ ID NO: 6532 - protein, 1241 aa, Artificial Sequence; identical to SEQ ID NO: 6264
  SARS-CoV-2/Germany/BavPat3/2020__EPI_ISL_414521 spike protein (1-1211)(A890C_V1040C) Foldon construct

SEQ ID NO: 6533 - protein, 1241 aa, Artificial Sequence; identical to SEQ ID NO: 6265
  SARS-CoV-2/France/HF1805/2020__EPI_ISL_414628 spike protein (1-1211)(A890C_V1040C) Foldon construct

SEQ ID NO: 6534 - protein, 1241 aa, Artificial Sequence; identical to SEQ ID NO: 6266
  SARS-CoV-2/Netherlands/ZuidHolland_9/2020__EPI_ISL_414445 spike protein (1-1211)(A890C_V1040C) Foldon construct

SEQ ID NO: 6535 - protein, 1241 aa, Artificial Sequence; identical to SEQ ID NO: 6267
  SARS-CoV-2/Finland/FIN03032020A/2020__EPI_ISL_413602 spike protein (1-1211)(A890C_V1040C) Foldon construct

SEQ ID NO: 6536 - protein, 1241 aa, Artificial Sequence; identical to SEQ ID NO: 6268
  SARS-CoV-2/France/GE1977/2020__EPI_ISL_414632 spike protein (1-1211)(A890C_V1040C) Foldon construct

SEQ ID NO: 6537 - protein, 1241 aa, Artificial Sequence; identical to SEQ ID NO: 6269
  SARS-CoV-2/Finland/FIN-313/2020__EPI_ISL_414641 spike protein (1-1211)(A890C_V1040C) Foldon construct

SEQ ID NO: 6538 - protein, 1241 aa, Artificial Sequence; identical to SEQ ID NO: 6270
  SARS-CoV-2/Netherlands/ZuidHolland_2/2020__EPI_ISL_414556 spike protein (1-1211)(A890C_V1040C) Foldon construct

SEQ ID NO: 6539 - protein, 1241 aa, Artificial Sequence; identical to SEQ ID NO: 6271
  SARS-CoV-2/USA/WA-UW31/2020__EPI_ISL_414618 spike protein (1-1211)(A890C_V1040C) Foldon construct

SEQ ID NO: 6540 - protein, 1241 aa, Artificial Sequence; identical to SEQ ID NO: 6272
  SARS-CoV-2/South Korea/SNU01/2020__EPI_ISL_411929 spike protein (1-1211)(A890C_V1040C) Foldon construct

SEQ ID NO: 6541 - protein, 1241 aa, Artificial Sequence; identical to SEQ ID NO: 6273
  SARS-CoV-2/China/WF0004/2020__EPI_ISL_413694 spike protein (1-1211)(A890C_V1040C) Foldon construct

SEQ ID NO: 6542 - protein, 1241 aa, Artificial Sequence; identical to SEQ ID NO: 6274
  SARS-CoV-2/China/WF0028/2020__EPI_ISL_413791 spike protein (1-1211)(A890C_V1040C) Foldon construct

SEQ ID NO: 6543 - protein, 1241 aa, Artificial Sequence; identical to SEQ ID NO: 6275
  SARS-CoV-2/2019-nCoV/USA-CruiseA-18/2020__MT159716.1 spike protein (1-1211)(A890C_V1040C) Foldon construct

SEQ ID NO: 6544 - protein, 1241 aa, Artificial Sequence; identical to SEQ ID NO: 6276
  SARS-CoV-2/SARS-CoV-2/Yunnan-01/human/2020/CHN__MT049951.1 spike protein (1-1211)(A890C_V1040C) Foldon construct

SEQ ID NO: 6545 - protein, 1241 aa, Artificial Sequence; identical to SEQ ID NO: 6277
  SARS-CoV-2/USA/WA-UW292/2020__EPI_ISL_418077 spike protein (1-1211)(A890C_V1040C) Foldon construct

SEQ ID NO: 6546 - protein, 1241 aa, Artificial Sequence; identical to SEQ ID NO: 6278
  SARS-CoV-2/Iceland/192/2020__EPI_ISL_417819 spike protein (1-1211)(A890C_V1040C) Foldon construct

SEQ ID NO: 6547 - protein, 1241 aa, Artificial Sequence; identical to SEQ ID NO: 6279
  SARS-CoV-2/Belgium/ULG-6939/2020__EPI_ISL_417020 spike protein (1-1211)(A890C_V1040C) Foldon construct

SEQ ID NO: 6548 - protein, 1241 aa, Artificial Sequence; identical to SEQ ID NO: 6280
  SARS-CoV-2/France/HF2496/2020__EPI_ISL_418231 spike protein (1-1211)(A890C_V1040C) Foldon construct

SEQ ID NO: 6549 - protein, 1241 aa, Artificial Sequence; identical to SEQ ID NO: 6281
  SARS-CoV-2/USA/WA-UW291/2020__EPI_ISL_418076 spike protein (1-1211)(A890C_V1040C) Foldon construct

SEQ ID NO: 6550 - protein, 1241 aa, Artificial Sequence; identical to SEQ ID NO: 6245
  SARS-CoV-2/Portugal/PT0034/2020__EPI_ISL_418019 spike protein (1-1211)(A890C_V1040C) Foldon construct

SEQ ID NO: 6551 - protein, 1241 aa, Artificial Sequence; identical to SEQ ID NO: 6283
  SARS-CoV-2/Iceland/202/2020__EPI_ISL_417750 spike protein (1-1211)(A890C_V1040C) Foldon construct

SEQ ID NO: 6552 - protein, 1241 aa, Artificial Sequence; identical to SEQ ID NO: 6284
  SARS-CoV-2/USA/WA-UW261/2020__EPI_ISL_418046 spike protein (1-1211)(A890C_V1040C) Foldon construct

SEQ ID NO: 6553 - protein, 1241 aa, Artificial Sequence; identical to SEQ ID NO: 6285
  SARS-CoV-2/Portugal/PT0035/2020__EPI_ISL_418020 spike protein (1-1211)(A890C_V1040C) Foldon construct

SEQ ID NO: 6554 - protein, 1241 aa, Artificial Sequence; identical to SEQ ID NO: 6286
  SARS-CoV-2/USA/NY-NYUMC7/2020__EPI_ISL_418192 spike protein (1-1211)(A890C_V1040C) Foldon construct

SEQ ID NO: 6555 - protein, 1241 aa, Artificial Sequence; identical to SEQ ID NO: 6287
  SARS-CoV-2/Iceland/189/2020__EPI_ISL_417709 spike protein (1-1211)(A890C_V1040C) Foldon construct

SEQ ID NO: 6556 - protein, 1241 aa, Artificial Sequence; identical to SEQ ID NO: 6288
  SARS-CoV-2/Australia/NSW56/2020__EPI_ISL_417408 spike protein (1-1211)(A890C_V1040C) Foldon construct

SEQ ID NO: 6557 - protein, 1241 aa, Artificial Sequence; identical to SEQ ID NO: 6289
  SARS-CoV-2/Iceland/280/2020__EPI_ISL_417608 spike protein (1-1211)(A890C_V1040C) Foldon construct

SEQ ID NO: 6558 - protein, 1241 aa, Artificial Sequence; identical to SEQ ID NO: 6245
  SARS-CoV-2/Iceland/247/2020__EPI_ISL_417575 spike protein (1-1211)(A890C_V1040C) Foldon construct

SEQ ID NO: 6559 - protein, 1241 aa, Artificial Sequence; identical to SEQ ID NO: 6291
  SARS-CoV-2/Iceland/238/2020__EPI_ISL_417566 spike protein (1-1211)(A890C_V1040C) Foldon construct

SEQ ID NO: 6560 - protein, 1241 aa, Artificial Sequence; identical to SEQ ID NO: 6292
  SARS-CoV-2/Greece/16/2020__EPI_ISL_418265 spike protein (1-1211)(A890C_V1040C) Foldon construct

SEQ ID NO: 6561 - protein, 1241 aa, Artificial Sequence; identical to SEQ ID NO: 6293
  SARS-CoV-2/Iceland/319/2020__EPI_ISL_417648 spike protein (1-1211)(A890C_V1040C) Foldon construct

SEQ ID NO: 6562 - protein, 1241 aa, Artificial Sequence; identical to SEQ ID NO: 6294
  SARS-CoV-2/Congo/94/2020__EPI_ISL_417947 spike protein (1-1211)(A890C_V1040C) Foldon construct

SEQ ID NO: 6563 - protein, 1241 aa, Artificial Sequence; identical to SEQ ID NO: 6295
  SARS-CoV-2/Congo/158/2020__EPI_ISL_417950 spike protein (1-1211)(A890C_V1040C) Foldon construct

SEQ ID NO: 6564 - protein, 1241 aa, Artificial Sequence; identical to SEQ ID NO: 6296
  SARS-CoV-2/USA/UT-00034/2020__EPI_ISL_417977 spike protein (1-1211)(A890C_V1040C) Foldon construct

SEQ ID NO: 6565 - protein, 1241 aa, Artificial Sequence; identical to SEQ ID NO: 6297
  SARS-CoV-2/USA/UT-00033/2020__EPI_ISL_417976 spike protein (1-1211)(A890C_V1040C) Foldon construct

SEQ ID NO: 6566 - protein, 1241 aa, Artificial Sequence; identical to SEQ ID NO: 6298
  SARS-CoV-2/USA/WI-13/2020__EPI_ISL_417516 spike protein (1-1211)(A890C_V1040C) Foldon construct

SEQ ID NO: 6567 - protein, 1240 aa, Artificial Sequence; identical to SEQ ID NO: 6299
  SARS-CoV-2/India/1-27/2020__EPI_ISL_413522 spike protein (1-1210)(A889C_V1039C) Foldon construct

SEQ ID NO: 6568 - protein, 1235 aa, Artificial Sequence; identical to SEQ ID NO: 6300
  SARS-CoV-2/pangolin/Guangxi/P4L/2017__EPI_ISL_410538 spike protein (1-1205)(A884C_V1034C) Foldon construct

SEQ ID NO: 6569 - protein, 1235 aa, Artificial Sequence; identical to SEQ ID NO: 6301
  SARS-CoV-2/pangolin/Guangxi/P5L/2017__EPI_ISL_410540 spike protein (1-1205)(A884C_V1034C) Foldon construct

SEQ ID NO: 6570 - protein, 1235 aa, Artificial Sequence; identical to SEQ ID NO: 6302
  SARS-CoV-2/pangolin/Guangxi/P5E/2017__EPI_ISL_410541 spike protein (1-1205)(A884C_V1034C) Foldon construct

SEQ ID NO: 6571 - protein, 1233 aa, Artificial Sequence; identical to SEQ ID NO: 6303
  SARS-CoV-2/pangolin/Guangxi/P1E/2017__EPI_ISL_410539 spike protein (1-1203)(A882C_V1032C) Foldon construct

SEQ ID NO: 6572 - protein, 1241 aa, Artificial Sequence
  SARS-CoV-2/Wuhan/WIV05/2019__EPI_ISL_402128 spike protein (1-1211)(T874C_S1055C) Foldon construct
MFVFLVLLPLVSSQCVNLTTRTQLPPAYTNSFTRGVYYPDKVFRSSVLHSTQDLFLPFFSNVTWFHAIHVSGTNGTKRFDNPVLPFNDGVYFASTEKSNIIRGWIFGTTLDSKTQSLLIVNNATNVVIKVCEFQFCNDPFLGVYYHKNNKSWMESEFRVYSSANNCTFEYVSQPFLMDLEGKQGNFKNLREFVFKNIDGYFKIYSKHTPINLVRDLPQGFSALEPLVDLPIGINITRFQTLLALHRSYLTPGDSSSGWTAGAAAYYVGYLQPRTFLLKYNENGTITDAVDCALDPLSETKCTLKSFTVEKGIYQTSNFRVQPTESIVRFPNITNLCPFGEVFNATRFASVYAWNRKRISNCVADYSVLYNSASFSTFKCYGVSPTKLNDLCFTNVYADSFVIRGDEVRQIAPGQTGKIADYNYKLPDDFTGCVIAWNSNNLDSKVGGNYNYLYRLFRKSNLKPFERDISTEIYQAGSTPCNGVEGFNCYFPLQSYGFQPTNGVGYQPYRVVVLSFELLHAPATVCGPKKSTNLVKNKCVNFNFNGLTGTGVLTESNKKFLPFQQFGRDIADTTDAVRDPQTLEILDITPCSFGGVSVITPGTNTSNQVAVLYQDVNCTEVPVAIHADQLTPTWRVYSTGSNVFQTRAGCLIGAEHVNNSYECDIPIGAGICASYQTQTNSPRRARSVASQSIIAYTMSLGAENSVAYSNNSIAIPTNFTISVTTEILPVSMTKTSVDCTMYICGDSTECSNLLLQYGSFCTQLNRALTGIAVEQDKNTQEVFAQVKQIYKTPPIKDFGGFNFSQILPDPSKPSKRSFIEDLLFNKVTLADAGFIKQYGDCLGDIAARDLICAQKFNGLTVLPPLLTDEMIAQYCSALLAGTITSGWTFGAGAALQIPFAMQMAYRFNGIGVTQNVLYENQKLIANQFNSAIGKIQDSLSSTASALGKLQDVVNQNAQALNTLVKQLSSNFGAISSVLNDILSRLDKVEAEVQIDRLITGRLQSLQTYVTQQLIRAAEIRASANLAATKMSECVLGQSKRVDFCGKGYHLMSFPQCAPHGVVFLHVTYVPAQEKNFTTAPAICHDGKAHFPREGVFVSNGTHWFVTQRNFYEPQIITTDNTFVSGNCDVVIGIVNNTVYDPLQPELDSFKEELDKYFKNHTSPDVDLGDISGINASVVNIQKEIDRLNEVAKNLNESLIDLQELGKYEQYIKGGSGYIPEAPRDGQAYVRKDGEWVLLSTFL

SEQ ID NO: 6573 - protein, 1237 aa, Artificial Sequence
  SARS-CoV-2/bat/Yunnan/RaTG13/2013__EPI_ISL_402131 spike protein (1-1207)(T870C_S1051C) Foldon construct
MFVFLVLLPLVSSQCVNLTTRTQLPPAYTNSSTRGVYYPDKVFRSSVLHLTQDLFLPFFSNVTWFHAIHVSGTNGIKRFDNPVLPFNDGVYFASTEKSNIIRGWIFGTTLDSKTQSLLIVNNATNVVIKVCEFQFCNDPFLGVYYHKNNKSWMESEFRVYSSANNCTFEYVSQPFLMDLEGKQGNFKNLREFVFKNIDGYFKIYSKHTPINLVRDLPPGFSALEPLVDLPIGINITRFQTLLALHRSYLTPGDSSSGWTAGAAAYYVGYLQPRTFLLKYNENGTITDAVDCALDPLSETKCTLKSFTVEKGIYQTSNFRVQPTDSIVRFPNITNLCPFGEVFNATTFASVYAWNRKRISNCVADYSVLYNSTSFSTFKCYGVSPTKLNDLCFTNVYADSFVITGDEVRQIAPGQTGKIADYNYKLPDDFTGCVIAWNSKHIDAKEGGNFNYLYRLFRKANLKPFERDISTEIYQAGSKPCNGQTGLNCYYPLYRYGFYPTDGVGHQPYRVVVLSFELLNAPATVCGPKKSTNLVKNKCVNFNFNGLTGTGVLTESNKKFLPFQQFGRDIADTTDAVRDPQTLEILDITPCSFGGVSVITPGTNASNQVAVLYQDVNCTEVPVAIHADQLTPTWRVYSTGSNVFQTRAGCLIGAEHVNNSYECDIPIGAGICASYQTQTNSRSVASQSIIAYTMSLGAENSVAYSNNSIAIPTNFTISVTTEILPVSMTKTSVDCTMYICGDSTECSNLLLQYGSFCTQLNRALTGIAVEQDKNTQEVFAQVKQIYKTPPIKDFGGFNFSQILPDPSKPSKRSFIEDLLFNKVTLADAGFIKQYGDCLGDIAARDLICAQKFNGLTVLPPLLTDEMIAQYCSALLAGTITSGWTFGAGAALQIPFAMQMAYRFNGIGVTQNVLYENQKLIANQFNSAIGKIQDSLSSTASALGKLQDVVNQNAQALNTLVKQLSSNFGAISSVLNDILSRLDKVEAEVQIDRLITGRLQSLQTYVTQQLIRAAEIRASANLAATKMSECVLGQSKRVDFCGKGYHLMSFPQCAPHGVVFLHVTYVPAQEKNFTTAPAICHDGKAHFPREGVFVSNGTHWFVTQRNFYEPQIITTDNTFVSGSCDVVIGIVNNTVYDPLQPELDSFKEELDKYFKNHTSPDVDLGDISGINASVVNIQKEIDRLNEVAKNLNESLIDLQELGKYEQYIKGGSGYIPEAPRDGQAYVRKDGEWVLLSTFL

SEQ ID NO: 6574 - protein, 1241 aa, Artificial Sequence
  SARS-CoV-2/Wuhan/HBCDC-HB-01/2019__EPI_ISL_402132 spike protein (1-1211)(T874C_S1055C) Foldon construct
MFVFLVLLPLVSSQCVNLTTRTQLPPAYTNSITRGVYYPDKVFRSSVLHSTQDLFLPFFSNVTWFHAIHVSGTNGTKRFDNPVLPFNDGVYFASTEKSNIIRGWIFGTTLDSKTQSLLIVNNATNVVIKVCEFQFCNDPFLGVYYHKNNKSWMESEFRVYSSANNCTFEYVSQPFLMDLEGKQGNFKNLREFVFKNIDGYFKIYSKHTPINLVRDLPQGFSALEPLVDLPIGINITRFQTLLALHRSYLTPGDSSSGWTAGAAAYYVGYLQPRTFLLKYNENGTITDAVDCALDPLSETKCTLKSFTVEKGIYQTSNFRVQPTESIVRFPNITNLCPFGEVFNATRFASVYAWNRKRISNCVADYSVLYNSASFSTFKCYGVSPTKLNDLCFTNVYADSFVIRGDEVRQIAPGQTGKIADYNYKLPDDFTGCVIAWNSNNLDSKVGGNYNYLYRLFRKSNLKPFERDISTEIYQAGSTPCNGVEGFNCYFPLQSYGFQPTNGVGYQPYRVVVLSFELLHAPATVCGPKKSTNLVKNKCVNFNFNGLTGTGVLTESNKKFLPFQQFGRDIADTTDAVRDPQTLEILDITPCSFGGVSVITPGTNTSNQVAVLYQDVNCTEVPVAIHADQLTPTWRVYSTGSNVFQTRAGCLIGAEHVNNSYECDIPIGAGICASYQTQTNSPRRARSVASQSIIAYTMSLGAENSVAYSNNSIAIPTNFTISVTTEILPVSMTKTSVDCTMYICGDSTECSNLLLQYGSFCTQLNRALTGIAVEQDKNTQEVFAQVKQIYKTPPIKDFGGFNFSQILPDPSKPSKRSFIEDLLFNKVTLADAGFIKQYGDCLGDIAARDLICAQKFNGLTVLPPLLTDEMIAQYCSALLAGTITSGWTFGAGAALQIPFAMQMAYRFNGIGVTQNVLYENQKLIANQFNSAIGKIQDSLSSTASALGKLQDVVNQNAQALNTLVKQLSSNFGAISSVLNDILSRLDKVEAEVQIDRLITGRLQSLQTYVTQQLIRAAEIRASANLAATKMSECVLGQSKRVDFCGKGYHLMSFPQCAPHGVVFLHVTYVPAQEKNFTTAPAICHDGKAHFPREGVFVSNGTHWFVTQRNFYEPQIITTDNTFVSGNCDVVIGIVNNTVYDPLQPELDSFKEELDKYFKNHTSPDVDLGDISGINASVVNIQKEIDRLNEVAKNLNESLIDLQELGKYEQYIKGGSGYIPEAPRDGQAYVRKDGEWVLLSTFL

SEQ ID NO: 6575 - protein, 1241 aa, Artificial Sequence
  SARS-CoV-2/Guangdong/20SF028/2020__EPI_ISL_403936 spike protein (1-1211)(T874C_S1055C) Foldon construct
MFVFLVLLPLVSSQCVNLTTRTQLPPAYTNSFTRGVYYPDKVFRSSVLYSTQDLFLPFFSNVTWFHAIHVSGTNGTKRFDNPVLPFNDGVYFASTEKSNIIRGWIFGTTLDSKTQSLLIVNNATNVVIKVCEFQFCNDPFLGVYYHKNNKSWMESEFRVYSSANNCTFEYVSQPFLMDLEGKQGNFKNLREFVFKNIDGYFKIYSKHTPINLVRDLPQGFSALEPLVDLPIGINITRFQTLLALHRSYLTPGDSSSGWTAGAAAYYVGYLQPRTFLLKYNENGTITDAVDCALDPLSETKCTLKSFTVEKGIYQTSNFRVQPTESIVRFPNITNLCPFGEVFNATRFASVYAWNRKRISNCVADYSVLYNSASFSTFKCYGVSPTKLNDLCFTNVYADSFVIRGDEVRQIAPGQTGKIADYNYKLPDDFTGCVIAWNSNNLDSKVGGNYNYLYRLFRKSNLKPFERDISTEIYQAGSTPCNGVEGFNCYFPLQSYGFQPTNGVGYQPYRVVVLSFELLHAPATVCGPKKSTNLVKNKCVNFNFNGLTGTGVLTESNKKFLPFQQFGRDIADTTDAVRDPQTLEILDITPCSFGGVSVITPGTNTSNQVAVLYQDVNCTEVPVAIHADQLTPTWRVYSTGSNVFQTRAGCLIGAEHVNNSYECDIPIGAGICASYQTQTNSPRRARSVASQSIIAYTMSLGAENSVAYSNNSIAIPTNFTISVTTEILPVSMTKTSVDCTMYICGDSTECSNLLLQYGSFCTQLNRALTGIAVEQDKNTQEVFAQVKQIYKTPPIKDFGGFNFSQILPDPSKPSKRSFIEDLLFNKVTLADAGFIKQYGDCLGDIAARDLICAQKFNGLTVLPPLLTDEMIAQYCSALLAGTITSGWTFGAGAALQIPFAMQMAYRFNGIGVTQNVLYENQKLIANQFNSAIGKIQDSLSSTASALGKLQDVVNQNAQALNTLVKQLSSNFGAISSVLNDILSRLDKVEAEVQIDRLITGRLQSLQTYVTQQLIRAAEIRASANLAATKMSECVLGQSKRVDFCGKGYHLMSFPQCAPHGVVFLHVTYVPAQEKNFTTAPAICHDGKAHFPREGVFVSNGTHWFVTQRNFYEPQIITTDNTFVSGNCDVVIGIVNNTVYDPLQPELDSFKEELDKYFKNHTSPDVDLGDISGINASVVNIQKEIDRLNEVAKNLNESLIDLQELGKYEQYIKGGSGYIPEAPRDGQAYVRKDGEWVLLSTFL

SEQ ID NO: 6576 - protein, 1241 aa, Artificial Sequence
  SARS-CoV-2/Shenzhen/SZTH-001/2020__EPI_ISL_406592 spike protein (1-1211)(T874C_S1055C) Foldon construct
MFVFLVLLPLVSSQCVNLTTRTQLPPAYTNSFTRGVYYPDKVFRSSVLHSTQDLFLPFFSNVTWFHAIHVSGTNGTKRFDNPVLPFNDGVYFASTEKSNIIRGWIFGTTLDSKTQSLLIVNNATNVVIKVCEFQFCNDPFLGVYYHKNNKSWMESEFRVYSSANNCTFEYVSQPFLMDLEGKQGNFKNLREFVFKNIDGYFKIYSKHTPINLVRDLPQGFSALEPLVDLPIGINITRFQTLLALHRSYLTPGDSSSGWTAGAAAYYVGYLQPRTFLLKYNENGTITDAVDCALDPLSETKCTLKSFTVEKGIYQTSNFRVQPTESIVRFPNITNLCPFGEVFNATRFASVYAWNRKRISNCVADYSVLYNSASFSTFKCYGVSPTKLNDLCFTNVYADSFVIRGDEVRQIAPGQTGKIADYNYKLPDDFTGCVIAWNSNNLDSKVGGNYNYLYRLFRKSNLKPFERDISTEIYQAGSTPCNGVEGFNCYFPLQSYGFQPTNGVGYQPYRVVVLSFELLHAPATVCGPKKSTNLVKNKCVNFNFNGLTGTGVLTESNKKFLPFQQFGRDIADTTDAVRDPQTLEILDITPCSFGGVSVITPGTNTSNQVAVLYQDVNCTEVPVAIHADQLTPTWRVYSTGSNVFQTRAGCLIGAEHVNNSYECDIPIGAGICASYQTQTNSPRRARSVASQSIIAYTMSLGAENSVAYSNNSIAIPTNFTISVTTEILPVSMTKTSVDCTMYICGDSTECSNLLLQYGSFCTQLNRALTGIAVEQDKNTQEVFAQVKQIYKTPPIKDFGGFNFSQILPDPSKPSKRSFIEDLLFNKVTLADAGFIKQYGDCLGDIAARDLICAQKFNGLTVLPPLLTDEMIAQYCSALLAGTITSGWTFGAGAALQIPFAMQMAYRFNGIGVTQNVLYENQKLIANQFNSAIGKIQDSLSSTASALGKLQDVVNQNAQALNTLVKQLSSNFGAISSVLNDILSRLDKVEAEVQIDRLITGRLQSLQTYVTQQLIRAAEIRASANLAATKMSECVLGQSKRVDFCGKGYHLMSFPQCAPHGVVFLHVTYVPAQEKNFTTAPAICHDGKAHFPREGVFVSNGTHWFVTQRNFYEPQIITTDNTFVSGNCDVLIGIVNNTVYDPLQPELDSFKEELDKYFKNHTSPDVDLGDISGINASVVNIQKEIDRLNEVAKNLNESLIDLQELGKYEQYIKGGSGYIPEAPRDGQAYVRKDGEWVLLSTFL

SEQ ID NO: 6577 - protein, 1241 aa, Artificial Sequence
  SARS-CoV-2/Shenzhen/SZTH-004/2020__EPI_ISL_406595 spike protein (1-1211)(T874C_S1055C) Foldon construct
MFVFLVLLPLVSSQCVNLTTRTQLPPAYTNSFTRGVYYPDKVFRSSVLHSTQDLFLPFFSNVTWFHAIHVSGTNGTKRFDNPVLPFNDGVYFASTEKSNIIRGWIFGTTLDSKTQSLLIVNNATNVVIKVCEFQFCNDPFLGVYYHKNNKSWMESEFRVYSSANNCTFEYVSQPFLMDLEGKQGNFKNLREFVFKNIDGYFKIYSKHTPINLVRDLPQGFSALEPLVDLPIGINITRFQTLLALHRSYLTPGDSSSGWTAGAAAYYVGYLQPRTFLLKYNENGTITDAVDCALDPLSETKCTLKSFTVEKGIYQTSNFRVQPTESIVRFPNITNLCPFGEVFNATRFASVYAWDRKRISNCVAYYSVLYNSASFSTFKCYGVSPTKLNDLCFTNVYADSFVIRGDEVRQIAPGQTGKIADYNYKLPDDFTGCVIAWNSNNLDSKVGGNYNYLYRLFRKSNLKPFERDISTEIYQAGSTPCNGVEGFNCYFPLQSYGFQPTNGVGYQPYRVVVLSFELLHAPATVCGPKKSTNLVKNKCVNFNFNGLTGTGVLTESNKKFLPFQQFGRDIADTTDAVRDPQTLEILDITPCSFGGVSVITPGTNTSNQVAVLYQDVNCTEVPVAIHADQLTPTWRVYSTGSNVFQTRAGCLIGAEHVNNSYECDIPIGAGICASYQTQTNSPRRARSVASQSIIAYTMSLGAENSVAYSNNSIAIPTNFTISVTTEILPVSMTKTSVDCTMYICGDSTECSNLLLQYGSFCTQLNRALTGIAVEQDKNTQEVFAQVKQIYKTPPIKDFGGFNFSQILPDPSKPSKRSFIEDLLFNKVTLADAGFIKQYGDCLGDIAARDLICAQKFNGLTVLPPLLTDEMIAQYCSALLAGTITSGWTFGAGAALQIPFAMQMAYRFNGIGVTQNVLYENQKLIANQFNSAIGKIQDSLSSTASALGKLQDVVNQNAQALNTLVKQLSSNFGAISSVLNDILSRLDKVEAEVQIDRLITGRLQSLQTYVTQQLIRAAEIRASANLAATKMSECVLGQSKRVDFCGKGYHLMSFPQCAPHGVVFLHVTYVPAQEKNFTTAPAICHDGKAHFPREGVFVSNGTHWFVTQRNFYEPQIITTDNTFVSGNCDVVIGIVNNTVYDPLQPELDSFKEELDKYFKNHTSPDVDLGDISGINASVVNIQKEIDRLNEVAKNLNESLIDLQELGKYEQYIKGGSGYIPEAPRDGQAYVRKDGEWVLLSTFL

SEQ ID NO: 6578 - protein, 1241 aa, Artificial Sequence
  SARS-CoV-2/France/IDF0372/2020__EPI_ISL_406596 spike protein (1-1211)(T874C_S1055C) Foldon construct
MFVFLVLLPLVSSQCVNLTTRTQLPPAYTNSFTRGVYYPDKVFRSSVLHSTQDLFLPFFSNVTWFHAIHVSGTNGTKRFDNPVLPFNDGVYFASTEKSNIIRGWIFGTTLDSKTQSLLIVNNATNVVIKVCEFQFCNDPFLGVYYHKNNKSWMESEFRVYSSANNCTFEYVSQPFLMDLEGKQGNFKNLREFVFKNIDGYFKIYSKHTPINLVRDLPQGFSALEPLVDLPIGINITRFQTLLALHRSYLTPGDSSSGWTAGAAAYYVGYLQPRTFLLKYNENGTITDAVDCALDPLSETKCTLKSFTVEKGIYQTSNFRVQPTESIVRFPNITNLCPFGEVFNATRFASVYAWNRKRISNCVADYSFLYNSASFSTFKCYGVSPTKLNDLCFTNVYADSFVIRGDEVRQIAPGQTGKIADYNYKLPDDFTGCVIAWNSNNLDSKVGGNYNYLYRLFRKSNLKPFERDISTEIYQAGSTPCNGVEGFNCYFPLQSYGFQPTNGVGYQPYRVVVLSFELLHAPATVCGPKKSTNLVKNKCVNFNFNGLTGTGVLTESNKKFLPFQQFGRDIADTTDAVRDPQTLEILDITPCSFGGVSVITPGTNTSNQVAVLYQDVNCTEVPVAIHADQLTPTWRVYSTGSNVFQTRAGCLIGAEHVNNSYECDIPIGAGICASYQTQTNSPRRARSVASQSIIAYTMSLGAENSVAYSNNSIAIPTNFTISVTTEILPVSMTKTSVDCTMYICGDSTECSNLLLQYGSFCTQLNRALTGIAVEQDKNTQEVFAQVKQIYKTPPIKDFGGFNFSQILPDPSKPSKRSFIEDLLFNKVTLADAGFIKQYGDCLGDIAARDLICAQKFNGLTVLPPLLTDEMIAQYCSALLAGTITSGWTFGAGAALQIPFAMQMAYRFNGIGVTQNVLYENQKLIANQFNSAIGKIQDSLSSTASALGKLQDVVNQNAQALNTLVKQLSSNFGAISSVLNDILSRLDKVEAEVQIDRLITGRLQSLQTYVTQQLIRAAEIRASANLAATKMSECVLGQSKRVDFCGKGYHLMSFPQCAPHGVVFLHVTYVPAQEKNFTTAPAICHDGKAHFPREGVFVSNGTHWFVTQRNFYEPQIITTDNTFVSGNCDVVIGIVNNTVYDPLQPELDSFKEELDKYFKNHTSPDVDLGDISGINASVVNIQKEIDRLNEVAKNLNESLIDLQELGKYEQYIKGGSGYIPEAPRDGQAYVRKDGEWVLLSTFL

SEQ ID NO: 6579 - protein, 1241 aa, Artificial Sequence
  SARS-CoV-2/Australia/VIC01/2020__EPI_ISL_406844 spike protein (1-1211)(T874C_S1055C) Foldon construct
MFVFLVLLPLVSSQCVNLTTRTQLPPAYTNSFTRGVYYPDKVFRSSVLHSTQDLFLPFFSNVTWFHAIHVSGTNGTKRFDNPVLPFNDGVYFASTEKSNIIRGWIFGTTLDSKTQSLLIVNNATNVVIKVCEFQFCNDPFLGVYYHKNNKSWMESEFRVYSSANNCTFEYVSQPFLMDLEGKQGNFKNLREFVFKNIDGYFKIYSKHTPINLVRDLPQGFSALEPLVDLPIGINITRFQTLLALHRRYLTPGDSSSGWTAGAAAYYVGYLQPRTFLLKYNENGTITDAVDCALDPLSETKCTLKSFTVEKGIYQTSNFRVQPTESIVRFPNITNLCPFGEVFNATRFASVYAWNRKRISNCVADYSVLYNSASFSTFKCYGVSPTKLNDLCFTNVYADSFVIRGDEVRQIAPGQTGKIADYNYKLPDDFTGCVIAWNSNNLDSKVGGNYNYLYRLFRKSNLKPFERDISTEIYQAGSTPCNGVEGFNCYFPLQSYGFQPTNGVGYQPYRVVVLSFELLHAPATVCGPKKSTNLVKNKCVNFNFNGLTGTGVLTESNKKFLPFQQFGRDIADTTDAVRDPQTLEILDITPCSFGGVSVITPGTNTSNQVAVLYQDVNCTEVPVAIHADQLTPTWRVYSTGSNVFQTRAGCLIGAEHVNNSYECDIPIGAGICASYQTQTNSPRRARSVASQSIIAYTMSLGAENSVAYSNNSIAIPTNFTISVTTEILPVSMTKTSVDCTMYICGDSTECSNLLLQYGSFCTQLNRALTGIAVEQDKNTQEVFAQVKQIYKTPPIKDFGGFNFSQILPDPSKPSKRSFIEDLLFNKVTLADAGFIKQYGDCLGDIAARDLICAQKFNGLTVLPPLLTDEMIAQYCSALLAGTITSGWTFGAGAALQIPFAMQMAYRFNGIGVTQNVLYENQKLIANQFNSAIGKIQDSLSSTASALGKLQDVVNQNAQALNTLVKQLSSNFGAISSVLNDILSRLDKVEAEVQIDRLITGRLQSLQTYVTQQLIRAAEIRASANLAATKMSECVLGQSKRVDFCGKGYHLMSFPQCAPHGVVFLHVTYVPAQEKNFTTAPAICHDGKAHFPREGVFVSNGTHWFVTQRNFYEPQIITTDNTFVSGNCDVVIGIVNNTVYDPLQPELDSFKEELDKYFKNHTSPDVDLGDISGINASVVNIQKEIDRLNEVAKNLNESLIDLQELGKYEQYIKGGSGYIPEAPRDGQAYVRKDGEWVLLSTFL

SEQ ID NO: 6580 - protein, 1241 aa, Artificial Sequence
  SARS-CoV-2/Germany/BavPat1/2020__EPI_ISL_406862 spike protein (1-1211)(T874C_S1055C) Foldon construct
MFVFLVLLPLVSSQCVNLTTRTQLPPAYTNSFTRGVYYPDKVFRSSVLHSTQDLFLPFFSNVTWFHAIHVSGTNGTKRFDNPVLPFNDGVYFASTEKSNIIRGWIFGTTLDSKTQSLLIVNNATNVVIKVCEFQFCNDPFLGVYYHKNNKSWMESEFRVYSSANNCTFEYVSQPFLMDLEGKQGNFKNLREFVFKNIDGYFKIYSKHTPINLVRDLPQGFSALEPLVDLPIGINITRFQTLLALHRSYLTPGDSSSGWTAGAAAYYVGYLQPRTFLLKYNENGTITDAVDCALDPLSETKCTLKSFTVEKGIYQTSNFRVQPTESIVRFPNITNLCPFGEVFNATRFASVYAWNRKRISNCVADYSVLYNSASFSTFKCYGVSPTKLNDLCFTNVYADSFVIRGDEVRQIAPGQTGKIADYNYKLPDDFTGCVIAWNSNNLDSKVGGNYNYLYRLFRKSNLKPFERDISTEIYQAGSTPCNGVEGFNCYFPLQSYGFQPTNGVGYQPYRVVVLSFELLHAPATVCGPKKSTNLVKNKCVNFNFNGLTGTGVLTESNKKFLPFQQFGRDIADTTDAVRDPQTLEILDITPCSFGGVSVITPGTNTSNQVAVLYQGVNCTEVPVAIHADQLTPTWRVYSTGSNVFQTRAGCLIGAEHVNNSYECDIPIGAGICASYQTQTNSPRRARSVASQSIIAYTMSLGAENSVAYSNNSIAIPTNFTISVTTEILPVSMTKTSVDCTMYICGDSTECSNLLLQYGSFCTQLNRALTGIAVEQDKNTQEVFAQVKQIYKTPPIKDFGGFNFSQILPDPSKPSKRSFIEDLLFNKVTLADAGFIKQYGDCLGDIAARDLICAQKFNGLTVLPPLLTDEMIAQYCSALLAGTITSGWTFGAGAALQIPFAMQMAYRFNGIGVTQNVLYENQKLIANQFNSAIGKIQDSLSSTASALGKLQDVVNQNAQALNTLVKQLSSNFGAISSVLNDILSRLDKVEAEVQIDRLITGRLQSLQTYVTQQLIRAAEIRASANLAATKMSECVLGQSKRVDFCGKGYHLMSFPQCAPHGVVFLHVTYVPAQEKNFTTAPAICHDGKAHFPREGVFVSNGTHWFVTQRNFYEPQIITTDNTFVSGNCDVVIGIVNNTVYDPLQPELDSFKEELDKYFKNHTSPDVDLGDISGINASVVNIQKEIDRLNEVAKNLNESLIDLQELGKYEQYIKGGSGYIPEAPRDGQAYVRKDGEWVLLSTFL

SEQ ID NO: 6581 - protein, 1241 aa, Artificial Sequence
  SARS-CoV-2/Wuhan/HBCDC-HB-02/2020__EPI_ISL_412978 spike protein (1-1211)(T874C_S1055C) Foldon construct
MFVFLVLLPLVSSQCVNLTTRTQLPPAYTNSFTRGVYYPDKVFRSSVLHSTQDLFLPFFSNVTWFHAIHVSGTNGTKRFDNPVLPFNDGVYFASTEKSNIIRGWIFGTTLDSKTQSLLIVNNATNVVIKVCEFQFCNDPFLGVYYHKNNKSWMESEFRVYSSANNCTFEYVSQPFLMDLEGKQGNFKNLREFVFKNIDGYFKIYSKHTPINLVRDLPQGFSALEPLVDLPIGINITRFQTLLALHRSYLTPGDSSSGWTAGAAAYYVGYLQPRTFLLKYNENGTITDAVDCALDPLSETKCTLKSFTVEKGIYQTSNFRVQPTESIVRFPNITNLCPFGEVFNATRFASVYAWNRKRISNCVADYSVLYNSASFSTFKCYGVSPTKLNDLCFTNVYADSFVIRGDEVRQIAPGQTGKIADYNYKLPDDFTGCVIAWNSNNLDSKVGGNYNYLYRLFRKSNLKPFERDISTEIYQAGSTPCNGVEGFNCYFPLQSYGFQPTNGVGYQPYRVVVLSFELLHAPATVCGPKKSTNLVKNKCVNFNFNGLTGTGVLTESNKKFLPFQQFGRDIADTTDAVRDPQTLEILDITPCSFGGVSVITPGTNTSNQVAVLYQDVNCTEVPVAIHADQLTPTWRVYSTGSNVFQTRAGCLIGAEHVNNSYECDIPIGAGICASYQTQTNSPRRARSVASQSIIAYTMSLGAENSVAYSNNSIAIPTNFTISVTTEILPVSMTKTSVDCTMYICGDSTECSNFLLQYGSFCTQLNRALTGIAVEQDKNTQEVFAQVKQIYKTPPIKDFGGFNFSQILPDPSKPSKRSFIEDLLFNKVTLADAGFIKQYGDCLGDIAARDLICAQKFNGLTVLPPLLTDEMIAQYCSALLAGTITSGWTFGAGAALQIPFAMQMAYRFNGIGVTQNVLYENQKLIANQFNSAIGKIQDSLSSTASALGKLQDVVNQNAQALNTLVKQLSSNFGAISSVLNDILSRLDKVEAEVQIDRLITGRLQSLQTYVTQQLIRAAEIRASANLAATKMSECVLGQSKRVDFCGKGYHLMSFPQCAPHGVVFLHVTYVPAQEKNFTTAPAICHDGKAHFPREGVFVSNGTHWFVTQRNFYEPQIITTDNTFVSGNCDVVIGIVNNTVYDPLQPELDSFKEELDKYFKNHTSPDVDLGDISGINASVVNIQKEIDRLNEVAKNLNESLIDLQELGKYEQYIKGGSGYIPEAPRDGQAYVRKDGEWVLLSTFL

SEQ ID NO: 6582 - protein, 1241 aa, Artificial Sequence
  SARS-CoV-2/Australia/QLD02/2020__EPI_ISL_407896 spike protein (1-1211)(T874C_S1055C) Foldon construct
MFVFLVLLPLVSSQCVNLTTRTQLPPAYTNSFTRGVYYPDKVFRSSVLHSTQDLFLPFFSNVTWFHAIHVSGTNGTKRFDNPVLPFNDGVYFASTEKSNIIRGWIFGTTLDSKTQSLLIVNNATNVVIKVCEFQFCNDPFLGVYYHKNNKSWMESEFRVYSSANNCTFEYVSQPFLMDLEGKQGNFKNLREFVFKNIDGYFKIYSKHTPINLVRDLPQGFSALEPLVDLPIGINITRFQTLLALHRSYLTPGDSSSGWTAGAAAYYVGYLQPRTFLLKYNENGTITDAVDCALDPLSETKCTLKSFTVEKGIYQTSNFRVQPTESIVRFPNITNLCPFGEVFNATRFASVYAWNRKRISNCVADYSVLYNSASFSTFKCYGVSPTKLNDLCFTNVYADSFVIRGDEVRQIAPGQTGKIADYNYKLPDDFTGCVIAWNSNNLDSKVGGNYNYLYRLFRKSNLKPFERDISTEIYQAGSTPCNGVEGFNCYFPLQSYGFQPTNGVGYQPYRVVVLSFELLHAPATVCGPKKSTNLVKNKCVNFNFNGLTGTGVLTESNKKFLPFQQFGRDIADTTDAVRDPQTLEILDITPCSFGGVSVITPGTNTSNQVAVLYQDVNCTEVPVAIHADQLTPTWRVYSTGSNVFQTRAGCLIGAEHVNNSYECDIPIGAGICASYQTQTNSPRRARSVASQSIIAYTMSLGAENSVAYSNNSIAIPTNFTISVTTEILPVSMTKTSVDCTMYICGDSTECSNLLLQYGSFCTQLNRALTGIAVEQDKNTQEVFAQVKQIYKTPPIKDFGGFNFSQILPDPSKPSKRSFIEDLLFNKVTLADAGFIKQYGDCLGDIAARDLICAQKFNGLTVLPPLLTDEMIAQYCSALLAGTITSGWTFGAGAALQIPFAMQMAYRFNGIGVTQNVLYENQKLIANQFNSAIGKIQDSLSSTASALGKLQDVVNQNAQALNTLVKQLSSNFGAISSVLNDILSRLDKVEAEVQIDRLITGRLQSLQTYVTQQLIRAAEIRASANLAATKMSECVLGQSKRVDFCGKGYHLMSFPQCAPHGVVFLHVTYVPAQEKNFTTAPAICHDGKAHFPREGVFVSNGTHWFVTQRNFYEPQIITTDNTFVSGNCDVVIGIVNNTVYDPLQLELDSFKEELDKYFKNHTSPDVDLGDISGINASVVNIQKEIDRLNEVAKNLNESLIDLQELGKYEQYIKGGSGYIPEAPRDGQAYVRKDGEWVLLSTFL

SEQ ID NO: 6583 - protein, 1241 aa, Artificial Sequence
  SARS-CoV-2/India/1-31/2020__EPI_ISL_413523 spike protein (1-1211)(T874C_S1055C) Foldon construct
MFVFLVLLPLVSSQCVNLTTRTQLPPAYTNSFTRGVYYPDKVFRSSVLHSTQDLFLPFFSNVTWFHAIHVSGTNGTKRFDNPVLPFNDGVYFASTEKSNIIRGWIFGTTLDSKTQSLLIVNNATNVVIKVCEFQFCNDPFLGVYYHKNNKSWMESEFRVYSSANNCTFEYVSQPFLMDLEGKQGNFKNLREFVFKNIDGYFKIYSKHTPINLVRDLPQGFSALEPLVDLPIGINITRFQTLLALHRSYLTPGDSSSGWTAGAAAYYVGYLQPRTFLLKYNENGTITDAVDCALDPLSETKCTLKSFTVEKGIYQTSNFRVQPTESIVRFPNITNLCPFGEVFNATRFASVYAWNRKRISNCVADYSVLYNSASFSTFKCYGVSPTKLNDLCFTNVYADSFVIRGDEVRQIAPGQTGKIADYNYKLPDDFTGCVIAWNSNNLDSKVGGNYNYLYRLFRKSNLKPFERDISTEIYQAGSTPCNGVEGFNCYFPLQSYGFQPTNGVGYQPYRVVVLSFELLHAPATVCGPKKSTNLVKNKCVNFNFNGLTGTGVLTESNKKFLPFQQFGRDIADTTDAVRDPQTLEILDITPCSFGGVSVITPGTNTSNQVAVLYQDVNCTEVPVAIHADQLTPTWRVYSTGSNVFQTRAGCLIGAEHVNNSYECDIPIGAGICASYQTQTNSPRRARSVASQSIIAYTMSLGAENSVAYSNNSIAIPTNFTISVTTEILPVSMTKTSVDCTMYICGDSTECSNLLLQYGSFCTQLNRALTGIAVEQDKNTQEVFAQVKQIYKTPPIKDFGGFNFSQILPDPSKPSKRSFIEDLLFNKVTLADAGFIKQYGDCLGDIAARDLICAQKFNGLTVLPPLLTDEMIAQYCSALLAGTITSGWTFGAGAALQIPFAMQMAYRFNGIGVTQNVLYENQKLIANQFNSVIGKIQDSLSSTASALGKLQDVVNQNAQALNTLVKQLSSNFGAISSVLNDILSRLDKVEAEVQIDRLITGRLQSLQTYVTQQLIRAAEIRASANLAATKMSECVLGQSKRVDFCGKGYHLMSFPQCAPHGVVFLHVTYVPAQEKNFTTAPAICHDGKAHFPREGVFVSNGTHWFVTQRNFYEPQIITTDNTFVSGNCDVVIGIVNNTVYDPLQPELDSFKEELDKYFKNHTSPDVDLGDISGINASVVNIQKEIDRLNEVAKNLNESLIDLQELGKYEQYIKGGSGYIPEAPRDGQAYVRKDGEWVLLSTFL

SEQ ID NO: 6584 - protein, 1241 aa, Artificial Sequence
  SARS-CoV-2/Guangdong/GD2020087-P0008/2020__EPI_ISL_413863 spike protein (1-1211)(T874C_S1055C) Foldon construct
MFVFLVLLPLVSSQCVNLTTRTQLPPAYTNSFTRGVYYPDKVFRSSVLHSTQDLFLPFFSNVTWFHAIHVSGTNGTKRFDNPVLPFNDGVYFASTEKSNIIRGWIFGTTLDSKTQSLLIVNNATNVVIKVCEFQFCNDPFLGVYYHKNNKSWMESEFRVYSSANNCTFEYVSQPFLMDLEGKQGNFKNLREFVFKNIDGYFKIYSKHTPINLVRDLPQGFSALEPLVDLPIGINITRFQTLLALHRSYLTPGDSSSGWTAGAAAYYVGYLQPRTFLLKYNENGTITDAVDCALDPLSETKCTLKSFTVEKGIYQTSNFRVQPTESIVRFPNITNLCPFGEVFNATRFASVYAWNRKRISNCVADYSVLYNSASFSTFKCYGVSPTKLNDLCFTNVYADSFVIRGDEVREIAPGQTGKIADYNYKLPDDFTGCVIAWNSNNLDSKVGGNYNYLYRLFRKSNLKPFERDISTEIYQAGSTPCNGVEGFNCYFPLQSYGFQPTNGVGYQPYRVVVLSFELLHAPATVCGPKKSTNLVKNKCVNFNFNGLTGTGVLTESNKKFLPFQQFGRDIADTTDAVRDPQTLEILDITPCSFGGVSVITPGTNTSNQVAVLYQDVNCTEVPVAIHADQLTPTWRVYSTGSNVFQTRAGCLIGAEHVNNSYECDIPIGAGICASYQTQTNSPRRARSVASQSIIAYTMSLGAENSVAYSNNSIAIPTNFTISVTTEILPVSMTKTSVDCTMYICGDSTECSNLLLQYGSFCTQLNRALTGIAVEQDKNTQEVFAQVKQIYKTPPIKDFGGFNFSQILPDPSKPSKRSFIEDLLFNKVTLADAGFIKQYGDCLGDIAARDLICAQKFNGLTVLPPLLTDEMIAQYCSALLAGTITSGWTFGAGAALQIPFAMQMAYRFNGIGVTQNVLYENQKLIANQFNSAIGKIQDSLSSTASALGKLQDVVNQNAQALNTLVKQLSSNFGAISSVLNDILSRLDKVEAEVQIDRLITGRLQSLQTYVTQQLIRAAEIRASANLAATKMSECVLGQSKRVDFCGKGYHLMSFPQCAPHGVVFLHVTYVPAQEKNFTTAPAICHDGKAHFPREGVFVSNGTHWFVTQRNFYEPQIITTDNTFVSGNCDVVIGIVNNTVYDPLQPELDSFKEELDKYFKNHTSPDVDLGDISGINASVVNIQKEIDRLNEVAKNLNESLIDLQELGKYEQYIKGGSGYIPEAPRDGQAYVRKDGEWVLLSTFL

SEQ ID NO: 6585 - protein, 1241 aa, Artificial Sequence
  SARS-CoV-2/Sweden/01/2020__EPI_ISL_411951 spike protein (1-1211)(T874C_S1055C) Foldon construct
MFVFLVLLPLVSSQCVNLTTRTQLPPAYTNSFTRGVYYPDKVFRSSVLHSTQDLFLPFFSNVTWFHAIHVSGTNGTKRFDNPVLPFNDGVYFASTEKSNIIRGWIFGTTLDSKTQSLLIVNNATNVVIKVCEFQFCNDPFLGVYYHKNNKSWMESEFRVYSSANNCTFEYVSQPFLMDLEGKQGNFKNLREFVFKNIDGYFKIYSKHTPINLVRDLPQGFSALEPLVDLPIGINITRFQTLLALHRSYLTPGDSSSGWTAGAAAYYVGYLQPRTFLLKYNENGTITDAVDCALDPLSETKCTLKSFTVEKGIYQTSNFRVQPTESIVRFPNITNLCPFGEVFNATRFASVYAWNRKRISNCVADYSVLYNSASFSTFKCYGVSPTKLNDLCFTNVYADSFVIRGDEVRQIAPGQTGKIADYNYKLPDDFTGCVIAWNSNNLDSKVGGNYNYLYRLFRKSNLKPFERDISTEIYQAGSTPCNGVEGFNCYFPLQSYGFQPTNGVGYQPYRVVVLSFELLHAPATVCGPKKSTNLVKNKCVNFNFNGLTGTGVLTESNKKFLPFQQFGRDIADTTDAVRDPQTLEILDITPCSFGGVSVITPGTNTSNQVAVLYQDVNCTEVPVAIHADQLTPTWRVYSTGSNVFQTRAGCLIGAEHVNNSYECDIPIGAGICASYQTQTNSPRRARSVASQSIIAYTMSLGAENSVAYSNNSIAIPTNFTISVTTEILPVSMTKTSVDCTMYICGDSTECSNLLLQYGSFCTQLNRALTGIAVEQDKNTQEVFAQVKQIYKTPPIKDCGGFNFSQILPDPSKPSKRSFIEDLLFNKVTLADAGFIKQYGDCLGDIAARDLICAQKFNGLTVLPPLLTDEMIAQYCSALLAGTITSGWTFGAGAALQIPFAMQMAYRFNGIGVTQNVLYENQKLIANQFNSAIGKIQDSLSSTASALGKLQDVVNQNAQALNTLVKQLSSNFGAISSVLNDILSRLDKVEAEVQIDRLITGRLQSLQTYVTQQLIRAAEIRASANLAATKMSECVLGQSKRVDFCGKGYHLMSFPQCAPHGVVFLHVTYVPAQEKNFTTAPAICHDGKAHFPREGVFVSNGTHWFVTQRNFYEPQIITTDNTFVSGNCDVVIGIVNNTVYDPLQPELDSFKEELDKYFKNHTSPDVDLGDISGINASVVNIQKEIDRLNEVAKNLNESLIDLQELGKYEQYIKGGSGYIPEAPRDGQAYVRKDGEWVLLSTFL

SEQ ID NO: 6586 - protein, 1241 aa, Artificial Sequence
  SARS-CoV-2/Tianmen/HBCDC-HB-07/2020__EPI_ISL_412983 spike protein (1-1211)(T874C_S1055C) Foldon construct
MFVFLVLLPLVSSQCVNLTTRTQLPPAYTNSFTRGVYYPDKVFRSSVLHSTQDLFLPFFSNVTWFHAIHVSGTNGTKRFDNPVLPFNDGVYFASTEKSNIIRGWIFGTTLDSKTQSLLIVNNATNVVIKVCEFQFCNDPFLGVYYHKNNKSWMESEFRVYSSANNCTFEYVSQPFLMDLEGKQGNFKNLREFVFKNIDGYFKIYSKHTPINLVRDLPQGFSALEPLVDLPIGINITRFQTLLALHRSYLTPGDSSSGWTAGAAAYYVGYLQPRTFLLKYNENGTITDAVDCALDPLSETKCTLKSFTVEKGIYQTSNFRVQPTESIVRFPNITNLCPFGEVFNATRFASVYAWNRKRISNCVADYSVLYNSASFSTFKCYGVSPTKLNDLCFTNVYADSFVIRGDEVRQIAPGQTGKIADYNYKLPDDFTGCVIAWNSNNLDSKVGGNYNYLYRLFRKSNLKPFERDISTEIYQAGSTPCNGVEGFNCYFPLQSYGFQPTNGVGYQPYRVVVLSFELLHAPATVCGPKKSTNLVKNKCVNFNFNGLTGTGVLTESNKKFLPFQQFGRDIADTTDAVRDPQTLEILDITPCSFGGVSVITPGTNTSNQVAVLYQDLNCTEVPVAIHADQLTPTWRVYSTGSNVFQTRAGCLIGAEHVNNSYECDIPIGAGICASYQTQTNSPRRARSVASQSIIAYTMSLGAENSVAYSNNSIAIPTNFTISVTTEILPVSMTKTSVDCTMYICGDSTECSNLLLQYGSFCTQLNRALTGIAVEQDKNTQEVFAQVKQIYKTPPIKDFGGFNFSQILPDPSKPSKRSFIEDLLFNKVTLADAGFIKQYGDCLGDIAARDLICAQKFNGLTVLPPLLTDEMIAQYCSALLAGTITSGWTFGAGAALQIPFAMQMAYRFNGIGVTQNVLYENQKLIANQFNSAIGKIQDSLSSTASALGKLQDVVNQNAQALNTLVKQLSSNFGAISSVLNDILSRLDKVEAEVQIDRLITGRLQSLQTYVTQQLIRAAEIRASANLAATKMSECVLGQSKRVDFCGKGYHLMSFPQCAPHGVVFLHVTYVPAQEKNFTTAPAICHDGKAHFPREGVFVSNGTHWFVTQRNFYEPQIITTDNTFVSGNCDVVIGIVNNTVYDPLQPELDSFKEELDKYFKNHTSPDVDLGDISGINASVVNIQKEIDRLNEVAKNLNESLIDLQELGKYEQYIKGGSGYIPEAPRDGQAYVRKDGEWVLLSTFL

SEQ ID NO: 6587 - protein, 1241 aa, Artificial Sequence
  SARS-CoV-2/Hong Kong/case42_VM20002493/2020__EPI_ISL_414527 spike protein (1-1211)(T874C_S1055C) Foldon construct
MFVFLVLLPLVSSQCVNLTTRTQLPPAYTNSFTRGVYYPDKVFRSSVLHSTQDLFLPFFSNVTWFHAIHVSGTNGTKRFDNPVLPFNDGVYFASTEKSNIIRGWIFGTTLDSKTQSLLIVNNATNVVIKVCEFQFCNDPFLGVYYHKNNKSWMESEFRVYSSANNCTFEYVSQPFLMDLEGKQGNFKNLREFVFKNIDGYFKIYSKHTPINLVRDLPQGFSALEPLVDLPIGINITRFQTLLALHRSYLTPGDSSSGWTAGAAAYYVGYLQPRTFLLKYNENGTITDAVDCALDPLSETKCTLKSFTVEKGIYQTSNFRVQPTESIVRFPNITNLCPFGEVFNATRFASVYAWNRKRISNCVADYSVLYNSASFSTFKCYGVSPTKLNDLCFTNVYADSFVIRGDEVRQIAPGQTGKIADYNYKLPDDFTGCVIAWNSNNLDSKVGGNYNYLYRLFRKSNLKPFERDISTEIYQAGSTPCNGVEGFNCYFPLQSYGFQPTNGVGYQPYRVVVLSFELLHAPATVCGPKKSTNLVKNKCVNFNFNGLTGTGVLTESNKKFLPFQQFGRDIADTTDAVRDPQTLEILDITPCSFGGVSVITPGTNTSNQVAVLYQDVNCTEVPVAIHADQLTPTWRVYSTGSNVFQTRAGCLIGAEHVNNSYECDIPIGAGICASYQTQTNSPRRARSVASQSIIAYTMSLGAENSVAYSNNSIAIPTNFAISVTTEILPVSMTKTSVDCTMYICGDSTECSNLLLQYGSFCTQLNRALTGIAVEQDKNTQEVFAQVKQIYKTPPIKDFGGFNFSQILPDPSKPSKRSFIEDLLFNKVTLADAGFIKQYGDCLGDIAARDLICAQKFNGLTVLPPLLTDEMIAQYCSALLAGTITSGWTFGAGAALQIPFAMQMAYRFNGIGVTQNVLYENQKLIANQFNSAIGKIQDSLSSTASALGKLQDVVNQNAQALNTLVKQLSSNFGAISSVLNDILSRLDKVEAEVQIDRLITGRLQSLQTYVTQQLIRAAEIRASANLAATKMSECVLGQSKRVDFCGKGYHLMSFPQCAPHGVVFLHVTYVPAQEKNFTTAPAICHDGKAHFPREGVFVSNGTHWFVTQRNFYEPQIITTDNTFVSGNCDVVIGIVNNTVYDPLQPELDSFKEELDKYFKNHTSPDVDLGDISGINASVVNIQKEIDRLNEVAKNLNESLIDLQELGKYEQYIKGGSGYIPEAPRDGQAYVRKDGEWVLLSTFL

SEQ ID NO: 6588 - protein, 1241 aa, Artificial Sequence
  SARS-CoV-2/USA/CruiseA-23/2020__EPI_ISL_414482 spike protein (1-1211)(T874C_S1055C) Foldon construct
MFVFLVLLPLVSSQCVNLTTRTQLPPAYTNSFTRGVYYPDKVFRSSVLHSTQDLFLPFFSNVTWFHAIHVSGTNGTKRFDNPVLPFNDGVYFASTEKSNIIRGWIFGTTLDSKTQSLLIVNNATNVVIKVCEFQFCNDPFLGVYYHKNNKSWMESEFRVYSSANNCTFEYVSQPFLMDLEVKQGNFKNLREFVFKNIDGYFKIYSKHTPINLVRDLPQGFSALEPLVDLPIGINITRFQTLLALHRSYLTPGDSSSGWTAGAAAYYVGYLQPRTFLLKYNENGTITDAVDCALDPLSETKCTLKSFTVEKGIYQTSNFRVQPTESIVRFPNITNLCPFGEVFNATRFASVYAWNRKRISNCVADYSVLYNSASFSTFKCYGVSPTKLNDLCFTNVYADSFVIRGDEVRQIAPGQTGKIADYNYKLPDDFTGCVIAWNSNNLDSKVGGNYNYLYRLFRKSNLKPFERDISTEIYQAGSTPCNGVEGFNCYFPLQSYGFQPTNGVGYQPYRVVVLSFELLHAPATVCGPKKSTNLVKNKCVNFNFNGLTGTGVLTESNKKFLPFQQFGRDIADTTDAVRDPQTLEILDITPCSFGGVSVITPGTNTSNQVAVLYQDVNCTEVPVAIHADQLTPTWRVYSTGSNVFQTRAGCLIGAEHVNNSYECDIPIGAGICASYQTQTNSPRRARSVASQSIIAYTMSLGAENSVAYSNNSIAIPTNFTISVTTEILPVSMTKTSVDCTMYICGDSTECSNLLLQYGSFCTQLNRALTGIAVEQDKNTQEVFAQVKQIYKTPPIKDFGGFNFSQILPDPSKPSKRSFIEDLLFNKVTLADAGFIKQYGDCLGDIAARDLICAQKFNGLTVLPPLLTDEMIAQYCSALLAGTITSGWTFGAGAALQIPFAMQMAYRFNGIGVTQNVLYENQKLIANQFNSAIGKIQDSLSSTASALGKLQDVVNQNAQALNTLVKQLSSNFGAISSVLNDILSRLDKVEAEVQIDRLITGRLQSLQTYVTQQLIRAAEIRASANLAATKMSECVLGQSKRVDFCGKGYHLMSFPQCAPHGVVFLHVTYVPAQEKNFTTAPAICHDGKAHFPREGVFVSNGTHWFVTQRNFYEPQIITTDNTFVSGNCDVVIGIVNNTVYDPLQPELDSFKEELDKYFKNHTSPDVDLGDISGINASVVNIQKEIDRLNEVAKNLNESLIDLQELGKYEQYIKGGSGYIPEAPRDGQAYVRKDGEWVLLSTFL

SEQ ID NO: 6589 - protein, 1241 aa, Artificial Sequence
  SARS-CoV-2/Hong Kong/case85_VM20002868/2020__EPI_ISL_414519 spike protein (1-1211)(T874C_S1055C) Foldon construct
MFVFLVLVPLVSSQCVNLTTRTQLPPAYTNSFTRGVYYPDKVFRSSVLHSTQDLFLPFFSNVTWFHAIHVSGTNGTKRFDNPVLPFNDGVYFASTEKSNIIRGWIFGTTLDSKTQSLLIVNNATNVVIKVCEFQFCNDPFLGVYYHKNNKSWMESEFRVYSSANNCTFEYVSQPFLMDLEGKQGNFKNLREFVFKNIDGYFKIYSKHTPINLVRDLPQGFSALEPLVDLPIGINITRFQTLLALHRSYLTPGDSSSGWTAGAAAYYVGYLQPRTFLLKYNENGTITDAVDCALDPLSETKCTLKSFTVEKGIYQTSNFRVQPTESIVRFPNITNLCPFGEVFNATRFASVYAWNRKRISNCVADYSVLYNSASFSTFKCYGVSPTKLNDLCFTNVYADSFVIRGDEVRQIAPGQTGKIADYNYKLPDDFTGCVIAWNSNNLDSKVGGNYNYLYRLFRKSNLKPFERDISTEIYQAGSTPCNGVEGFNCYFPLQSYGFQPTNGVGYQPYRVVVLSFELLHAPATVCGPKKSTNLVKNKCVNFNFNGLTGTGVLTESNKKFLPFQQFGRDIADTTDAVRDPQTLEILDITPCSFGGVSVITPGTNTSNQVAVLYQDVNCTEVPVAIHADQLTPTWRVYSTGSNVFQTRAGCLIGAEHVNNSYECDIPIGAGICASYQTQTNSPRRARSVASQSIIAYTMSLGAENSVAYSNNSIAIPTNFTISVTTEILPVSMTKTSVDCTMYICGDSTECSNLLLQYGSFCTQLNRALTGIAVEQDKNTQEVFAQVKQIYKTPPIKDFGGFNFSQILPDPSKPSKRSFIEDLLFNKVTLADAGFIKQYGDCLGDIAARDLICAQKFNGLTVLPPLLTDEMIAQYCSALLAGTITSGWTFGAGAALQIPFAMQMAYRFNGIGVTQNVLYENQKLIANQFNSAIGKIQDSLSSTASALGKLQDVVNQNAQALNTLVKQLSSNFGAISSVLNDILSRLDKVEAEVQIDRLITGRLQSLQTYVTQQLIRAAEIRASANLAATKMSECVLGQSKRVDFCGKGYHLMSFPQCAPHGVVFLHVTYVPAQEKNFTTAPAICHDGKAHFPREGVFVSNGTHWFVTQRNFYEPQIITTDNTFVSGNCDVVIGIVNNTVYDPLQPELDSFKEELDKYFKNHTSPDVDLGDISGINASVVNIQKEIDRLNEVAKNLNESLIDLQELGKYEQYIKGGSGYIPEAPRDGQAYVRKDGEWVLLSTFL

SEQ ID NO: 6590 - protein, 1241 aa, Artificial Sequence; identical to SEQ ID NO: 6580
  SARS-CoV-2/England/200990660/2020__EPI_ISL_414523 spike protein (1-1211)(T874C_S1055C) Foldon construct

SEQ ID NO: 6591 - protein, 1241 aa, Artificial Sequence
  SARS-CoV-2/Australia/NSW09/2020__EPI_ISL_413595 spike protein (1-1211)(T874C_S1055C) Foldon construct
MFVFLVLLPLVSSQCVNLTTRTQLPPAYTNSFTRGVYYPDKVFRSSVLHSTQDLFLPFFSNVTWFHAIHVSGTNGTKRFDNPVLPFNDGVYFASTEKSNIIRGWIFGTTLDSKTQSLLIVNNATNVVIKVCEFQFCNDPFLGVYYHKNNKSWMESEFRVYSSANNCTFEYVSQPFLMDLEGKQGNFKNLREFVFKNIDGYFKIYSKHTPINLVRDLPQGFSALEPLVDLPIGINITRFQTLLALHRSYLTPGDSSSGWTAGAAAYYVGYLQPRTFLLKYNENGTITDAVDCALDPLSETKCTLKSFTVEKGIYQTSNFRVQPTESIVRFPNITNLCPFGEVFNATRFASVYAWNRKRISNCVADYSVLYNSASFSTFKCYGVSPTKLNDLCFTNVYADSFVIRGDEVRQIAPGQTGKIADYNYKLPDDFTGCVIAWNSNNLDSKVGGNYNYLYRLFRKSNLKPFERDISTEIYQAGSTPCNGVEGFNCYFPLQSYGFQPTNGVGYQPYRVVVLSFELLHAPATVCGPKKSTNLVKNKCVNFNFNGLTGTGVLTESNKKFLPFQQFGRDIADTTDAVRDPQTLEILDITPCSFGGVSVITPGTNTSNQVAVLYQDVNCTEVPVAIHADQLTPTWRVYSTGSNVFQTRAGCLIGAEHVNNSYECDIPIGAGICASYQTQTNSPRRARSVASQSIIAYTMSLGAENSVAYSNNSIAIPTNFTISVTTEILPVSMTKTSVDCTMYICGDSTECSNLLLQYGSFCTQLNRALTGIAVEQDKNTQEVFAQVKQIYKTPPIKDFGGFNFSQILPDPSKPSKRSFIEDLLFNKVTLADAGFIKQYGDCLGDIAARDLICAQKFNGLTVLPPLLTDEMIAQYCSALLAGTITSGWTFGAGAALQIPFAMQMAYRFNGIGVTQNVLYENQKLIANQFNSAIGKIQDSLSFTASALGKLQDVVNQNAQALNTLVKQLSSNFGAISSVLNDILSRLDKVEAEVQIDRLITGRLQSLQTYVTQQLIRAAEIRASANLAATKMSECVLGQSKRVDFCGKGYHLMSFPQCAPHGVVFLHVTYVPAQEKNFTTAPAICHDGKAHFPREGVFVSNGTHWFVTQRNFYEPQIITTDNTFVSGNCDVVIGIVNNTVYDPLQPELDSFKEELDKYFKNHTSPDVDLGDISGINASVVNIQKEIDRLNEVAKNLNESLIDLQELGKYEQYIKGGSGYIPEAPRDGQAYVRKDGEWVLLSTFL

SEQ ID NO: 6592 - protein, 1241 aa, Artificial Sequence; identical to SEQ ID NO: 6572
  SARS-CoV-2/Australia/NSW10/2020__EPI_ISL_413596 spike protein (1-1211)(T874C_S1055C) Foldon construct

SEQ ID NO: 6593 - protein, 1241 aa, Artificial Sequence
  SARS-CoV-2/Switzerland/1000477797/2020__EPI_ISL_413023 spike protein (1-1211)(T874C_S1055C) Foldon construct
MFVFLVLLPLVSSQCVNLTTRTQLPPAYTNSFTRGVYYPDKVFRSSVLHSTQDLFLPFFSNVTWFHAIHVSGTNGTKRFDNPVLPFNDGVYFASTEKSNIIRGWIFGTTLDSKTQSLLIVNNATNVVIKVCEFQFCNDPFLGVYYHKNNKSWMESEFRVYSSANNCTFEYVSQPFLMDLEGKQGNFKNLREFVFKNIDGYFNIYSKHTPINLVRDLPQGFSALEPLVDLPIGINITRFQTLLALHRSYLTPGDSSSGWTAGAAAYYVGYLQPRTFLLKYNENGTITDAVDCALDPLSETKCTLKSFTVEKGIYQTSNFRVQPTESIVRFPNITNLCPFGEVFNATRFASVYAWNRKRISNCVADYSVLYNSASFSTFKCYGVSPTKLNDLCFTNVYADSFVIRGDEVRQIAPGQTGKIADYNYKLPDDFTGCVIAWNSNNLDSKVGGNYNYLYRLFRKSNLKPFERDISTEIYQAGSTPCNGVEGFNCYFPLQSYGFQPTNGVGYQPYRVVVLSFELLHAPATVCGPKKSTNLVKNKCVNFNFNGLTGTGVLTESNKKFLPFQQFGRDIADTTDAVRDPQTLEILDITPCSFGGVSVITPGTNTSNQVAVLYQGVNCTEVPVAIHADQLTPTWRVYSTGSNVFQTRAGCLIGAEHVNNSYECDIPIGAGICASYQTQTNSPRRARSVASQSIIAYTMSLGAENSVAYSNNSIAIPTNFTISVTTEILPVSMTKTSVDCTMYICGDSTECSNLLLQYGSFCTQLNRALTGIAVEQDKNTQEVFAQVKQIYKTPPIKDFGGFNFSQILPDPSKPSKRSFIEDLLFNKVTLADAGFIKQYGDCLGDIAARDLICAQKFNGLTVLPPLLTDEMIAQYCSALLAGTITSGWTFGAGAALQIPFAMQMAYRFNGIGVTQNVLYENQKLIANQFNSAIGKIQDSLSSTASALGKLQDVVNQNAQALNTLVKQLSSNFGAISSVLNDILSRLDKVEAEVQIDRLITGRLQSLQTYVTQQLIRAAEIRASANLAATKMSECVLGQSKRVDFCGKGYHLMSFPQCAPHGVVFLHVTYVPAQEKNFTTAPAICHDGKAHFPREGVFVSNGTHWFVTQRNFYEPQIITTDNTFVSGNCDVVIGIVNNTVYDPLQPELDSFKEELDKYFKNHTSPDVDLGDISGINASVVNIQKEIDRLNEVAKNLNESLIDLQELGKYEQYIKGGSGYIPEAPRDGQAYVRKDGEWVLLSTFL

SEQ ID NO: 6594 - protein, 1241 aa, Artificial Sequence
  SARS-CoV-2/Belgium/BA-02291/2020__EPI_ISL_415159 spike protein (1-1211)(T874C_S1055C) Foldon construct
MFVFLVLLPLVSSQCVNLTTRTQLPPAYTNSFTRGVYYPDKVFRSSVLHSTQDLFLPFFSNVTWFHAIHVSGTNGTKRFDNPVLPFNDGVYFASTEKSNIIRGWIFGTTLDSKTQSLLIVNNATNVVIKVCEFQFCNDPFLGVYYHKNNKSWMESEFRVYSSANNCTFEYVSQPFLMDLEGKQGNFKNLREFVFKNIDGYFKIYSKHTPINLVRDLPQGFSALEPLVDLPIGINITRFQTLLALHRSYLTPGDSSSGWTAGAAAYYVGYLQPRTFLLKYNENGTITDAVDCALDPLSETKCTLKSFTVEKGIYQTSNFRVQPTESIVRFPNITNLCPFGEVFNATRFASVYAWNRKRISNCVADYSVLYNSASFSTFKCYGVSPTKLNDLCFTNVYADSFVIRGDEVRQIAPGQTGKIADYNYKLPDDFTGCVIAWNSNNLDSKVGGNYNYLYRLFRRSNLKPFERDISTEIYQAGSTPCNGVEGFNCYFPLQSYGFQPTNGVGYQPYRVVVLSFELLPAPATVCGPKKSTNLVKNKCVNFNFNGLTGTGVLTESNKKFLPFQQFGRDIADTTDAVRDPQTLEILDITPCSFGGVSVITPGTNTSNQVAVLYQGVNCTEVPVAIHADQLTPTWRVYSTGSNVFQTRAGCLIGAEHVNNSYECDIPIGAGICASYQTQTNSPRRARSVASQSIIAYTMSLGAENSVAYSNNSIAIPTNFTISVTTEILPVSMTKTSVDCTMYICGDSTECSNLLLQYGSFCTQLNRALTGIAVEQDKNTQEVFAQVKQIYKTPPIKDFGGFNFSQILPDPSKPSKRSFIEDLLFNKVTLADAGFIKQYGDCLGDIAARDLICAQKFNGLTVLPPLLTDEMIAQYCSALLAGTITSGWTFGAGAALQIPFAMQMAYRFNGIGVTQNVLYENQKLIANQFNSAIGKIQDSLSSAAPALGKLQDVVNQNAQALNTLVKQLSSNFGAISSVLNDILSRLDKVEAEVQIDRLITGRLQSLQTYVTQQLIRAAEIRASANLAATKMSECVLGQSKRVDFCGKGYHLMSFPQCAPHGVVFLHVTYVPAQEKNFTTAPAICHDGKAHFPREGVFVSNGTHWFVTQRNFYEPQIITTDNTFVSGNCDVVIGIVNNTVYDPLQPELDSFKEELDKYFKNHTSPDVDLGDISGINASVVNIQKEIDRLNEVAKNLNESLIDLQELGKYEQYIKGGSGYIPEAPRDGQAYVRKDGEWVLLSTFL

SEQ ID NO: 6595 - protein, 1241 aa, Artificial Sequence
  SARS-CoV-2/USA/WA8-UW5/2020__EPI_ISL_413486 spike protein (1-1211)(T874C_S1055C) Foldon construct
MFVFLVLLPLVSSQCVNLTTRTQLPPAYTNSFTRGVYYPDKVFRSSVLHSTQDLFLPFFSNVTWFHAIHVSGTNGTKRFDNPVLPFNDGVYFASTEKSNIIRGWIFGTTLDSKTQSLLIVNNATNVVIKVCEFQFCNDPFLGVYYHKNNKSWMESEFRVYSSANNCTFEYVSQPFLMDLEGKQGNFKNLREFVFKNIDGYFKIYSKHTPINLVRDLPQGFSALEPLVDLPIGINITRFQTLLALHRSYLTPGDSSSGWTAGAAAYYVGYLQPRTFLLKYNENGTITDAVDCALDPLSETKCTLKSFTVEKGIYQTSNFRVQPTESIVRFPNITNLCPFGEVFNATRFASVYAWNRKRISNCVADYSVLYNSASFSTFKCYGVSPTKLNDLCFTNVYADSFVIRGDEVRQIAPGQTGKIADYNYKLPDDFTGCVIAWNSNNLDSKVGGNYNYLYRLFRKSNLKPFERDISTEIYQAGSTPCNGVEGFNCYFPLQSYGFQPTNGVGYQPYRVVVLSFELLHAPATVCGPKKSTNLVKNKCVNFNFNGLTGTGVLTESNKKFLPFQQFGRDIADTTDAVRDPQTLEILDITPCSFGGVSVITPGTNTSNQVAVLYQDVNCTEVPVAIHADQLTPTWRVYSTGSNVFQTRAGCLIGAEYVNNSYECDIPIGAGICASYQTQTNSPRRARSVASQSIIAYTMSLGAENSVAYSNNSIAIPTNFTISVTTEILPVSMTKTSVDCTMYICGDSTECSNLLLQYGSFCTQLNRALTGIAVEQDKNTQEVFAQVKQIYKTPPIKDFGGFNFSQILPDPSKPSKRSFIEDLLFNKVTLADAGFIKQYGDCLGDIAARDLICAQKFNGLTVLPPLLTDEMIAQYCSALLAGTITSGWTFGAGAALQIPFAMQMAYRFNGIGVTQNVLYENQKLIANQFNSAIGKIQDSLSSTASALGKLQDVVNQNAQALNTLVKQLSSNFGAISSVLNDILSRLDKVEAEVQIDRLITGRLQSLQTYVTQQLIRAAEIRASANLAATKMSECVLGQSKRVDFCGKGYHLMSFPQCAPHGVVFLHVTYVPAQEKNFTTAPAICHDGKAHFPREGVFVSNGTHWFVTQRNFYEPQIITTDNTFVSGNCDVVIGIVNNTVYDPLQPELDSFKEELDKYFKNHTSPDVDLGDISGINASVVNIQKEIDRLNEVAKNLNESLIDLQELGKYEQYIKGGSGYIPEAPRDGQAYVRKDGEWVLLSTFL

SEQ ID NO: 6596 - protein, 1241 aa, Artificial Sequence
  SARS-CoV-2/England/20102000506/2020__EPI_ISL_415147 spike protein (1-1211)(T874C_S1055C) Foldon construct
MFVFLVLLPLVSSQCVNLTTRTQLPPAYTNSFTRGVYYPDKVFRSSVLHSTQDLFLPFFSNVTWFHAIHVSGTNGTKRFDNPVLPFNDGVYFASTEKSNIIRGWIFGTTLDSKTQSLLIVNNATNVVIKVCEFQFCNDPFLGVYYHKNNKSWMESEFRVYSSANNCTFEYVSQPFLMDLEGKQGNFKNLREFVFKNIDGYFKIYSKHTPINLVRDLPQGFSALEPLVDLPIGINITRFQTLLALHRSYLTPGDSSSGWTAGAAAYYVGYLQPRTFLLKYNENGTITDAVDCALDPLSETKCTLKSFTVEKGIYQTSNFRVQPTESIVRFPNITNLCPFGEVFNATRFASVYAWNRKRISNCVADYSVLYNSASFSTFKCYGVSPTKLNDLCFTNVYADSFVIRGDEVRQIAPGQTGKIADYNYKLPDDFTGCVIAWNSNNLDSKVGGNYNYLYRLFRKSNLKPFERDISTEIYQAGSTPCNGVEGFNCYFPLQSYGFQPTNGVGYQPYRVVVLSFELLHAPATVCGPKKSTNLVKNKCVNFNFNGLTGTGVLTESNKKFLPFQQFGRDIADTTDAVRDPQTLEILDITPCSFGGVSVITPGTNTSNQVAVLYQGVNCTEVPVAIHADQLTPTWRVYSTGSNVFQTRAGCLIGAEHVNNSYECDIPIGAGICASYQTQTNSPRRARSVASQSIIAYTMSLGAENSVAYSNNSIAIPTNFTISVTTEILPVSMTKTSVDCTMYICGDSTECSNLLLQYGSFCTQLNRALTGIAVEQDKNTQEVFAQVKQIYKTPPIKDFGGFNFSQILPDPSKPSKRSFIEDLLFNKVTLADAGFIKQYGYCLGDIAARDLICAQKFNGLTVLPPLLTDEMIAQYCSALLAGTITSGWTFGAGAALQIPFAMQMAYRFNGIGVTQNVLYENQKLIANQFNSAIGKIQDSLSSTASALGKLQDVVNQNAQALNTLVKQLSSNFGAISSVLNDILSRLDKVEAEVQIDRLITGRLQSLQTYVTQQLIRAAEIRASANLAATKMSECVLGQSKRVDFCGKGYHLMSFPQCAPHGVVFLHVTYVPAQEKNFTTAPAICHDGKAHFPREGVFVSNGTHWFVTQRNFYEPQIITTDNTFVSGNCDVVIGIVNNTVYDPLQPELDSFKEELDKYFKNHTSPDVDLGDISGINASVVNIQKEIDRLNEVAKNLNESLIDLQELGKYEQYIKGGSGYIPEAPRDGQAYVRKDGEWVLLSTFL

SEQ ID NO: 6597 - protein, 1241 aa, Artificial Sequence
  SARS-CoV-2/Belgium/VAG-03013/2020__EPI_ISL_415155 spike protein (1-1211)(T874C_S1055C) Foldon construct
MFVFLVLLPLVSSQCVNLTTRTQLPPAYTNSFTRGVYYPDKVFRSSVLHSTQDLFLPFFSNVTWFHAIHVSGTNGTKRFDNPVLPFNDGVYFASTEKSNIIRGWIFGTTLDSKTQSLLIVNNATNVVIKVCEFQFCNDPFLGVYYHKNNKSWMESEFRVYSSANNCTFEYVSQPFLMDLEGKQGNFKNLREFVFKNIDGYFKIYSKHTPINLVRDLPQGFSALEPLVDLPIGINITRFQTLLALHRSYLTPGDSSSGWTAGAAAYYVGYLQPRTFLLKYNENGTITDAVDCALDPLSETKCTLKSFTVEKGIYQTSNFRVQPTESIVRFPNITNLCPFGEVFNATRFASVYAWNRKRISNCVADYSVLYNSASFSTFKCYGVSPTKLNDLCFTNVYADSFVIRGDEVRQIAPGQTGKIADYNYKLPDDFTGCVIAWNSNNLDSKVGGNYNYLYRLFRKSNLKPFERDISTEIYQAGSTPCNGVEGFNCYFPLQSYGFQPTNGVGYQPYRVVVLSFELLHAPATVCGPKKSTNLVKNKCVNFNFNGLTGTGVLTESNKKFLPFQQFGRDIADTTDAVRDPQTLEILDITPCSFGGVSVITPGTNTSNQVAVLYQGVNCTEVPVAIHADQLTPTWRVYSTGSNVFQTRAGCLIGAEHVNNSYECDIPIGAGICASYQTQTNSPRRARSVASQSIIAYTMSLGAENSVAYSNNSIAIPTNFTISVTTEILPVSMTKTSVDCTMYICGDSTECSNLLLQYGSFCTQLNRALTGIAVEQDKNTQEVFAQVKQIYKTPPIKDFGGFNFSQILPDPSKPSKRSFIEDLLFNKVTLADAGFIKQYGDCLGDIAARDLICAQKFNGLTVLPPLLTDEMIAQYCSALLAGTITSGWTFGAGAALQIPFAMQMAYRFNGIGVTQNVLYENQKLIANQFNSAIGKIQDSLSSTATALGKLQDVVNQNAQALNTLVKQLSSNFGAISSVLNDILSRLDKVEAEVQIDRLITGRLQSLQTYVTQQLIRAAEIRASANLAATKMSECVLGQSKRVDFCGKGYHLMSFPQCAPHGVVFLHVTYVPAQEKNFTTAPAICHDGKAHFPREGVFVSNGTHWFVTQRNFYEPQIITTDNTFVSGNCDVVIGIVNNTVYDPLQPELDSFKEELDKYFKNHTSPDVDLGDISGINASVVNIQKEIDRLNEVAKNLNESLIDLQELGKYEQYIKGGSGYIPEAPRDGQAYVRKDGEWVLLSTFL

SEQ ID NO: 6598 - protein, 1241 aa, Artificial Sequence
  SARS-CoV-2/Belgium/BC-03016/2020__EPI_ISL_415157 spike protein (1-1211)(T874C_S1055C) Foldon construct
MFVFLVLLPLVSSQCVNLTTRTQLPPAYTNSFTRGVYYPDKVFRSSVLHSTQDLFLPFFSNVTWFHAIHVSGTNGTKRFDNPVLPFNDGVYFASTEKSNIIRGWIFGTTLDSKTQSLLIVNNATNVVIKVCEFQFCNDPFLGVYYHKNNKSWMESEFRVYSSANNCTFEYVSQPFLMDLEGKQGNFKNLREFVFKNIDGYFKIYSKHTPINLVRDLPQGFSALEPLVDLPIGINITRFQTLLALHRSYLTPGDSSSGWTAGAAAYYVGYLQPRTFLLKYNENGTITDAVDCALDPLSETKCTLKSFTVEKGIYQTSNFRVQPTESIVRFPNITNLCPFGEVFNATRFASVYAWNRKRISNCVADYSVLYNSASFSTFKCYGVSPTKLNDLCFTNVYADSFVIRGDEVRQIAPGQTGKIADYNYKLPDDFTGCVIAWNSNNLDSKVGGNYNYLYRLFRKSNLKPFERDISTEIYQAGSTPCNGVEGFNCYFPLQSYGFQPTNGVGYQPYRVVVLSFELLHAPATVCGPKKSTNLVKNKCVNFNFNGLTGTGVLTESNKKFLPFQQFGRDIADTTDAVRDPQTLEILDITPCSFGGVSVITPGTNTSNQVAVLYQGVNCTEVPVAIHADQLTPTWRVYSTGSNVFQTRAGCLIGAEHVNNSYECDIPIGAGICASYQTQTNSPRRARSVASQSIIAYTMSLGAENSVAYSNNSIAIPTNFTISVTTEILPVSMTKTSVDCTMYICGDSTECSNLLLQYGSFCTQLNRALTGIAVEQDKNTQEVFAQVKQIYKTPPIKDFGGFNFSQILPDPSKPSKRSFIEDLLFNKVTLADAGFIKQYGDCLGDIAARDLICAQKFNGLTVLPPLLTDEMIAQYCSALLAGTITSGWTFGAGAALQIPFAMQMAYRFNGIGVTQNVLYENQKLIANQFNSAIGKIQDSLSSTAPALGKLQDVVNQNAQALNTLVKQLSSNFGAISSVLNDILSRLDKVEAEVQIDRLITGRLQSLQTYVTQQLIRAAEIRASANLAATKMSECVLGQSKRVDFCGKGYHLMSFPQCAPHGVVFLHVTYVPAQEKNFTTAPAICHDGKAHFPREGVFVSNGTHWFVTQRNFYEPQIITTDNTFVSGNCDVVIGIVNNTVYDPLQPELDSFKEELDKYFKNHTSPDVDLGDISGINASVVNIQKEIDRLNEVAKNLNESLIDLQELGKYEQYIKGGSGYIPEAPRDGQAYVRKDGEWVLLSTFL

SEQ ID NO: 6599 - protein, 1241 aa, Artificial Sequence
  SARS-CoV-2/Germany/BavPat3/2020__EPI_ISL_414521 spike protein (1-1211)(T874C_S1055C) Foldon construct
MFVFLVLLPLVSSQCVNLTTRTQLPPAYTNSFTRGVYYPDKVFRSSVLHSTQDLFLPFFSNVTWFHAIHVSGTNGTKRFDNPVLPFNDGVYFASTEKSNIIRGWIFGTTLDSKTQSLLIVNNATNVVIKVCEFQFCNDPFLGVYYHKNNKSWMESEFRVYSSANNCTFEYVSQPFLMDLEGKQGNFKNLREFVFKNIDGYFKIYSKHTPINLVRDLPQGFSALEPLVDLPIGINITRFQTLLALHRSYLTPGDSSSGWTAGAAAYYVGYLQPRTFLLKYNENGTITDAVDCALDPLSETKCTLKSFTVEKGIYQTSNFRVQPTESIVRFPNITNLCPFGEVFNATRFASVYAWNRKRISNCVADYSVLYNSASFSTFKCYGVSPTKLNDLCFTNVYADSFVIRGDEVRQIAPGQTGKIADYNYKLPDDFTGCVIAWNSNNLDSKVGGNYNYLYRLFRKSNLKPFERDISTEIYQAGSTPCNGVEGFNCYFPLQSYGFQPTNGVGYQPYRVVVLSFELLHAPATVCGPKKSTNLVKNKCVNFNFNGLTGTGVLTESNKKFLPFQQFGRDIADTTDAVRDPQTLEILDITPCSFGGVSVITPGTNTSNQVAVLYQDVNCTEVPVAIHADQLTPTWRVYSTGSNVFQTRAGCLIGAEHVNNSYECDIPIGAGICASYQTQTNSPRRARSVASQSIIAYTMSLGAENSVAYSNNSIAIPTNFTISVTTEILPVSMTKTSVDCTMYICGDSTECSNLLLQYGSFCTQLNRALTGIAVEQDKNTQQVFAQVKQIYKTPPIKDFGGFNFSQILPDPSKPSKRSFIEDLLFNKVTLADAGFIKQYGDCLGDIAARDLICAQKFNGLTVLPPLLTDEMIAQYCSALLAGTITSGWTFGAGAALQIPFAMQMAYRFNGIGVTQNVLYENQKLIANQFNSAIGKIQDSLSSTASALGKLQDVVNQNAQALNTLVKQLSSNFGAISSVLNDILSRLDKVEAEVQIDRLITGRLQSLQTYVTQQLIRAAEIRASANLAATKMSECVLGQSKRVDFCGKGYHLMSFPQCAPHGVVFLHVTYVPAQEKNFTTAPAICHDGKAHFPREGVFVSNGTHWFVTQRNFYEPQIITTDNTFVSGNCDVVIGIVNNTVYDPLQPELDSFKEELDKYFKNHTSPDVDLGDISGINASVVNIQKEIDRLNEVAKNLNESLIDLQELGKYEQYIKGGSGYIPEAPRDGQAYVRKDGEWVLLSTFL

SEQ ID NO: 6600 - protein, 1241 aa, Artificial Sequence
  SARS-CoV-2/France/HF1805/2020__EPI_ISL_414628 spike protein (1-1211)(T874C_S1055C) Foldon construct
MFVFLVLLPLVSSQCVNLTTRTQLPPAYTNSFTRGVYYPDKVFRSSVLHSTQDLFLPFFSNVTWFHAIHVSGTNGTKRFDNPVLPFNDGVYFASTEKSNIIRGWIFGTTLDSKTQSLLIVNNATNVVIKVCEFQFCNDPFLGVYYHKNNKSWMESEFRVYSSANNCTFEYVSQPFLMDLEGKQGNFKNLREFVFKNIDGYFKIYSKHTPINLVRDLPQGFSALEPLVDLPIGINITRFQTLLALHRSYLTPGDSSSGWTAGAAAYYVGYLQPRTFLLKYNENGTITDAVDCALDPLSETKCTLKSFTVEKGIYQTSNFRVQPTESIVRFPNITNLCPFGEVFNATRFASVYAWNRKRISNCVADYSVLYNSASFSTFKCYGVSPTKLNDLCFTNVYADSFVIRGDEVRQIAPGQTGKIADYNYKLPDDFTGCVIAWNSNNLDSKVGGNYNYLYRLFRKSNLKPFERDISTEIYQAGSTPCNGVEGFNCYFPLQSYGFQPTNGVGYQPYRVVVLSFELLHAPATVCGPKKSTNLVKNKCVNFNFNGLTGTGVLTESNKKFLPFQQFGRDIADTTDAVRDPQTLEILDITPCSFGGVSVITPGTNTSNQVAVLYQGVNCTEVPVAIHADQLTPTWRVYSTGSNVFQTRAGCLIGAEHVNNSYECDIPIGAGICASYQTQTNSPRRARSVASQSIIAYTMSLGAENSVAYSNNSIAIPTNFTISVTTEILPVSMTKTSVDCTMYICGDSTECSNLLLQYGSFCTQLNRALTGIAVEQDKNTQEVFAQVKQIYKTPPIKDFGGFNFSQILPDPSKPSKRSFIEDLLFNKVTLADAGFIKQYGDCLGDIAARDLICAQKFNGLTVLPPLLTDEMIAQYCSALLAGTITSGWTFGAGAALQIPFAMQMAYRFNGIGVTQNVLYENQKLIANQFNSAIGKIQDSLSSTASALGKLQDVVNQNAQALNTLVKQLSSNFGAISSVLNDILSRLDKVEAEVQIDRLITGRLQSLQTYVTQQLIRAAEIRASANLAATKMSECVLGQSKRVDFCGKGYHLMSFPQCAPHGVVFLHVTYVPAQEKNFTTAPAICHDGKAHFPREGVFVSNGTHWFVTQRNFYEPQIITTDNTFVSGNCDVVIGVVNNTVYDPLQPELDSFKEELDKYFKNHTSPDVDLGDISGINASVVNIQKEIDRLNEVAKNLNESLIDLQELGKYEQYIKGGSGYIPEAPRDGQAYVRKDGEWVLLSTFL

SEQ ID NO: 6601 - protein, 1241 aa, Artificial Sequence
  SARS-CoV-2/Netherlands/ZuidHolland_9/2020__EPI_ISL_414445 spike protein (1-1211)(T874C_S1055C) Foldon construct
MFVFLVLLPLVSSQCVNLTTRTQLPPAYTNSFTRGVYYPDKVFRSSVLHSTQDLFLPFFSNVTWFHAIHVSGTNGTKRFDNPVLPFNDGVYFASTEKSNIIRGWIFGTTLDSKTQSLLIVNNATNVVIKVCEFQFCNDPFLGVYYHKNNKSWMESEFRVYSSANNCTFEYVSQPFLMDLEGKQGNFKNLREFVFKNIDGYFKIYSKHTPINLVRDLPQGFSALEPLVDLPIGINITRFQTLLALHRSYLTPGDSSSGWTAGAAAYYVGYLQPRTFLLKYNENGTITDAVDCALDPLSETKCTLKSFTVEKGIYQTSNFRVQPTESIVRFPNITNLCPFGEVFNATRFASVYAWNRKRISNCVADYSVLYNSASFSTFKCYGVSPTKLNDLCFTNVYADSFVIRGDEVRQIAPGQTGKIADYNYKLPDDFTGCVIAWNSNNLDSKVGGNYNYLYRLFRKSNLKPFERDISTEIYQAGSTPCNGVEGFNCYFPLQSYGFQPTNGVGYQPYRVVVLSFELLHAPATVCGPKKSTNLVKNKCVNFNFNGLTGTGVLTESNKKFLPFQQFGRDIADTTDAVRDPQTLEILDITPCSFGGVSVITPGTNTSNQVAVLYQGVNCTEVPVAIHADQLTPTWRVYSTGSNVFQTRAGCLIGAEHVNNSYECDIPIGAGICASYQTQTNSPRRARSVASQSIIAYTMSLGAENSVAYSNNSIAIPTNFTISVTTEILPVSMTKTSVDCTMYICGDSTECSNLLLQYGSFCTQLNRALTGIAVEQDKNTQEVFAQVKQIYKTPPIKDFGGFNFSQILPDPSKPSKRSFIEDLLFNKVTLADAGFIKQYGDCLGDIAARDLICVQKFNGLTVLPPLLTDEMIAQYCSALLAGTITSGWTFGAGAALQIPFAMQMAYRFNGIGVTQNVLYENQKLIANQFNSAIGKIQDSLSSTASALGKLQDVVNQNAQALNTLVKQLSSNFGAISSVLNDILSRLDKVEAEVQIDRLITGRLQSLQTYVTQQLIRAAEIRASANLAATKMSECVLGQSKRVDFCGKGYHLMSFPQCAPHGVVFLHVTYVPAQEKNFTTAPAICHDGKAHFPREGVFVSNGTHWFVTQRNFYEPQIITTDNTFVSGNCDVVIGIVNNTVYDPLQPELDSFKEELDKYFKNHTSPDVDLGDISGINASVVNIQKEIDRLNEVAKNLNESLIDLQELGKYEQYIKGGSGYIPEAPRDGQAYVRKDGEWVLLSTFL

SEQ ID NO: 6602 - protein, 1241 aa, Artificial Sequence
  SARS-CoV-2/Finland/FIN03032020A/2020__EPI_ISL_413602 spike protein (1-1211)(T874C_S1055C) Foldon construct
MFVFLVLLPLVSSQCVNLTTRTQLPPAYTNSFTRGVYYPDKVFRSSVLHSTQDLFLPFFSNVTWFHAIHVSGTNGTKRFDNPVLPFNDGVYFASTEKSNIIRGWIFGTTLDSKTQSLLIVNNATNVVIKVCEFQFCNDPFLGVYYHKNNKSWMESEFRVYSSANNCTFEYVSQPFLMDLEGKQGNFKNLREFVFKNIDGYFKIYSKHTPINLVRDLPQGFSALEPLVDLPIGINITRFQTLLALHRSYLTPGDSSSGWTAGAAAYYVGYLQPRTFLLKYNENGTITDAVDCALDPLSETKCTLKSFTVEKGIYQTSNFRVQPTESIVRFPNITNLCPFGEVFNATRFASVYAWNRKRISNCVADYSVLYNSASFSTFKCYGVSPTKLNDLCFTNVYADSFVIRGDEVRQIAPGQTGKIADYNYKLPDDFTGCVISWNSNNLDSKVGGNYNYLYRLFRKSNLKPFERDISTEIYQAGSTPCNGVEGFNCYFPLQSYGFQPTNGVGYQPYRVVVLSFELLHAPATVCGPKKSTNLVKNKCVNFNFNGLTGTGVLTESNKKFLPFQQFGRDIADTTDAVRDPQTLEILDITPCSFGGVSVITPGTNTSNQVAVLYQGVNCTEVPVAIHADQLTPTWRVYSTGSNVFQTRAGCLIGAEHVNNSYECDIPIGAGICASYQTQTNSPRRARSVASQSIIAYTMSLGAENSVAYSNNSIAIPTNFTISVTTEILPVSMTKTSVDCTMYICGDSTECSNLLLQYGSFCTQLNRALTGIAVEQDKNTQEVFAQVKQIYKTPPIKDFGGFNFSQILPDPSKPSKRSFIEDLLFNKVTLADAGFIKQYGDCLGDIAARDLICAQKFNGLTVLPPLLTDEMIAQYCSALLAGTITSGWTFGAGAALQIPFAMQMAYRFNGIGVTQNVLYENQKLIANQFNSAIGKIQDSLSSTASALGKLQDVVNQNAQALNTLVKQLSSNFGAISSVLNDILSRLDKVEAEVQIDRLITGRLQSLQTYVTQQLIRAAEIRASANLAATKMSECVLGQSKRVDFCGKGYHLMSFPQCAPHGVVFLHVTYVPAQEKNFTTAPAICHDGKAHFPREGVFVSNGTHWFVTQRNFYEPQIITTDNTFVSGNCDVVIGIVNNTVYDPLQPELDSFKEELDKYFKNHTSPDVDLGDISGINASVVNIQKEIDRLNEVAKNLNESLIDLQELGKYEQYIKGGSGYIPEAPRDGQAYVRKDGEWVLLSTFL

SEQ ID NO: 6603 - protein, 1241 aa, Artificial Sequence
  SARS-CoV-2/France/GE1977/2020__EPI_ISL_414632 spike protein (1-1211)(T874C_S1055C) Foldon construct
MFVFLVLLPLVSSQCVNLTTRTQLPPAYTNSFTRGVYYPDKVFRSSVLHSTQDLFLPFFSNVTWFHAIHVSGTNGTKRFDNPVLPFNDGVYFASTEKSNIIRGWIFGTTLDSKTQSLLIVNNATNVVIKVCEFQFCNDPFLGVYYHKNNKSWMESEFRVYSSANNCTFEYVSQPFLMDLEGKQGNFKNLREFVFKNIDGYFKIYSKHTPINLVRDLPQGFSALEPLVDLPIGINITRFQTLLALHRSYLTPGDSSSGWTAGAAAYYVGYLQPRTFLLKYNENGTITDAVDCALDPLSETKCTLKSFTVEKGIYQTSNFRVQPTESIVRFPNITNLCPFGEVFNATRFASVYAWNRKRISNCVADYSVLYNSASFSTFKCYGVSPTKLNDLCFTNVYADSFVIRGDEVRQIAPGQTGKIADYNYKLPDDFTGCVIAWNSNNLDSKVGGNYNYLYRLFRKSNLKPFERDISTEIYQAGSTPCNGVEGFNCYFPLQSYGFQPTNGVGYQPYRVVVLSFELLHAPATVCGPKKSTNLVKNKCVNFNFNGLTGTGVLTESNKKFLPFQQFGRDIADTTDAVRDPQTLEILDITPCSFGGVSVITPGTNTSNQVAVLYQGVNCTEVPVAIHADQLTPTWRVYSTGSNVFQTRAGCLIGAEHVNNSYECDIPIGAGICASYQTQTNSPRRARSVASQSIIAYTMSLGAENSVAYSNNSIAIPTNFTISVTTEILPVSMTKTSVDCTMYICGDSTECSNLLLQYGSFCTQLNRALTGIAVEQDKNTQEVFAQVKQIYKTPPIKDFGGFNFSQILPDPSKPSKRSFIEDLLFNKVTLADAGFIKQYGDCLGDIAARDLICAQKFNGLTVLPPLLTDEMIAQYCSALLAGTITSGWTFGAGAALQIPFAMQMAYRFNGIGVTQNVLYENQKLIANQFNSAIGKIQDSLFSTASALGKLQDVVNQNAQALNTLVKQLSSNFGAISSVLNDILSRLDKVEAEVQIDRLITGRLQSLQTYVTQQLIRAAEIRASANLAATKMSECVLGQSKRVDFCGKGYHLMSFPQCAPHGVVFLHVTYVPAQEKNFTTAPAICHDGKAHFPREGVFVSNGTHWFVTQRNFYEPQIITTDNTFVSGNCDVVIGIVNNTVYDPLQPELDSFKEELDKYFKNHTSPDVDLGDISGINASVVNIQKEIDRLNEVAKNLNESLIDLQELGKYEQYIKGGSGYIPEAPRDGQAYVRKDGEWVLLSTFL

SEQ ID NO: 6604 - protein, 1241 aa, Artificial Sequence
  SARS-CoV-2/Finland/FIN-313/2020__EPI_ISL_414641 spike protein (1-1211)(T874C_S1055C) Foldon construct
MFVFLVLLPLVSSQCVNLTTRTQLPPAYTNSFTRGVYYPDKVFRSSVLHSTQDLFLPFFSNVTWFHAIHVSGTNGTKRFDNPVLPFNDGVYFASTEKSNIIRGWIFGTTLDSKTQSLLIVNNATNVVIKVCEFQFCNDPFLGVYYHKNNKSWMESEFRVYSSANNCTFEYVSQPFLMDLEGKQGNFKNLREFVFKNIDGYFKIYSKHTPINLVRDLPQGFSALEPLVDLPIGINITRFKTLLALHRSYLTPGDSSSGWTAGAAAYYVGYLQPRTFLLKYNENGTITDAVDCALDPLSETKCTLKSFTVEKGIYQTSNFRVQPTESIVRFPNITNLCPFGEVFNATRFASVYAWNRKRISNCVADYSVLYNSASFSTFKCYGVSPTKLNDLCFTNVYADSFVIRGDEVRQIAPGQTGKIADYNYKLPDDFTGCVIAWNSNNLDSKVGGNYNYLYRLFRKSNLKPFERDISTEIYQAGSTPCNGVEGFNCYFPLQSYGFQPTNGVGYQPYRVVVLSFELLHAPATVCGPKKSTNLVKNKCVNFNFNGLTGTGVLTESNKKFLPFQQFGRDIADTTDAVRDPQTLEILDITPCSFGGVSVITPGTNTSNQVAVLYQGVNCTEVPVAIHADQLTPTWRVYSTGSNVFQTRAGCLIGAEHVNNSYECDIPIGAGICASYQTQTNSPRRARSVASQSIIAYTMSLGAENSVAYSNNSIAIPTNFTISVTTEILPVSMTKTSVDCTMYICGDSTECSNLLLQYGSFCTQLNRALTGIAVEQDKNTQEVFAQVKQIYKTPPIKDFGGFNFSQILPDPSKPSKRSFIEDLLFNKVTLADAGFIKQYGDCLGDIAARDLICAQKFNGLTVLPPLLTDEMIAQYCSALLAGTITSGWTFGAGAALQIPFAMQMAYRFNGIGVTQNVLYENQKLIANQFNSAIGKIQDSLSSTASALGKLQDVVNQNAQALNTLVKQLSSNFGAISSVLNDILSRLDKVEAEVQIDRLITGRLQSLQTYVTQQLIRAAEIRASANLAATKMSECVLGQSKRVDFCGKGYHLMSFPQCAPHGVVFLHVTYVPAQEKNFTTAPAICHDGKAHFPREGVFVSNGTHWFVTQRNFYEPQIITTDNTFVSGNCDVVIGIVNNTVYDPLQPELDSFKEELDKYFKNHTSPDVDLGDISGINASVVNIQKEIDRLNEVAKNLNESLIDLQELGKYEQYIKGGSGYIPEAPRDGQAYVRKDGEWVLLSTFL

SEQ ID NO: 6605 - protein, 1241 aa, Artificial Sequence
  SARS-CoV-2/Netherlands/ZuidHolland_2/2020__EPI_ISL_414556 spike protein (1-1211)(T874C_S1055C) Foldon construct
MFVFLVLLPLVSSQCVNLTTRTQLPPAYTNSFTRGVYYPDKVFRSSVLHSTQDLFLPFFSNVTWFHAIHVSGTNGTKRFDNPVLPFNDGVYFASTEKSNIIRGWIFGTTLDSKTQSLLIVNNATNVVIKVCEFQFCNDPFLGVYYHKNNKSWMESEFRVYSSANNCTFEYVSQPFLMDLEGKQGNFKNLREFVFKNIDGYFKIYSKHTPINLVRDLPQGFSALEPLVDLPIGINITRFQTLLALHRSYLTPGDSSSGWTAGAAAYYVGYLQPRTFLLKYNENGTITDAVDCALDPLSETKCTLKSFTVEKGIYQTSNFRVQPTESIVRFPNITNLCPFGEVFNATRFASVYAWNRKRISNCVADYSVLYNSASFSTFKCYGVSPTKLNDLCFTNVYADSFVIRGDEVRQIAPGQTGKIADYNYKLPDDFTGCVIAWNSNNLDSKVGGNYNYLYRLFRKSNLKPFERDISTEIYQAGSTPCNGVEGFNCYFPLQSYGFQPTNGVGYQPYRVVVLSFELLHAPATVCGPKKSTNLVKNKCVNFNFNGLTGTGVLTESNKKFLPFQQFGRDIADTTDAVRDPQTLEILDITPCSFGGVSVITPGTNTSNQVAVLYQGVNCTEVPVAIHADQLTPTWRVYSTGSNVFQTRAGCLIGAEHVNNSYECDIPIGAGICASYQTQTNSPRRARSVASQSIIAYTMSLGAENSVAYSNNSIAIPTNFTISVTTEILPVSMTKTSVDCTMYICGDSTECSNLLLQYGSFCTQLNRALTGIALEQDKNTQEVFAQVKQIYKTPPIKDFGGFNFSQILPDPSKPSKRSFIEDLLFNKVTLADAGFIKQYGDCLGDIAARDLICAQKFNGLTVLPPLLTDEMIAQYCSALLAGTITSGWTFGAGAALQIPFAMQMAYRFNGIGVTQNVLYENQKLIANQFNSAIGKIQDSLSSTASALGKLQDVVNQNAQALNTLVKQLSSNFGAISSVLNDILSRLDKVEAEVQIDRLITGRLQSLQTYVTQQLIRAAEIRASANLAATKMSECVLGQSKRVDFCGKGYHLMSFPQCAPHGVVFLHVTYVPAQEKNFTTAPAICHDGKAHFPREGVFVSNGTHWFVTQRNFYEPQIITTDNTFVSGNCDVVIGIVNNTVYDPLQPELDSFKEELDKYFKNHTSPDVDLGDISGINASVVNIQKEIDRLNEVAKNLNESLIDLQELGKYEQYIKGGSGYIPEAPRDGQAYVRKDGEWVLLSTFL

SEQ ID NO: 6606 - protein, 1241 aa, Artificial Sequence
  SARS-CoV-2/USA/WA-UW31/2020__EPI_ISL_414618 spike protein (1-1211)(T874C_S1055C) Foldon construct
MFVFLVLLPLVSSQCVNLTTRTQLPPAYTNSFTRGVYYPDKVFRSSVLHSTQDLFLPFFSNVTWFHAIHVSGTNGTKRFDNPVLPFNDGVYFASTEKSNIIRGWIFGTTLDSKTQSLLIVNNATNVVIKVCEFQFCNDPFLGVYYHKNNKSWMESEFRVYSSANNCTFEYVSQPFLMDLEGKQGNFKNLREFVFKNIDGYFKIYSKHTPINLVRDLPQGFSALEPLVDLPIGINITRFQTLLALHRSYLTPGDSSSGWTAGAAAYYVGYLQPRTFLLKYNENGTITDAVDCALDPLSETKCTLKSFTVEKGIYQTSNFRVQPTESIVRFPNITNLCPFGEVFNATRFASVYAWNRKRISNCVADYSVLYNSASFSTFKCYGVSPTKLNDLCFTNVYADSFVIRGDEVRQIAPGQTGKIADYNYKLPDDFTGCVIAWNSNNLDSKVGGNYNYLYRLFRKSNLKPFERDISTEIYQAGSTPCNGAEGFNCYFPLQSYGFQPTNGVGYQPYRVVVLSFELLHAPATVCGPKKSTNLVKNKCVNFNFNGLTGTGVLTESNKKFLPFQQFGRDIADTTDAVRDPQTLEILDITPCSFGGVSVITPGTNTSNQVAVLYQDVNCTEVPVAIHADQLTPTWRVYSTGSNVFQTRAGCLIGAEHVNNSYECDIPIGAGICASYQTQTNSPRRARSVASQSIIAYTMSLGAENSVAYSNNSIAIPTNFTISVTTEILPVSMTKTSVDCTMYICGDSTECSNLLLQYGSFCTQLNRALTGIAVEQDKNTQEVFAQVKQIYKTPPIKDFGGFNFSQILPDPSKPSKRSFIEDLLFNKVTLADAGFIKQYGDCLGDIAARDLICAQKFNGLTVLPPLLTDEMIAQYCSALLAGTITSGWTFGAGAALQIPFAMQMAYRFNGIGVTQNVLYENQKLIANQFNSAIGKIQDSLSSTASALGKLQDVVNQNAQALNTLVKQLSSNFGAISSVLNDILSRLDKVEAEVQIDRLITGRLQSLQTYVTQQLIRAAEIRASANLAATKMSECVLGQSKRVDFCGKGYHLMSFPQCAPHGVVFLHVTYVPAQEKNFTTAPAICHDGKAHFPREGVFVSNGTHWFVTQRNFYEPQIITTDNTFVSGNCDVVIGIVNNTVYDPLQPELDSFKEELDKYFKNHTSPDVDLGDISGINASVVNIQKEIDRLNEVAKNLNESLIDLQELGKYEQYIKGGSGYIPEAPRDGQAYVRKDGEWVLLSTFL

SEQ ID NO: 6607 - protein, 1241 aa, Artificial Sequence
  SARS-CoV-2/South Korea/SNU01/2020__EPI_ISL_411929 spike protein (1-1211)(T874C_S1055C) Foldon construct
MFVFLVLLPLVSSQCVNLTTRTQLPPAYTNSFTRGVYYPDKVFRSSVLHSTQDLFLPFFSNVTWFHAIHVSGTNGTKRFDNPVLPFNDGVYFASTEKSNIIRGWIFGTTLDSKTQSLLIVNNATNVVIKVCEFQFCNDPFLGVYYHKNNKSWMESEFRVYSSANNCTFEYVSQPFLMDLEGKQGNFKNLREFVFKNIDGYFKIYSKHTPINLVRDLPQGFWALEPLVDLPIGINITRFQTLLALHRSYLTPGDSSSGWTAGAAAYYVGYLQPRTFLLKYNENGTITDAVDCALDPLSETKCTLKSFTVEKGIYQTSNFRVQPTESIVRFPNITNLCPFGEVFNATRFASVYAWNRKRISNCVADYSVLYNSASFSTFKCYGVSPTKLNDLCFTNVYADSFVIRGDEVRQIAPGQTGKIADYNYKLPDDFTGCVIAWNSNNLDSKVGGNYNYLYRLFRKSNLKPFERDISTEIYQAGSTPCNGVEGFNCYFPLQSYGFQPTNGVGYQPYRVVVLSFELLHAPATVCGPKKSTNLVKNKCVNFNFNGLTGTGVLTESNKKFLPFQQFGRDIADTTDAVRDPQTLEILDITPCSFGGVSVITPGTNTSNQVAVLYQDVNCTEVPVAIHADQLTPTWRVYSTGSNVFQTRAGCLIGAEHVNNSYECDIPIGAGICASYQTQTNSPRRARSVASQSIIAYTMSLGAENSVAYSNNSIAIPTNFTISVTTEILPVSMTKTSVDCTMYICGDSTECSNLLLQYGSFCTQLNRALTGIAVEQDKNTQEVFAQVKQIYKTPPIKDFGGFNFSQILPDPSKPSKRSFIEDLLFNKVTLADAGFIKQYGDCLGDIAARDLICAQKFNGLTVLPPLLTDEMIAQYCSALLAGTITSGWTFGAGAALQIPFAMQMAYRFNGIGVTQNVLYENQKLIANQFNSAIGKIQDSLSSTASALGKLQDVVNQNAQALNTLVKQLSSNFGAISSVLNDILSRLDKVEAEVQIDRLITGRLQSLQTYVTQQLIRAAEIRASANLAATKMSECVLGQSKRVDFCGKGYHLMSFPQCAPHGVVFLHVTYVPAQEKNFTTAPAICHDGKAHFPREGVFVSNGTHWFVTQRNFYEPQIITTDNTFVSGNCDVVIGIVNNTVYDPLQPELDSFKEELDKYFKNHTSPDVDLGDISGINASVVNIQKEIDRLNEVAKNLNESLIDLQELGKYEQYIKGGSGYIPEAPRDGQAYVRKDGEWVLLSTFL

SEQ ID NO: 6608 - protein, 1241 aa, Artificial Sequence
  SARS-CoV-2/China/WF0004/2020__EPI_ISL_413694 spike protein (1-1211)(T874C_S1055C) Foldon construct
MFVFLVLLPLVSSQCVNLTTRTQLPPAYTNSFTRGVYYPDKVFRSSVLHSTQDLFLPFFSNVTWFHAIHVSGTNGTKRFDNPVLPFNDGVYFASTEKSNIIRGWIFGTTLDSKTQSLLIVNNATNVVIKVCEFQFCNDPFLGVYYHKNNKSWTESEFRVYSSANNCTFEYVSQPFLMDLEGKQGNFKNLREFVFKNIDGYFKIYSKHTPINLVRDLPQGFSALEPLVDLPIGINITRFQTLLALHRSYLTPGDSSSGWTAGAAAYYVGYLQPRTFLLKYNENGTITDAVDCALDPLSETKCTLKSFTVEKGIYQTSNFRVQPTESIVRFPNITNLCPFGEVFNATRFASVYAWNRKRISNCVADYSVLYNSASFSTFKCYGVSPTKLNDLCFTNVYADSFVIRGDEVRQIAPGQTGKIADYNYKLPDDFTGCVIAWNSNNLDSKVGGNYNYLYRLFRKSNLKPFERDISTEIYQAGSTPCNGVEGFNCYFPLQSYGFQPTNGVGYQPYRVVVLSFELLHAPATVCGPKKSTNLVKNKCVNFNFNGLTGTGVLTESNKKFLPFQQFGRDIADTTDAVRDPQTLEILDITPCSFGGVSVITPGTNTSNQVAVLYQDVNCTEVPVAIHADQLTPTWRVYSTGSNVFQTRAGCLIGAEHVNNSYECDIPIGAGICASYQTQTNSPRRARSVASQSIIAYTMSLGAENSVAYSNNSIAIPTNFTISVTTEILPVSMTKTSVDCTMYICGDSTECSNLLLQYGSFCTQLNRALTGIAVEQDKNTQEVFAQVKQIYKTPPIKDFGGFNFSQILPDPSKPSKRSFIEDLLFNKVTLADAGFIKQYGDCLGDIAARDLICAQKFNGLTVLPPLLTDEMIAQYCSALLAGTITSGWTFGAGAALQIPFAMQMAYRFNGIGVTQNVLYENQKLIANQFNSAIGKIQDSLSSTASALGKLQDVVNQNAQALNTLVKQLSSNFGAISSVLNDILSRLDKVEAEVQIDRLITGRLQSLQTYVTQQLIRAAEIRASANLAATKMSECVLGQSKRFDFCGKGYHLMSFPQCAPHGVVFLHVTYVPAQEKNFTTAPAICHDGKAHFPREGVFVSNGTHWFVTQRNFYEPQIITTDNTFVSGNCDVVIGIVNNTVYDPLQPELDSFKEELDKYFKNHTSPDVDLGDISGINASVVNIQKEIDRLNEVAKNLNESLIDLQELGKYEQYIKGGSGYIPEAPRDGQAYVRKDGEWVLLSTFL

SEQ ID NO: 6609 - protein, 1241 aa, Artificial Sequence
  SARS-CoV-2/China/WF0028/2020__EPI_ISL_413791 spike protein (1-1211)(T874C_S1055C) Foldon construct
MFVFLVLLPLVSSQCVNLTTRTQLPPAYTNSFTRGVYYPDKVFRSSVLHSTQDLFLPFFSNVTWFHAIHVSGTNGTKRFDNPVLPFNDGVYFASTEKSNIIRGWIFGTTLDSKTQSLLIVNNATNVVIKVCEFQFCNDPFLGVYYHKNNKSWMESEFRVYSSANNCTFEYVSQPFLMDLEGKQGNFKNLREFVFKNIDGYFKIYSKHTPINLVRDLPQGFSALEPLVDLPIGINITRFQTLLALHRSYLTPGDSSSGWTAGAAAYYVGYLQPRTFLLKYNENGTITDAVDCALDPLSETKCTLKSFTVEKGIYQTSNFRVQPTESIVRFPNITNLCPFGEVFNATRFASVYAWNRKRISNCVADYSVLYNSASFSTFKCYGVSPTKLNDLCFTNVYADSFVIRGDEVRQIAPGQTGKIADYNYKLPDDFTGCVIAWNSNNLDSKVGGNYNYLYRLFRKSNLKPFERDISTEIYQAGSTPCNGVEGFNCYFPLQSYGFQPTNGVGYQPYRVVVLSFELLHAPATVCGPKKSTNLVKNKCVNFNFNGLTGTGVLTESNKKFLPFQQFGRDIADTTDAVRDPQTLEILDITPCSFGGVSVITPGTNTSNQVAVLYQDVNCTEVPVAIHADQLTPTWRVYSTGSNVFQTRAGCLIGAEHVNNSYECDIPIGAGICASYQTQTNSPRRARSVASQSIIAYTMSLGAENSVAYSNNSIAIPTNFTISVTTEILPVSMTKTSVDCTMYICGDSTECSNLLLQYGSFCTQLNRALTGIAVEQDKNTQEVFAQVKQIYKTPPIKDFGGFNFSQILPDPSKPSKRSFIEDLLFNKVTLADAGFIKQYGDCLGDIAARDLICAQKFNGLTVLPPLLTDEMIAQYCSALLAGTITSGWTFGAGAALQIPFAMQMAYRFNGIGVTQNVLYENQKLIANQFNSAIGKIQDSLSSTASALGKLQDVVNQNAQALNTLVKQLSSNFGAISSVLNDILSRLDKVEAEVQIDRLITGRLQSLQTYVTQQLIRAAEIRASANLAATKMSECVLGQSKRVDFCGKGYHLMSFPQCAPHGVVFLHVTYVPAQEKNFTTAPAICHDGKAHFPREGVFVSNGTHWFVTQRNFYEPQIITTDNTFVSGNCDVVIGIVNNTVYDPLQPELESFKEELDKYFKNHTSPDVDLGDISGINASVVNIQKEIDRLNEVAKNLNESLIDLQELGKYEQYIKGGSGYIPEAPRDGQAYVRKDGEWVLLSTFL

SEQ ID NO: 6610 - protein, 1241 aa, Artificial Sequence
  SARS-CoV-2/2019-nCoV/USA-CruiseA-18/2020__MT159716.1 spike protein (1-1211)(T874C_S1055C) Foldon construct
MFVFLVLLPLVSSQCVNLTTRTQLPPAYTNSFTRGVYYPDKVFRSSVLHSTQDLFLPFFSNVTWFHAIHVSGTNGTKRFDNPVLPFNDGVYFASTEKSNIIRGWIFGTTLDSKTQSLLIVNNATNVVIKVCEFQFCNDPFLGVYYHKNNKSWMESELRVYSSANNCTFEYVSQPFLMDLEGKQGNFKNLREFVFKNIDGYFKIYSKHTPINLVRDLPQGFSALEPLVDLPIGINITRFQTLLALHRSYLTPGDSSSGWTAGAAAYYVGYLQPRTFLLKYNENGTITDAVDCALDPLSETKCTLKSFTVEKGIYQTSNFRVQPTESIVRFPNITNLCPFGEVFNATRFASVYAWNRKRISNCVADYSVLYNSASFSTFKCYGVSPTKLNDLCFTNVYADSFVIRGDEVRQIAPGQTGKIADYNYKLPDDFTGCVIAWNSNNLDSKVGGNYNYLYRLFRKSNLKPFERDISTEIYQAGSTPCNGVEGFNCYFPLQSYGFQPTNGVGYQPYRVVVLSFELLHAPATVCGPKKSTNLVKNKCVNFNFNGLTGTGVLTESNKKFLPFQQFGRDIADTTDAVRDPQTLEILDITPCSFGGVSVITPGTNTSNQVAVLYQDVNCTEVPVAIHADQLTPTWRVYSTGSNVFQTRAGCLIGAEHVNNSYECDIPIGAGICASYQTQTNSPRRARSVASQSIIAYTMSLGAENSVAYSNNSIAIPTNFTISVTTEILPVSMTKTSVDCTMYICGDSTECSNLLLQYGSFCTQLNRALTGIAVEQDKNTQEVFAQVKQIYKTPPIKDFGGFNFSQILPDPSKPSKRSFIEDLLFNKVTLADAGFIKQYGDCLGDIAARDLICAQKFNGLTVLPPLLTDEMIAQYCSALLAGTITSGWTFGAGAALQIPFAMQMAYRFNGIGVTQNVLYENQKLIANQFNSAIGKIQDSLSSTASALGKLQDVVNQNAQALNTLVKQLSSNFGAISSVLNDILSRLDKVEAEVQIDRLITGRLQSLQTYVTQQLIRAAEIRASANLAATKMSECVLGQSKRVDFCGKGYHLMSFPQCAPHGVVFLHVTYVPAQEKNFTTAPAICHDGKAHFPREGVFVSNGTHWFVTQRNFYEPQIITTDNTFVSGNCDVVIGIVNNTVYDPLQPELDSFKEELDKYFKNHTSPDVDLGDISGINASVVNIQKEIDRLNEVAKNLNESLIDLQELGKYEQYIKGGSGYIPEAPRDGQAYVRKDGEWVLLSTFL

SEQ ID NO: 6611 - protein, 1241 aa, Artificial Sequence
  SARS-CoV-2/SARS-CoV-2/Yunnan-01/human/2020/CHN__MT049951.1 spike protein (1-1211)(T874C_S1055C) Foldon construct
MFVFLVLLPLVSSQCVNLTTRTQLPPANTNSFTRGVYYPDKVFRSSVLHSTQDLFLPFFSNVTWFHAIHVSGTNGTKRFDNPVLPFNDGVYFASTEKSNIIRGWIFGTTLDSKTQSLLIVNNATNVVIKVCEFQFCNDPFLGVYYHKNNKSWMESEFRVYSSANNCTFEYVSQPFLMDLEGKQGNFKNLREFVFKNIDGYFKIYSKHTPINLVRDLPQGFSALEPLVDLPIGINITRFQTLLALHRSYLTPGDSSSGWTAGAAAYYVGYLQPRTFLLKYNENGTITDAVDCALDPLSETKCTLKSFTVEKGIYQTSNFRVQPTESIVRFPNITNLCPFGEVFNATRFASVYAWNRKRISNCVADYSVLYNSASFSTFKCYGVSPTKLNDLCFTNVYADSFVIRGDEVRQIAPGQTGKIADYNYKLPDDFTGCVIAWNSNNLDSKVGGNYNYLYRLFRKSNLKPFERDISTEIYQAGSTPCNGVEGFNCYFPLQSYGFQPTNGVGYQPYRVVVLSFELLHAPATVCGPKKSTNLVKNKCVNFNFNGLTGTGVLTESNKKFLPFQQFGRDIADTTDAVRDPQTLEILDITPCSFGGVSVITPGTNTSNQVAVLYQDVNCTEVPVAIHADQLTPTWRVYSTGSNVFQTRAGCLIGAEHVNNSYECDIPIGAGICASYQTQTNSPRRARSVASQSIIAYTMSLGAENSVAYSNNSIAIPTNFTISVTTEILPVSMTKTSVDCTMYICGDSTECSNLLLQYGSFCTQLNRALTGIAVEQDKNTQEVFAQVKQIYKTPPIKDFGGFNFSQILPDPSKPSKRSFIEDLLFNKVTLADAGFIKQYGDCLGDIAARDLICAQKFNGLTVLPPLLTDEMIAQYCSALLAGTITSGWTFGAGAALQIPFAMQMAYRFNGIGVTQNVLYENQKLIANQFNSAIGKIQDSLSSTASALGKLQDVVNQNAQALNTLVKQLSSNFGAISSVLNDILSRLDKVEAEVQIDRLITGRLQSLQTYVTQQLIRAAEIRASANLAATKMSECVLGQSKRVDFCGKGYHLMSFPQCAPHGVVFLHVTYVPAQEKNFTTAPAICHDGKAHFPREGVFVSNGTHWFVTQRNFYEPQIITTDNTFVSGNCDVVIGIVNNTVYDPLQPELDSFKEELDKYFKNHTSPDVDLGDISGINASVVNIQKEIDRLNEVAKNLNESLIDLQELGKYEQYIKGGSGYIPEAPRDGQAYVRKDGEWVLLSTFL

SEQ ID NO: 6612 - protein, 1241 aa, Artificial Sequence
  SARS-CoV-2/USA/WA-UW292/2020__EPI_ISL_418077 spike protein (1-1211)(T874C_S1055C) Foldon construct
MFVFLVLLPLVSSQCVNLTTRTQLPPAYTNSFTRGVYYPDKVFRSSVLHSTQDLFLPFFSNVTWFHAIHVSGTNGTKRFDNPVLPFNDGVYFASTEKSNIIRGWIFGTTLDSKTQSLLIVNNATNVVIKVCEFQFCNDPFLGVYYHKNNKSWMESEFRVYSSANNCTFEYVSQPFLMDLEGKQGNFKNLREFVFKNIDGYFKIYSKHTPINLVRDLPQGFSALEPLVDLPIGINITRFQTLLALHRSYLTPGDSSSGWTAGAAAYYVGYLQPRTFLLKYNENGTITDAVDCALDPLSETKCTLKSFTVEKGIYQTSNFRVQPTESIVRFPNITNLCPFGEVFNATRFASVYAWNRKRISNCVADYSVLYNSASFSTFKCYGVSPTKLNDLCFTNVYADSFVIRGDEVRQIAPGQTGKIADYNYKLPDDFTGCVIAWNSNNLDSKVGGNYNYLYRLFRKSNLKPFERDISTEIYQASSTPCNGVEGFNCYFPLQSYGFQPTNGVGYQPYRVVVLSFELLHAPATVCGPKKSTNLVKNKCVNFNFNGLTGTGVLTESNKKFLPFQQFGRDIADTTDAVRDPQTLEILDITPCSFGGVSVITPGTNTSNQVAVLYQDVNCTEVPVAIHADQLTPTWRVYSTGSNVFQTRAGCLIGAEHVNNSYECDIPIGAGICASYQTQTNSPRRARSVASQSIIAYTMSLGAENSVAYSNNSIAIPTNFTISVTTEILPVSMTKTSVDCTMYICGDSTECSNLLLQYGSFCTQLNRALTGIAVEQDKNTQEVFAQVKQIYKTPPIKDFGGFNFSQILPDPSKPSKRSFIEDLLFNKVTLADAGFIKQYGDCLGDIAARDLICAQKFNGLTVLPPLLTDEMIAQYCSALLAGTITSGWTFGAGAALQIPFAMQMAYRFNGIGVTQNVLYENQKLIANQFNSAIGKIQDSLSSTASALGKLQDVVNQNAQALNTLVKQLSSNFGAISSVLNDILSRLDKVEAEVQIDRLITGRLQSLQTYVTQQLIRAAEIRASANLAATKMSECVLGQSKRVDFCGKGYHLMSFPQCAPHGVVFLHVTYVPAQEKNFTTAPAICHDGKAHFPREGVFVSNGTHWFVTQRNFYEPQIITTDNTFVSGNCDVVIGIVNNTVYDPLQPELDSFKEELDKYFKNHTSPDVDLGDISGINASVVNIQKEIDRLNEVAKNLNESLIDLQELGKYEQYIKGGSGYIPEAPRDGQAYVRKDGEWVLLSTFL

SEQ ID NO: 6613 - protein, 1241 aa, Artificial Sequence
  SARS-CoV-2/Iceland/192/2020__EPI_ISL_417819 spike protein (1-1211)(T874C_S1055C) Foldon construct
MFVFFVLLPLVSSQCVNLTTRTQLPPAYTNSFTRGVYYPDKVFRSSVLHSTQDLFLPFFSNVTWFHAIHVSGTNGTKRFDNPVLPFNDGVYFASTEKSNIIRGWIFGTTLDSKTQSLLIVNNATNVVIKVCEFQFCNDPFLGVYYHKNNKSWMESEFRVYSSANNCTFEYVSQPFLMDLEGKQGNFKNLREFVFKNIDGYFKIYSKHTPINLVRDLPQGFSALEPLVDLPIGINITRFQTLLALHRSYLTPGDSSSGWTAGAAAYYVGYLQPRTFLLKYNENGTITDAVDCALDPLSETKCTLKSFTVEKGIYQTSNFRVQPTESIVRFPNITNLCPFGEVFNATRFASVYAWNRKRISNCVADYSVLYNSASFSTFKCYGVSPTKLNDLCFTNVYADSFVIRGDEVRQIAPGQTGKIADYNYKLPDDFTGCVIAWNSNNLDSKVGGNYNYLYRLFRKSNLKPFERDISTEIYQAGSTPCNGVEGFNCYFPLQSYGFQPTNGVGYQPYRVVVLSFELLHAPATVCGPKKSTNLVKNKCVNFNFNGLTGTGVLTESNKKFLPFQQFGRDIADTTDAVRDPQTLEILDITPCSFGGVSVITPGTNTSNQVAVLYQGVNCTEVPVAIHADQLTPTWRVYSTGSNVFQTRAGCLIGAEHVNNSYECDIPIGAGICASYQTQTNSPRRARSVASQSIIAYTMSLGAENSVAYSNNSIAIPTNFTISVTTEILPVSMTKTSVDCTMYICGDSTECSNLLLQYGSFCTQLNRALTGIAVEQDKNTQEVFAQVKQIYKTPPIKDFGGFNFSQILPDPSKPSKRSFIEDLLFNKVTLADAGFIKQYGDCLGDIAARDLICAQKFNGLTVLPPLLTDEMIAQYCSALLAGTITSGWTFGAGAALQIPFAMQMAYRFNGIGVTQNVLYENQKLIANQFNSAIGKIQDSLSSTASALGKLQDVVNQNAQALNTLVKQLSSNFGAISSVLNDILSRLDKVEAEVQIDRLITGRLQSLQTYVTQQLIRAAEIRASANLAATKMSECVLGQSKRVDFCGKGYHLMSFPQCAPHGVVFLHVTYVPAQEKNFTTAPAICHDGKAHFPREGVFVSNGTHWFVTQRNFYEPQIITTDNTFVSGNCDVVIGIVNNTVYDPLQPELDSFKEELDKYFKNHTSPDVDLGDISGINASVVNIQKEIDRLNEVAKNLNESLIDLQELGKYEQYIKGGSGYIPEAPRDGQAYVRKDGEWVLLSTFL

SEQ ID NO: 6614 - protein, 1241 aa, Artificial Sequence
  SARS-CoV-2/Belgium/ULG-6939/2020__EPI_ISL_417020 spike protein (1-1211)(T874C_S1055C) Foldon construct
MFVFLVLLPLVSSQCVNLTTRTQLPPAYTNSFTRGVYYPDKVFRSSVLHSTQDLFLPFFSNVTWFHAIHVSGTNGTKRFDNPVLPFNDGVYFASTEKSNIIRGWIFGTTLDSKTQSLLIVNNATNVVIKVCEFQFCNDPFLGVYYHKNNKSWMESEFRVYSSANNCTFEYVSQPFLMDLEGKQGNFKNLREFVFKNIDGYFKIYSKHTPINLVRDLPQGFSALEPLVDLPIGINITRFQTLLALHRSYLTPGDSSSGWTAGAAAYYVGYLQPRTFLLKYNENGTITDAVDCALDPLSETKCTLKSFTVEKGIYQTSNFRVQPTESIVRFPNITNLCPFGEVFNATRFASVYAWNRKRISNCVADYSVLYNSASFSTFKCYGVSPTKLNDLCFTNVYADSFVIRGDEVRQIAPGQTGKIADYNYKLPDDFTGCVIAWNSNNLDSKVGGNYNYLYRLFRKSNLKPFERDISTEIYQAGSTPCNGVEGFNCYFPLQSYGFQPTNGVGYQPYRVVVLSFELLHAPATVCGPKKSTNLVKNKCVNFNFNGLTGTGVLTESNKKFLPFQQFGRDIADTTDAVRDPQTLEILDITPCSFGGVSVITPGTNTSNQVAVLYQGVNCTEVPVAIHADQLTPTWRVYSTGSNVFQTRAGCLIGAEHVNNSYECDIPIGAGICASYQTQTNSPRRARSVASQSIIAYTMSLGAENSVVYSNNSIAIPTNFTISVTTEILPVSMTKTSVDCTMYICGDSTECSNLLLQYGSFCTQLNRALTGIAVEQDKNTQEVFAQVKQIYKTPPIKDFGGFNFSQILPDPSKPSKRSFIEDLLFNKVTLADAGFIKQYGDCLGDIAARDLICAQKFNGLTVLPPLLTDEMIAQYCSALLAGTITSGWTFGAGAALQIPFAMQMAYRFNGIGVTQNVLYENQKLIANQFNSAIGKIQDSLSSTASALGKLQDVVNQNAQALNTLVKQLSSNFGAISSVLNDILSRLDKVEAEVQIDRLITGRLQSLQTYVTQQLIRAAEIRASANLAATKMSECVLGQSKRVDFCGKGYHLMSFPQCAPHGVVFLHVTYVPAQEKNFTTAPAICHDGKAHFPREGVFVSNGTHWFVTQRNFYEPQIITTDNTFVSGNCDVVIGIVNNTVYDPLQPELDSFKEELDKYFKNHTSPDVDLGDISGINASVVNIQKEIDRLNEVAKNLNESLIDLQELGKYEQYIKGGSGYIPEAPRDGQAYVRKDGEWVLLSTFL

SEQ ID NO: 6615 - protein, 1241 aa, Artificial Sequence
  SARS-CoV-2/France/HF2496/2020__EPI_ISL_418231 spike protein (1-1211)(T874C_S1055C) Foldon construct
MFVFLVLLPLVSSQCVNLTTRTQLPPAYTNSFTRGVYYPDKVFRSSVLHSTQDLFLPFFSNVTWFHAIHVSGTNGTKRFDNPVLPFNDGVYFASTEKSNIIRGWIFGTTLDSKTQSLLIVNNATNVVIKVCEFQFCNDPFLGVYYHKNNKSWMESEFRVYSSANNCTFEYVSQPFLMDLEGKQGNFKNLREFVFKNIDGYFKIYSKHTPINLVRDLPQGFSALEPLVDLPIGINITRFQTLLALHRSYLTPGDSSSGWTAGAAAYYVGYLQPRTFLLKYNENGTITDAVDCALDPLSETKCTLKSFTVEKGIYQTSNFRVQPTESIVRFPNITNLCPFGEVFNATRFASVYAWNRKRISNCVADYSVLYNSASFSTFKCYGVSPTKLNDLCFTNVYADSFVIRGDEVRQIAPGQTGKIADYNYKLPDDFTGCVIAWNSNNLDSKVGGNYNYLYRLFRKSNLKPFERDISTEIYQAGSTPCNGVEGFNCYFPLQSYGFQPTNGVGYQPYRVVVLSFELLHAPATVCGPKKSTNLVKNKCVNFNFNGLTGTGVLTESNKKFLPFQQFGRDIADTTDAVRDPQTLEILDITPCSFGGVSVITPGTNTSNQVAVLYQGVNCTEVPVAIHADQLTPTWRVYSTGSNVFQTRAGCLIGAEHVNNSYECDIPIGAGICASYQTQTNSPRRARSVASQSIIAYTMSLGAENSVAYSNNSIAIPTNFTISVTTEILPVSMTKTSVDCTMYICGDSTECSNLLLQYGSFCTQLNRALTGIAVEQDKNTQEVFAQVKQIYKTPPIKDFGGFNFSQILPDPSKPSKRSFIEDLLFNKVTLADAGFIKQYGDCLGDIVARDLICAQKFNGLTVLPPLLTDEMIAQYCSALLAGTITSGWTFGAGAALQIPFAMQMAYRFNGIGVTQNVLYENQKLIANQFNSAIGKIQDSLSSTASALGKLQDVVNQNAQALNTLVKQLSSNFGAISSVLNDILSRLDKVEAEVQIDRLITGRLQSLQTYVTQQLIRAAEIRASANLAATKMSECVLGQSKRVDFCGKGYHLMSFPQCAPHGVVFLHVTYVPAQEKNFTTAPAICHDGKAHFPREGVFVSNGTHWFVTQRNFYEPQIITTDNTFVSGNCDVVIGIVNNTVYDPLQPELDSFKEELDKYFKNHTSPDVDLGDISGINASVVNIQKEIDRLNEVAKNLNESLIDLQELGKYEQYIKGGSGYIPEAPRDGQAYVRKDGEWVLLSTFL

SEQ ID NO: 6616 - protein, 1241 aa, Artificial Sequence
  SARS-CoV-2/USA/WA-UW291/2020__EPI_ISL_418076 spike protein (1-1211)(T874C_S1055C) Foldon construct
MFVFLVLLPLVSSQCVNLTTRTQLPPAYTNSFTRGVYYPDKVFRSSVLHSTQDLFLPFFSNVTWFHAIHVSGTNGTKRFDNPVLPFNDGVYFASTEKSNIIRGWIFGTTLDSKTQSLLIVNNATNVVIKVCEFQFCNDPFLGVYYHKNNKSWMESEFRVYSSANNCTFEYVSQPFLMDLEGKQGNFKNLREFVFKNIDGYFKIYSKHTPINLVRDLPQGFSALEPLVDLPIGINITRFQTLLALHRSYLTPGDSSSGWTAGAAAYYVGYLQPRTFLLKYNENGTITDAVDCALDPLSETKCTLKSFTVEKGIYQTSNFRVQPTESIVRFPNITNLCPFGEVFNATRFASVYAWNRKRISNCVADYSVLYNSASFSTFKCYGVSPTKLNDLCFTNVYADSFVIRGDEVRQIAPGQTGKIADYNYKLPDDFTGCVIAWNSNNLDSKVGGNYNYLYRLFRKSNLKPFERDISTEIYQAGSTPCNGVEGFNCYFPLQSYGFQPTNGVGYQPYRVVVLSFELLHAPATVCGPKKSTNLVKNKCVNFNFNGLTGTGVLTESNKKFLPFQQFGRDIADTTDAVRDPQTLEILDITPCSFGGVSVITPGTNTSNQVAVLYQGVNCTEVPVAIHADQLTPTWRVYSTGSNVFQTRAGCLIGAEHVNNSYECDIPIGAGICASYQTQTNSPRRARSVASQSIIAYTMSLGAENSVAYSNNSIAIPTNFTISVTTEILPVSMTKTSVDCTMYICGDSTECSNLLLQYGSFCTQLNRALTGIAVEQDKNTQEVFAQVKQIYKTPPIKDFGGFNFSQILPDPSKPSKRSFIEDLLFNKVTLADAGFIKQYGDCLGDIAARDLICAQKFNGLTVLPPLLTDEMIAQYCSALLAGTITSGWTFGAGAALQIPFAMQMAYRFNGIGVTQNVLYENQKLIANQFNSAIGKIQYSLSSTASALGKLQDVVNQNAQALNTLVKQLSSNFGAISSVLNDILSRLDKVEAEVQIDRLITGRLQSLQTYVTQQLIRAAEIRASANLAATKMSECVLGQSKRVDFCGKGYHLMSFPQCAPHGVVFLHVTYVPAQEKNFTTAPAICHDGKAHFPREGVFVSNGTHWFVTQRNFYEPQIITTDNTFVSGNCDVVIGIVNNTVYDPLQPELDSFKEELDKYFKNHTSPDVDLGDISGINASVVNIQKEIDRLNEVAKNLNESLIDLQELGKYEQYIKGGSGYIPEAPRDGQAYVRKDGEWVLLSTFL

SEQ ID NO: 6617 - protein, 1241 aa, Artificial Sequence; identical to SEQ ID NO: 6580
  SARS-CoV-2/Portugal/PT0034/2020__EPI_ISL_418019 spike protein (1-1211)(T874C_S1055C) Foldon construct

SEQ ID NO: 6618 - protein, 1241 aa, Artificial Sequence
  SARS-CoV-2/Iceland/202/2020__EPI_ISL_417750 spike protein (1-1211)(T874C_S1055C) Foldon construct
MFVFLVLLPLVSSQCVNLTTRTQLPPAYTNSFTRGVYYPDKVFRSSVLHSTQDLFLPFFSNVTWFHAIHVSGTNGTKRFDNPVLPFNDGVYFASTEKSNIIRGWIFGTTLDSKTQSLLIVNNATNVVIKVCEFQFCNDPFLGVYYHKNNKSWMESEFRVYSSANNCTFEYVSQPFLMDLEGKQGNFKNLREFVFKNIDGYFKIYSKHTPINLVRDLPQGFSALEPLVDLPIGINITRFQTLLALHRSYLTPGDSSSGWTAGAAAYYVGYLQPRTFLLKYNENGTITDAVDCALDPLSETKCTLKSFTVEKGIYQTSNFRVQPTESIVRFPNITNLCPFGEVFNATRFASVYAWNRKRISNCVADYSVLYNSASFSTFKCYGVSPTKLNDLCFTNVYADSFVIRGDEVRQIAPGQTGKIADYNYKLPDDFTGCVIAWNSNNLDSKVGGNYNYLYRLFRKSNLKPFERDISTEIYQAGSTPCNGVEGFNCYFPLQSYGFQPTNGVGYQPYRVVVLSFELLHAPATVCGPKKSTNLVKNKCVNFNFNGLTGTGVLTESNKKFLPFQQFGRDIADTTDAVRDPQTLEILDITPCSFGGVSVITPGTNTSNQVAVLYQDVNCTEVPVAIHADQLTPTWRVYSTGSNVFQTRAGCLIGAEHVNNSYECDIPIGAGICASYQTQTNSPRRARSVASQSIIAYTMSLGAENSVAYSNNSIAIPTNFTISVTTEILPVSMTKTSVDCTMYICGDSTECSNLLLQYGSFCTQLNRALTGIAVEQDKNTQEVFAQVKQIYKTPPIKDFGGFNFSQILPDPSKPSKRSFIEDLLFNKVTLADAGFIKQYGDCLGDIAARDLICAQKFNGLTVLPPLLTDEMIAQYCSALLAGTITSGWTFGAGAALQIPFAMQMAYRFNGIGVTQNVLYENQKLIANQFNSAIGKIQDSLSSTASALGKLQDVVNQNAQALNTLVKQLSSNFGAISSVLNDILSRLDKVEAEVQIDRLITGRLQSLQTYVTQQLIRAAEIRASANLAATKMSECVLGQSKRVDFCGKGYHLMSFPQCAPHGVVFLHVTYVPAQEKNFTTAPAICHDGKAHFPREGVFVSNGTHWFVTQRNFYEPQIITTDNTFVSGNCDVVIGIVNNTVYDPLQPELDSFKEELDKYFKNHTSPDVDLGDIPGINASVVNIQKEIDRLNEVAKNLNESLIDLQELGKYEQYIKGGSGYIPEAPRDGQAYVRKDGEWVLLSTFL

SEQ ID NO: 6619 - protein, 1241 aa, Artificial Sequence
  SARS-CoV-2/USA/WA-UW261/2020__EPI_ISL_418046 spike protein (1-1211)(T874C_S1055C) Foldon construct
MFVFLVLLPLVSSQCVNLTTRTQLPPAYTNSFTRGVYYPDKVFRSSVLHSTQDLFLPFFSNVTWFHAIHVSGTNGTKRFDNPVLPFNDGVYFASTEKSNIIRGWIFGTTLDSKTQSLLIVNNATNVVIKVCEFQFCNDPFLGVYYHKNNKSWMESEFRVYSSANNCTFEYVSQPFLMDLEGKQGNFKNLREFVFKNIDGYFKIYSKHTPINLVRDLPQGFSALEPLVDLPIGINITRFQTLLALHRSYLTPGDSSSGWTAGAAAYYVGYLQPRTFLLKYNENGTITDAVDCALDPLSETKCTLKSFTVEKGIYQTSNFRVQPTESIVRFPNITNLCPFGEVFNATRFTSVYAWNRKRISNCVADYSVLYNSASFSTFKCYGVSPTKLNDLCFTNVYADSFVIRGDEVRQIAPGQTGKIADYNYKLPDDFTGCVIAWNSNNLDSKVGGNYNYLYRLFRKSNLKPFERDISTEIYQAGSTPCNGVEGFNCYFPLQSYGFQPTNGVGYQPYRVVVLSFELLHAPATVCGPKKSTNLVKNKCVNFNFNGLTGTGVLTESNKKFLPFQQFGRDIADTTDAVRDPQTLEILDITPCSFGGVSVITPGTNTSNQVAVLYQDVNCTEVPVAIHADQLTPTWRVYSTGSNVFQTRAGCLIGAEHVNNSYECDIPIGAGICASYQTQTNSPRRARSVASQSIIAYTMSLGAENSVAYSNNSIAIPTNFTISVTTEILPVSMTKTSVDCTMYICGDSTECSNLLLQYGSFCTQLNRALTGIAVEQDKNTQEVFAQVKQIYKTPPIKDFGGFNFSQILPDPSKPSKRSFIEDLLFNKVTLADAGFIKQYGDCLGDIAARDLICAQKFNGLTVLPPLLTDEMIAQYCSALLAGTITSGWTFGAGAALQIPFAMQMAYRFNGIGVTQNVLYENQKLIANQFNSAIGKIQDSLSSTASALGKLQDVVNQNAQALNTLVKQLSSNFGAISSVLNDILSRLDKVEAEVQIDRLITGRLQSLQTYVTQQLIRAAEIRASANLAATKMSECVLGQSKRVDFCGKGYHLMSFPQCAPHGVVFLHVTYVPAQEKNFTTAPAICHDGKAHFPREGVFVSNGTHWFVTQRNFYEPQIITTDNTFVSGNCDVVIGIVNNTVYDPLQPELDSFKEELDKYFKNHTSPDVDLGDISGINASVVNIQKEIDRLNEVAKNLNESLIDLQELGKYEQYIKGGSGYIPEAPRDGQAYVRKDGEWVLLSTFL

SEQ ID NO: 6620 - protein, 1241 aa, Artificial Sequence
  SARS-CoV-2/Portugal/PT0035/2020__EPI_ISL_418020 spike protein (1-1211)(T874C_S1055C) Foldon construct
MFVFLVLLPLVSSQCVNLTTRTQLPPAYTNSFTRGVYYPDKVFRSSVLHSTQDLFLPFFSNVTWFHAIHVSGTNGTKRFDNPVLPFNDGVYFASTEKSNIIRGWIFGTTLDSKTQSLLIVNNATNVVIKVCEFQFCNDPFLGVYYHKNNKSWMESEFRVYSSANNCTFEYVSQPFLMDLEGKQGNFKNLREFVFKNIDGYFKIYSKHTPINLVRDLPQGFSALEPLVDLPIGINITRFQTLLALHRSYLTPGDSSSGWTAGAAAYYVGYLQPRTFLLKYNENGTITDAVDCALDPLSETKCTLKSFTVEKGIYQTSNFRVQPTESIVRFPNITNLCPFGEVFNATRFASVYAWNRKRISNCVADYSVLYNSASFSTFKCYGVSPTKLNDLCFTNVYADSFVIRGDEVRQIAPGQTGKIADYNYKLPDDFTGCVIAWNSNNLDSKVGGNYNYLYRLFRKSNLKPFERDISTEIYQAGSTPCNGVEGFNCYFPLQSYGFQPTNGVGYQPYRVVVLSFELLHAPATVCGPKKSTNLVKNKCVNFNFNGLTGTGVLTESNKKFLPFQQFGRDIADTTDAVRDPQTLEILDITPCSFGGVSVITPGTNTSNQVAVLYQDVNCTEVPVAIHADQLTPTWRVYSTGSNVFQTRAGCLIGAEHVNNSYECDIPIGAGICASYQTQTNSPRRARSVASQSIIAYTMSLGAENSVAYSNNSIAIPTNFTISVTTEILPVSMTKTSVDCTMYICGDSTECSNLLLQYGSFCTQLNRALTGIAVEQDKNTQEVFAQVKQIYKTPPIKDFGGFNFSQILPDPSKPSKRSFIEDLLFNKVTLADAGFIKQYGDCLGDISARDLICAQKFNGLTVLPPLLTDEMIAQYCSALLAGTITSGWTFGAGAALQIPFAMQMAYRFNGIGVTQNVLYENQKLIANQFNSAIGKIQDSLSSTASALGKLQDVVNQNAQALNTLVKQLSSNFGAISSVLNDILSRLDKVEAEVQIDRLITGRLQSLQTYVTQQLIRAAEIRASANLAATKMSECVLGQSKRVDFCGKGYHLMSFPQCAPHGVVFLHVTYVPAQEKNFTTAPAICHDGKAHFPREGVFVSNGTHWFVTQRNFYEPQIITTDNTFVSGNCDVVIGIVNNTVYDPLQPELDSFKEELDKYFKNHTSPDVDLGDISGINASVVNIQKEIDRLNEVAKNLNESLIDLQELGKYEQYIKGGSGYIPEAPRDGQAYVRKDGEWVLLSTFL

SEQ ID NO: 6621 - protein, 1241 aa, Artificial Sequence
  SARS-CoV-2/USA/NY-NYUMC7/2020__EPI_ISL_418192 spike protein (1-1211)(T874C_S1055C) Foldon construct
MFVFLVLLPLVSSQCVNLTTRTQLPPAYTNSFTRGVYYPDKVFRSSVLHSTQDLFLPFFSNVTWFHAIHVSGTNGTKRFDNPVLPFNDGVYFASTEKSNIIRGWIFGTTLDSKTQSLLIVNNATNVVIKVCEFQFCNDPFLGVYHHKNNKSWMESEFRVYSSANNCTFEYVSQPFLMDLEGKQGNFKNLREFVFKNIDGYFKIYSKHTPINLVRDLPQGFSALEPLVDLPIGINITRFQTLLALHRSYLTPGDSSSGWTAGAAAYYVGYLQPRTFLLKYNENGTITDAVDCALDPLSETKCTLKSFTVEKGIYQTSNFRVQPTESIVRFPNITNLCPFGEVFNATRFASVYAWNRKRISNCVADYSVLYNSASFSTFKCYGVSPTKLNDLCFTNVYADSFVIRGDEVRQIAPGQTGKIADYNYKLPDDFTGCVIAWNSNNLDSKVGGNYNYLYRLFRKSNLKPFERDISTEIYQAGSTPCNGVEGFNCYFPLQSYGFQPTNGVGYQPYRVVVLSFELLHAPATVCGPKKSTNLVKNKCVNFNFNGLTGTGVLTESNKKFLPFQQFGRDIADTTDAVRDPQTLEILDITPCSFGGVSVITPGTNTSNQVAVLYQGVNCTEVPVAIHADQLTPTWRVYSTGSNVFQTRAGCLIGAEHVNNSYECDIPIGAGICASYQTQTNSPRRARSVASQSIIAYTMSLGAENSVAYSNNSIAIPTNFTISVTTEILPVSMTKTSVDCTMYICGDSTECSNLLLQYGSFCTQLNRALTGIAVEQDKNTQEVFAQVKQIYKTPPIKDFGGFNFSQILPDPSKPSKRSFIEDLLFNKVTLADAGFIKQYGDCLGDIAARDLICAQKFNGLTVLPPLLTDEMIAQYCSALLAGTITSGWTFGAGAALQIPFAMQMAYRFNGIGVTQNVLYENQKLIANQFNSAIGKIQDSLSSTASALGKLQDVVNQNAQALNTLVKQLSSNFGAISSVLNDILSRLDKVEAEVQIDRLITGRLQSLQTYVTQQLIRAAEIRASANLAATKMSECVLGQSKRVDFCGKGYHLMSFPQCAPHGVVFLHVTYVPAQEKNFTTAPAICHDGKAHFPREGVFVSNGTHWFVTQRNFYEPQIITTDNTFVSGNCDVVIGIVNNTVYDPLQPELDSFKEELDKYFKNHTSPDVDLGDISGINASVVNIQKEIDRLNEVAKNLNESLIDLQELGKYEQYIKGGSGYIPEAPRDGQAYVRKDGEWVLLSTFL

SEQ ID NO: 6622 - protein, 1241 aa, Artificial Sequence
  SARS-CoV-2/Iceland/189/2020__EPI_ISL_417709 spike protein (1-1211)(T874C_S1055C) Foldon construct
MFVFLVLLPLVSSQCVNLTTRTQLPPAYTNSFTRGVYYPDKVFRSSVLHSTQDLFLPFFSNVTWFHAIHVSGTNGTKRFDNPVLPFNDGVYFASTEKSNIIRGWIFGTTLDSKTQSLLIVNNATNVVIKVCEFQFCNDPFLGVYYHKNNKSWMESEFRVYSSANNCTFEYVSQPFLMDLEGKQGNFKNLREFVFKNIDGYFKIYSKHTPINLVRDLPQGFSALEPLVDLPIGINITRFQTLLALHRSYLTPGDSSSGWTAGAAAYYVGYLQPRTFLLKYNENGTITDAVDCALDPLSETKCTLKSFTVEKGIYQTSNFRVQPTESIVRFPNITNLCPFGEVFNATRFASVYAWNRKRISNCVADYSVLYNSASFSTFKCYGVSPTKLNDLCFTNVYADSFVIRGDEVRQIAPGQTGKIADYNYKLPDDFTGCVIAWNSNNLDSKVGGNYNYLYRLFRKSNLKPFERDISTEIYQAGSTPCNGVEGFNCYFPLQSYGFQPTNGVGYQPYRVVVLSFELLHAPATVCGPKKSTNLVKNKCVNFNFNGLTGTGVLTESNKKFLPFQQFGRDIADTTDAVRDPQTLEILDITPCSFGGVSVITPGTNTSNQVAVLYQGVNCTEVPVAIHADQLTPTWRVYSTGSNVFQTRAGCLIGAEHVNNSYECDIPIGAGICASYQTQTNSPRRARSVASQSIIAYTMSLGAENSVAYSNNSIAIPTNFTISVTTEILPVSMTKTSVDCTMYICGDSTECSNLLLQYGSFCTQLNRALTGIAVEQDKNTQEVFAQVKQIYKTPPIKDFGGFNFSQILPDPSKPSKRSFIEDLLFNKVTLADAGFTKQYGDCLGDIAARDLICAQKFNGLTVLPPLLTDEMIAQYCSALLAGTITSGWTFGAGAALQIPFAMQMAYRFNGIGVTQNVLYENQKLIANQFNSAIGKIQDSLSSTASALGKLQDVVNQNAQALNTLVKQLSSNFGAISSVLNDILSRLDKVEAEVQIDRLITGRLQSLQTYVTQQLIRAAEIRASANLAATKMSECVLGQSKRVDFCGKGYHLMSFPQCAPHGVVFLHVTYVPAQEKNFTTAPAICHDGKAHFPREGVFVSNGTHWFVTQRNFYEPQIITTDNTFVSGNCDVVIGIVNNTVYDPLQPELDSFKEELDKYFKNHTSPDVDLGDISGINASVVNIQKEIDRLNEVAKNLNESLIDLQELGKYEQYIKGGSGYIPEAPRDGQAYVRKDGEWVLLSTFL

SEQ ID NO: 6623 - protein, 1241 aa, Artificial Sequence
  SARS-CoV-2/Australia/NSW56/2020__EPI_ISL_417408 spike protein (1-1211)(T874C_S1055C) Foldon construct
MFVFLVLLPLVSSQCVNLTTRTQLPPAYTNSFTRGVYYPDKVFRSSVLHSTQDLFLPFFSNVTWFHAIHVSGTNGTKRFDNPVLPFNDGVYFASTEKSNIIRGWIFGTTLDSKTQSLLIVNNATNVVIKVCEFQFCNDPFLGVYYHKNNKSWMESEFRVYSSANNCTFEYVSQPFLMDLEGKQGNFKNLREFVFKNIDGYFKIYSKHTPINLVRDLPQGFSALEPLVDLPIGINITRFQTLLALHRSYLTPGDSSSGWTAGAAAYYVGYLQPRTFLLKYNENGTITDAVDCALDPLSETKCTLKSFTVEKGIYQTSNFRVQPTESIVRFPNITNLCPFGEVFNATRFASVYAWNRKRISNCVADYSVLYNSASFSTFKCYGVSPTKLNDLCFTNVYADSFVIRGDEVRQIAPGQTGKIADYNYKLPDDFTGCVIAWNSNNLDSKVGGNYNYLYRLFRKSNLKPFERDISTEIYQAGSTPCNGVEGFNCYFPLQSYGFQPTNGVGYQPYRVVVLSFELLHAPATVCGPKKSTNLVKNKCVNFNFNGLTGTGVLTESNKKFLPFQQFGRDIADTTDAVRDPQTLEILDITPCSFGGVSVITPGTNTSNQVAVLYQDVNCTEVPVAIHADQLTPTWRVYSTGSNVFQTRAGCLIGAEHVNNSYECDIPIGAGICASYQTQTNSPRRARSVASQSIIAYTMSLGAENSVAYSNNSIAIPTNFTISVTTEILPVSMTKTSVDCTMYICGDSTECSNLLLQYGSFCTQLNRALTGIAVEQDKNTQEVFAQVKQIYKTPPIKDFGGFNFSQILPDSSKPSKRSFIEDLLFNKVTLADAGFIKQYGDCLGDIAARDLICAQKFNGLTVLPPLLTDEMIAQYCSALLAGTITSGWTFGAGAALQIPFAMQMAYRFNGIGVTQNVLYENQKLIANQFNSAIGKIQDSLSSTASALGKLQDVVNQNAQALNTLVKQLSSNFGAISSVLNDILSRLDKVEAEVQIDRLITGRLQSLQTYVTQQLIRAAEIRASANLAATKMSECVLGQSKRVDFCGKGYHLMSFPQCAPHGVVFLHVTYVPAQEKNFTTAPAICHDGKAHFPREGVFVSNGTHWFVTQRNFYEPQIITTDNTFVSGNCDVVIGIVNNTVYDPLQPELDSFKEELDKYFKNHTSPDVDLGDISGINASVVNIQKEIDRLNEVAKNLNESLIDLQELGKYEQYIKGGSGYIPEAPRDGQAYVRKDGEWVLLSTFL

SEQ ID NO: 6624 - protein, 1241 aa, Artificial Sequence
  SARS-CoV-2/Iceland/280/2020__EPI_ISL_417608 spike protein (1-1211)(T874C_S1055C) Foldon construct
MFVFLVLLPLVSSQCVNLTTRTQLPPAYTNSFTRGVYYPDKVFRSSVLHSTQDLFLPFFSNVTWFHAIHVSGTNGTKRFDNPVLPFNDGVYFASTEKSNIIRGWIFGTTLDSKTQSLLIVNNATNVVIKVCEFQFCNDPFLGVYYHKNNKSWMESEFRVYSSANNCTFEYVSQPFLMDLEGKQGNFKNLREFVFKNIDGYFKIYSKHTPINLVRDLPQGFSALEPLVDLPIGINITRFQTLLALHRSYLTPGDSSSGWTAGAAAYYVGYLQPRTFLLKYNENGTITDAVDCALDPLSETKCTLKSFTVEKGIYQTSNFRVQPTESIVRFPNITNLCPFGEVFNATRFASVYAWNRKRISNCVADYSVLYNSASFSTFKCYGVSPTKLNDLCFTNVYADSFVIRGDEVRQIAPGQTGKIADYNYKLPDDFTGCVIAWNSNNLDSKVGGNYNYLYRLFRKSNLKPFERDISTEIYQAGSTPCNGVEGFNCYFPLQSYGFQPTNGVGYQPYRVVVLSFELLHAPATVCGPKKSTNLVKNKCVNFNFNGLTGTGVLTESNKKFLPFQQFGRDIADTTDAVRDPQTLEILDITPCSFGGVSVITPGTNTSNQVAVLYQGVNCTEVPVAIHADQLTPTWRVYSTGSNVFQTRAGCLIGAEHVNNSYECDIPIGAGICASYHTQTNSPRRARSVASQSIIAYTMSLGAENSVAYSNNSIAIPTNFTISVTTEILPVSMTKTSVDCTMYICGDSTECSNLLLQYGSFCTQLNRALTGIAVEQDKNTQEVFAQVKQIYKTPPIKDFGGFNFSQILPDPSKPSKRSFIEDLLFNKVTLADAGFIKQYGDCLGDIAARDLICAQKFNGLTVLPPLLTDEMIAQYCSALLAGTITSGWTFGAGAALQIPFAMQMAYRFNGIGVTQNVLYENQKLIANQFNSAIGKIQDSLSSTASALGKLQDVVNQNAQALNTLVKQLSSNFGAISSVLNDILSRLDKVEAEVQIDRLITGRLQSLQTYVTQQLIRAAEIRASANLAATKMSECVLGQSKRVDFCGKGYHLMSFPQCAPHGVVFLHVTYVPAQEKNFTTAPAICHDGKAHFPREGVFVSNGTHWFVTQRNFYEPQIITTDNTFVSGNCDVVIGIVNNTVYDPLQPELDSFKEELDKYFKNHTSPDVDLGDISGINASVVNIQKEIDRLNEVAKNLNESLIDLQELGKYEQYIKGGSGYIPEAPRDGQAYVRKDGEWVLLSTFL

SEQ ID NO: 6625 - protein, 1241 aa, Artificial Sequence; identical to SEQ ID NO: 6580
  SARS-CoV-2/Iceland/247/2020__EPI_ISL_417575 spike protein (1-1211)(T874C_S1055C) Foldon construct

SEQ ID NO: 6626 - protein, 1241 aa, Artificial Sequence
  SARS-CoV-2/Iceland/238/2020__EPI_ISL_417566 spike protein (1-1211)(T874C_S1055C) Foldon construct
MFVFLVLLPLVSSQCVNLTTRTQLPPAYTNSFTRGVYYPDKVFRSSVLHSTQDLFLPFFSNVTWFHAIHVSGTNGTKRFDNPVLPFNDGVYFASTEKSNIIRGWIFGTTLDSKTQSLLIVNNATNVVIKVCEFQFCNDPFLGVYYHKNNKSWMESEFRVYSSANNCTFEYVSQPFLMDLEGKQGNFKNLREFVFKNIDGYFKIYSKHTPINLVRDLPQGFSALEPLVDLPIGINITRFQTLLALHRSYLTPGDSSSGWTAGAAAYYVGYLQPRTFLLKYNENGTITDAVDCALDPLSETKCTLKSFTVEKGIYQTSNFRVQPTESIVRFPNITNLCPFGEVFNATRFASVYAWNRKRISNCVADYSVLYNSASFSTFKCYGVSPTKLNDLCFTNVYADSFVIRGDEVRQIAPGQTGKIADYNYKLPDDFTGCVIAWNSNNLDSKVGGNYNYLYRLFRKSNLKPFERDISTEIYQAGSTPCNGVEGFNCYFPLQSYGFQPTNGVGYQPYRVVVLSFELLHAPATVCGPKKSTNLVKNKCVNFNFNGLTGTGVLTESNKKFLPFQQFGRDIADTTDAVRDPQTLEILDITPCSFGGVSVITPGTNTSNQVAVLYQGVNCTEVPVAIHADQLTPTWRVYSTGSNVFQTRAGCLIGAEHVNNSYECDIPIGAGICASYQTQTNSPRRARSVASQSIIAYTMSLGAENSVAYSNNSIAIPTNFTISVTTEILPVSMTKTSVDCTMYICGDSTECSNLLLQYGSFCTQLNRALTGIAVEQDKNTQEVFAQVKQIYKTPPIKDFGGFNFSQILPDPSKPSKRSFIEDLLFNKVTLADVGFIKQYGDCLGDIAARDLICAQKFNGLTVLPPLLTDEMIAQYCSALLAGTITSGWTFGAGAALQIPFAMQMAYRFNGIGVTQNVLYENQKLIANQFNSAIGKIQDSLSSTASALGKLQDVVNQNAQALNTLVKQLSSNFGAISSVLNDILSRLDKVEAEVQIDRLITGRLQSLQTYVTQQLIRAAEIRASANLAATKMSECVLGQSKRVDFCGKGYHLMSFPQCAPHGVVFLHVTYVPAQEKNFTTAPAICHDGKAHFPREGVFVSNGTHWFVTQRNFYEPQIITTDNTFVSGNCDVVIGIVNNTVYDPLQPELDSFKEELDKYFKNHTSPDVDLGDISGINASVVNIQKEIDRLNEVAKNLNESLIDLQELGKYEQYIKGGSGYIPEAPRDGQAYVRKDGEWVLLSTFL

SEQ ID NO: 6627 - protein, 1241 aa, Artificial Sequence
  SARS-CoV-2/Greece/16/2020__EPI_ISL_418265 spike protein (1-1211)(T874C_S1055C) Foldon construct
MFVFLVLLPLVSSQCVNLTTRTQLPPAYTNSFTRGVYYPDKVFRSSVLHSTQDLFLPFFSNVTWFHAIHVSGTNGTKRFDNPVLPFNDGVYFASTEKSNIIRGWIFGTTLDSKTQSLLIVNNATNVVIKVCEFQFCNDPFLGVYYHKNNKSWMESEFRVYSSANNCTFEYVSQPFLMDLEGKQGNFKNLREFVFKNVDGYFKIYSKHTPINLVRDLPQGFSALEPLVDLPIGINITRFQTLLALHRSYLTPGDSSSGWTAGAAAYYVGYLQPRTFLLKYNENGTITDAVDCALDPLSETKCTLKSFTVEKGIYQTSNFRVQPTESIVRFPNITNLCPFGEVFNATRFASVYAWNRKRISNCVADYSVLYNSASFSTFKCYGVSPTKLNDLCFTNVYADSFVIRGDEVRQIAPGQTGKIADYNYKLPDDFTGCVIAWNSNNLDSKVGGNYNYLYRLFRKSNLKPFERDISTEIYQAGSTPCNGVEGFNCYFPLQSYGFQPTNGVGYQPYRVVVLSFELLHAPATVCGPKKSTNLVKNKCVNFNFNGLTGTGVLTESNKKFLPFQQFGRDIADTTDAVRDPQTLEILDITPCSFGGVSVITPGTNTSNQVAVLYQDVNCTEVPVAIHADQLTPTWRVYSTGSNVFQTRAGCLIGAEHVNNSYECDIPIGAGICASYQTQTNSPRRARSVASQSIIAYTMSLGAENSVAYSNNSIAIPTNFTISVTTEILPVSMTKTSVDCTMYICGDSTECSNLLLQYGSFCTQLNRALTGIAVEQDKNTQEVFAQVKQIYKTPPIKDFGGFNFSQILPDPSKPSKRSFIEDLLFNKVTLADAGFIKQYGDCLGDIAARDLICAQKFNGLTVLPPLLTDEMIAQYCSALLAGTITSGWTFGAGAALQIPFAMQMAYRFNGIGVTQNVLYENQKLIANQFNSAIGKIQDSLSSTASALGKLQDVVNQNAQALNTLVKQLSSNFGAISSVLNDILSRLDKVEAEVQIDRLITGRLQSLQTYVTQQLIRAAEIRASANLAATKMSECVLGQSKRVDFCGKGYHLMSFPQCAPHGVVFLHVTYVPAQEKNFTTAPAICHDGKAHFPREGVFVSNGTHWFVTQRNFYEPQIITTDNTFVSGNCDVVIGIVNNTVYDPLQPELDSFKEELDKYFKNHTSPDVDLGDISGINASVVNIQKEIDRLNEVAKNLNESLIDLQELGKYEQYIKGGSGYIPEAPRDGQAYVRKDGEWVLLSTFL

SEQ ID NO: 6628 - protein, 1241 aa, Artificial Sequence
  SARS-CoV-2/Iceland/319/2020__EPI_ISL_417648 spike protein (1-1211)(T874C_S1055C) Foldon construct
MFVFLVLLPLVSSQCVNLTTRTQLPPAYTNSFTRGVYYPDKVFRSSVLHSTQDLFLPFFSNVTWFHAIHVSGTNGTKRFDNPVLPFNDGVYFASTEKSNIIRGWIFGTTLDSKTQSLLIVNNATNVVIKVCEFQFCNDPFLGVYYHKNNKSWMESEFRVYSSANNCTFEYVSQPFLIDLEGKQGNFKNLREFVFKNIDGYFKIYSKHTPINLVRDLPQGFSALEPLVDLPIGINITRFQTLLALHRSYLTPGDSSSGWTAGAAAYYVGYLQPRTFLLKYNENGTITDAVDCALDPLSETKCTLKSFTVEKGIYQTSNFRVQPTESIVRFPNITNLCPFGEVFNATRFASVYAWNRKRISNCVADYSVLYNSASFSTFKCYGVSPTKLNDLCFTNVYADSFVIRGDEVRQIAPGQTGKIADYNYKLPDDFTGCVIAWNSNNLDSKVGGNYNYLYRLFRKSNLKPFERDISTEIYQAGSTPCNGVEGFNCYFPLQSYGFQPTNGVGYQPYRVVVLSFELLHAPATVCGPKKSTNLVKNKCVNFNFNGLTGTGVLTESNKKFLPFQQFGRDIADTTDAVRDPQTLEILDITPCSFGGVSVITPGTNTSNQVAVLYQGVNCTEVPVAIHADQLTPTWRVYSTGSNVFQTRAGCLIGAEHVNNSYECDIPIGAGICASYQTQTNSPRRARSVASQSIIAYTMSLGAENSVAYSNNSIAIPTNFTISVTTEILPVSMTKTSVDCTMYICGDSTECSNLLLQYGSFCTQLNRALTGIAVEQDKNTQEVFAQVKQIYKTPPIKDFGGFNFSQILPDPSKPSKRSFIEDLLFNKVTLADAGFIKQYGDCLGDIAARDLICAQKFNGLTVLPPLLTDEMIAQYCSALLAGTITSGWTFGAGAALQIPFAMQMAYRFNGIGVTQNVLYENQKLIANQFNSAIGKIQDSLSSTASALGKLQDVVNQNAQALNTLVKQLSSNFGAISSVLNDILSRLDKVEAEVQIDRLITGRLQSLQTYVTQQLIRAAEIRASANLAATKMSECVLGQSKRVDFCGKGYHLMSFPQCAPHGVVFLHVTYVPAQEKNFTTAPAICHDGKAHFPREGVFVSNGTHWFVTQRNFYEPQIITTDNTFVSGNCDVVIGIVNNTVYDPLQPELDSFKEELDKYFKNHTSPDVDLGDISGINASVVNIQKEIDRLNEVAKNLNESLIDLQELGKYEQYIKGGSGYIPEAPRDGQAYVRKDGEWVLLSTFL

SEQ ID NO: 6629 - protein, 1241 aa, Artificial Sequence
  SARS-CoV-2/Congo/94/2020__EPI_ISL_417947 spike protein (1-1211)(T874C_S1055C) Foldon construct
MFVFLVLLPLVSSQCVNLTTRTQLPPAYTNSFTRGVYYPDKVFRSSVLHSTQDLFLPFFSNVTWFHAIHVSGTNGTKRFDNPVLPFNDGVYFASTEKSNIIRGWIFGTTLDSKTQSLLIVNNATNVVIKVCEFQFCNDPFLGVYYHKNNKSWMESEFRVYSSANNCTFEYVSQPFLMDLEGKQGNFKNLREFVFKNIDGYFKIYSKHTPINLVRDLPQGFSALEPLVDLPIGINITRFQTLLALHRSYLTPGDSSSGWTAGAAAYYVGYLQPRTFLLKYNENGTITDAVDCALDPLSETKCTLKSFTVEKGIYQTSNFRVQPTESIVRFPNITNLCPFGEVFNATRFASVYAWNRKRISNCVADYSVLYNSASFSTFKCYGVSPTKLNDLCFTNVYADSFVIRGDEVRQIAPGQTGKIADYNYKLPDDFTGCVIAWNSNNLDSKVGGNYNYLYRLFRKSNLKPFERDISTEIYQAGSTPCNGVEGFNCYFPLQSYGFQPTNGVGYQPYRVVVLSFELLHAPATVCGPKKSTNLVKNKCVNFNFNGLTGTGVLTESNKKFLPFQQFGRDIADTTDAVRDPQTLEILDITPCSFGGVSVITPGTNTSNQVAVLYQGVNCTEVPVAIHADQLTPTWRVYSTGSNVFQTRAGCLIGAEHVNNSYECDIPIGAGICASYQTQTNSPRRARSVASQSIIAYTMSLGAENSVAYSNNSIAIPTNFTISVTTEILPVSMTKTSVDCTMYICGDSTECSNLLLQYGSFCTQLNRALTGIAVEQDKNTQEVFAQVKQIYKTPPIKDFGGFNFSQILPDPSKPSKRSFIEDILFNKVTLADAGFIKQYGDCLGDIAARDLICAQKFNGLTVLPPLLTDEMIAQYCSALLAGTITSGWTFGAGAALQIPFAMQMAYRFNGIGVTQNVLYENQKLIANQFNSAIGKIQDSLSSTASALGKLQDVVNQNAQALNTLVKQLSSNFGAISSVLNDILSRLDKVEAEVQIDRLITGRLQSLQTYVTQQLIRAAEIRASANLAATKMSECVLGQSKRVDFCGKGYHLMSFPQCAPHGVVFLHVTYVPAQEKNFTTAPAICHDGKAHFPREGVFVSNGTHWFVTQRNFYEPQIITTDNTFVSGNCDVVIGIVNNTVYDPLQPELDSFKEELDKYFKNHTSPDVDLGDISGINASVVNIQKEIDRLNEVAKNLNESLIDLQELGKYEQYIKGGSGYIPEAPRDGQAYVRKDGEWVLLSTFL

SEQ ID NO: 6630 - protein, 1241 aa, Artificial Sequence
  SARS-CoV-2/Congo/158/2020__EPI_ISL_417950 spike protein (1-1211)(T874C_S1055C) Foldon construct
MFVFLVLLPLVSSQCVNLTTRTQLPPAYTNSFTRGVYYPDKVFRSSVLHSTQDLFLPFFSNVTWFHAIHVSGTNGTKRFDNPVLPFNDGVYFASTEKSNIIRGWIFGTTLDSKTQSLLIVNNATNVVIKVCEFQFCNDPFLGVYYHKNNKSWMESEFRVYSSANNCTFEYVSQPFLMDLEGKQGNFKNLREFVFKNIDGYFKIYSKHTPINLVRDLPQGFSALEPLVDLPIGINITRFQTLLALHRSYLTPGDSSSGWTAGAAAYYVGYLQPRTFLLKYNENGTITDAVDCALDPLSETKCTLKSFTVEKGIYQTSNFRVQPTESIVRFPNITNLCPFGEVFNATRFASVYAWNRKRISNCVADYSVLYNSASFSTFKCYGVSPTKLNDLCFTNVYADSFVIRGDEVRQIAPGQTGKIADYNYKLPDDFTGCVIAWNSNNLDSKVGGNYNYLYRLFRKSNLKPFERDISTEIYQAGSTPCNGVEGFNCYFPLQSYGFQPTNGVGYQPYRVVVLSFELLHAPATVCGPKKSTNLVKNKCVNFNFNGLTGTGVLTESNKKFLPFQQFGRDIADTTDAVRDPQTLEILDITPCSFGGVSVITPGTNTSNQVAVLYQDVNCTEVPVAIHADQLTPTWRVYSTGSNVFQTRAGCLIGAEHVNNSYECDIPIGAGICASYQTQTNSPRRARSVASQSIIAYTMSLGAENSVAYSNNSIAIPTNFTISVTTEILPVSMTKTSVDCTMYICGDSTECSNLLLQYGSFCTQLNRALTGIAVEQDKNTQEVFAQVKQIYKTPPIKDFGGFNFSQILPDPSKPSKRSFIEDLLFNKVTLADAGFIKQYGDCLGDIAARDLICAQKFNGLTVLPPLLTDEMIAQYCSALLAGTITSGWTFGAGAALQIPFAMQMAYRFNGIGVTQNVLYENQKLIANQFNSAIGKIQDSLSSTASALGKLQDVVNQNAQALNTLVKQLSSNFGAISSVLNDILSRLDKVEAEVQIDRLITGRLQSLQTYVTQQLIRAAEIRASANLAATKMSECVLGQSKRVDFCGKGYHLMSFPQCAPHGVVFLHVTYVPAQEKNFTTAPAICHDGKAHFPREGVFVSNGTHWFVTQRNFYEPQIITTDNTFLSGNCDVVIGIVNNTVYDPLQPELDSFKEELDKYFKNHTSPDVDLGDISGINASVVNIQKEIDRLNEVAKNLNESLIDLQELGKYEQYIKGGSGYIPEAPRDGQAYVRKDGEWVLLSTFL

SEQ ID NO: 6631 - protein, 1241 aa, Artificial Sequence
  SARS-CoV-2/USA/UT-00034/2020__EPI_ISL_417977 spike protein (1-1211)(T874C_S1055C) Foldon construct
MFVFLVLLPLVSSQCVNLTTRTQLPPAYTNSFTRGVYYPDKVFRSSVLHSTQDLFLPFFSNVTWFHAIHVSGTNGTKRFDNPVLPFNDGVYFASTEKSNIIRGWIFGTTLDSKTQSLLIVNNATNVVIKVCEFQFCNDPFLGVYYYKNNKSWMESEFRVYSSANNCTFEYVSQPFLMDLEGKQGNFKNLREFVFKNIDGYFKIYSKHTPINLVRDLPQGFSALEPLVDLPIGINITRFQTLLALHRSYLTPGDSSSGWTAGAAAYYVGYLQPRTFLLKYNENGTITDAVDCALDPLSETKCTLKSFTVEKGIYQTSNFRVQPTESIVRFPNITNLCPFGEVFNATRFASVYAWNRKRISNCVADYSVLYNSASFSTFKCYGVSPTKLNDLCFTNVYADSFVIRGDEVRQIAPGQTGKIADYNYKLPDDFTGCVIAWNSNNLDSKVGGNYNYLYRLFRKSNLKPFERDISTEIYQAGSTPCNGVEGFNCYFPLQSYGFQPTNGVGYQPYRVVVLSFELLHAPATVCGPKKSTNLVKNKCVNFNFNGLTGTGVLTESNKKFLPFQQFGRDIADTTDAVRDPQTLEILDITPCSFGGVSVITPGTNTSNQVAVLYQGVNCTEVPVAIHADQLTPTWRVYSTGSNVFQTRAGCLIGAEHVNNSYECDIPIGAGICASYQTQTNSPRRARSVASQSIIAYTMSLGAENSVAYSNNSIAIPTNFTISVTTEILPVSMTKTSVDCTMYICGDSTECSNLLLQYGSFCTQLNRALTGIAVEQDKNTQEVFAQVKQIYKTPPIKDFGGFNFSQILPDPSKPSKRSFIEDLLFNKVTLADAGFIKQYGDCLGDIAARDLICAQKFNGLTVLPPLLTDEMIAQYCSALLAGTITSGWTFGAGAALQIPFAMQMAYRFNGIGVTQNVLYENQKLIANQFNSAIGKIQDSLSSTASALGKLQDVVNQNAQALNTLVKQLSSNFGAISSVLNDILSRLDKVEAEVQIDRLITGRLQSLQTYVTQQLIRAAEIRASANLAATKMSECVLGQSKRVDFCGKGYHLMSFPQCAPHGVVFLHVTYVPAQEKNFTTAPAICHDGKAHFPREGVFVSNGTHWFVTQRNFYEPQIITTDNTFVSGNCDVVIGIVNNTVYDPLQPELDSFKEELDKYFKNHTSPDVDLGDISGINASVVNIQKEIDRLNEVAKNLNESLIDLQELGKYEQYIKGGSGYIPEAPRDGQAYVRKDGEWVLLSTFL

SEQ ID NO: 6632 - protein, 1241 aa, Artificial Sequence
  SARS-CoV-2/USA/UT-00033/2020__EPI_ISL_417976 spike protein (1-1211)(T874C_S1055C) Foldon construct
MFVFLVLLPLVSSQCVNLTTRTQLPPAYTNSFTRGVYYPDKVFRSSVLHSTQDLFLPFFSNVTWFHAIHVSGTNGTKRFDNPVLPFNDGVYFASTEKSNIIRGWIFGTTLDSKTQSLLIVNNATNVVIKVCEFQFCNDPFLGVYYHKNNKSWMESEFRVYSSANNCTFEYVSQPFLMDLEGKQGNFKNLREFVFKNIDGYFKIYSKHTPINLVRDLPQGFSALEPLVDLPIGINITRFQTLLALHRSYLTPGDSSSGLTAGAAAYYVGYLQPRTFLLKYNENGTITDAVDCALDPLSETKCTLKSFTVEKGIYQTSNFRVQPTESIVRFPNITNLCPFGEVFNATRFASVYAWNRKRISNCVADYSVLYNSASFSTFKCYGVSPTKLNDLCFTNVYADSFVIRGDEVRQIAPGQTGKIADYNYKLPDDFTGCVIAWNSNNLDSKVGGNYNYLYRLFRKSNLKPFERDISTEIYQAGSTPCNGVEGFNCYFPLQSYGFQPTNGVGYQPYRVVVLSFELLHAPATVCGPKKSTNLVKNKCVNFNFNGLTGTGVLTESNKKFLPFQQFGRDIADTTDAVRDPQTLEILDITPCSFGGVSVITPGTNTSNQVAVLYQGVNCTEVPVAIHADQLTPTWRVYSTGSNVFQTRAGCLIGAEHVNNSYECDIPIGAGICASYQTQTNSPRRARSVASQSIIAYTMSLGAENSVAYSNNSIAIPTNFTISVTTEILPVSMTKTSVDCTMYICGDSTECSNLLLQYGSFCTQLNRALTGIAVEQDKNTQEVFAQVKQIYKTPPIKDFGGFNFSQILPDPSKPSKRSFIEDLLFNKVTLADAGFIKQYGDCLGDIAARDLICAQKFNGLTVLPPLLTDEMIAQYCSALLAGTITSGWTFGAGAALQIPFAMQMAYRFNGIGVTQNVLYENQKLIANQFNSAIGKIQDSLSSTASALGKLQDVVNQNAQALNTLVKQLSSNFGAISSVLNDILSRLDKVEAEVQIDRLITGRLQSLQTYVTQQLIRAAEIRASANLAATKMSECVLGQSKRVDFCGKGYHLMSFPQCAPHGVVFLHVTYVPAQEKNFTTAPAICHDGKAHFPREGVFVSNGTHWFVTQRNFYEPQIITTDNTFVSGNCDVVIGIVNNTVYDPLQPELDSFKEELDKYFKNHTSPDVDLGDISGINASVVNIQKEIDRLNEVAKNLNESLIDLQELGKYEQYIKGGSGYIPEAPRDGQAYVRKDGEWVLLSTFL

SEQ ID NO: 6633 - protein, 1241 aa, Artificial Sequence
  SARS-CoV-2/USA/WI-13/2020__EPI_ISL_417516 spike protein (1-1211)(T874C_S1055C) Foldon construct
MFVFLVLLPLVSSQCVNLTTRTQLPPAYTNSFTRGVYYPDKVFRSSVLHSTQDLFLPFFSNVTWFHAIHVSGTNGTKRFDNPVLPFNDGVYFASTEKSNIIRGWIFGTTLDSKTQSLLIVNNATNVVIKVCEFQFCNDPFLGVYYHKNNKSWMESEFRVYSSANNCTFEYVSQPFLMDLEGKQGNFKNLREFVFKNIDGYFKIYSKHTPINLVRDLPQGFSALEPLVDLPIGINITRFQTLLALHRSYLTPGDSSSGWTAGAAAYYVGYLQPRTFLLKYNENGTITDAVDCALDPLSETKCTLKSFTVEKGIYQTSNFRVLPTESIVRFPNITNLCPFGEVFNATRFASVYAWNRKRISNCVADYSVLYNSASFSTFKCYGVSPTKLNDLCFTNVYADSFVIRGDEVRQIAPGQTGKIADYNYKLPDDFTGCVIAWNSNNLDSKVGGNYNYLYRLFRKSNLKPFERDISTEIYQAGSTPCNGVEGFNCYFPLQSYGFQPTNGVGYQPYRVVVLSFELLHAPATVCGPKKSTNLVKNKCVNFNFNGLTGTGVLTESNKKFLPFQQFGRDIADTTDAVRDPQTLEILDITPCSFGGVSVITPGTNTSNQVAVLYQGVNCTEVPVAIHADQLTPTWRVYSTGSNVFQTRAGCLIGAEHVNNSYECDIPIGAGICASYQTQTNSPRRARSVASQSIIAYTMSLGAENSVAYSNNSIAIPTNFTISVTTEILPVSMTKTSVDCTMYICGDSTECSNLLLQYGSFCTQLNRALTGIAVEQDKNTQEVFAQVKQIYKTPPIKDFGGFNFSQILPDPSKPSKRSFIEDLLFNKVTLADAGFIKQYGDCLGDIAARDLICAQKFNGLTVLPPLLTDEMIAQYCSALLAGTITSGWTFGAGAALQIPFAMQMAYRFNGIGVTQNVLYENQKLIANQFNSAIGKIQDSLSSTASALGKLQDVVNQNAQALNTLVKQLSSNFGAISSVLNDILSRLDKVEAEVQIDRLITGRLQSLQTYVTQQLIRAAEIRASANLAATKMSECVLGQSKRVDFCGKGYHLMSFPQCAPHGVVFLHVTYVPAQEKNFTTAPAICHDGKAHFPREGVFVSNGTHWFVTQRNFYEPQIITTDNTFVSGNCDVVIGIVNNTVYDPLQPELDSFKEELDKYFKNHTSPDVDLGDISGINASVVNIQKEIDRLNEVAKNLNESLIDLQELGKYEQYIKGGSGYIPEAPRDGQAYVRKDGEWVLLSTFL

SEQ ID NO: 6634 - protein, 1240 aa, Artificial Sequence
  SARS-CoV-2/India/1-27/2020__EPI_ISL_413522 spike protein (1-1210)(T873C_S1054C) Foldon construct
MFVFLVLLPLVSSQCVNLTTRTQLPPAYTNSFTRGVYYPDKVFRSSVLHSTQDLFLPFFSNVTWFHAIHVSGTNGTKRFDNPVLPFNDGVYFASTEKSNIIRGWIFGTTLDSKTQSLLIVNNATNVVIKVCEFQFCNDPFLGVYHKNNKSWMESEFRVYSSANNCTFEYVSQPFLMDLEGKQGNFKNLREFVFKNIDGYFKIYSKHTPINLVRDLPQGFSALEPLVDLPIGINITRFQTLLALHRSYLTPGDSSSGWTAGAAAYYVGYLQPRTFLLKYNENGTITDAVDCALDPLSETKCTLKSFTVEKGIYQTSNFRVQPTESIVRFPNITNLCPFGEVFNATRFASVYAWNRKRISNCVADYSVLYNSASFSTFKCYGVSPTKLNDLCFTNVYADSFVIRGDEVIQIAPGQTGKIADYNYKLPDDFTGCVIAWNSNNLDSKVGGNYNYLYRLFRKSNLKPFERDISTEIYQAGSTPCNGVEGFNCYFPLQSYGFQPTNGVGYQPYRVVVLSFELLHAPATVCGPKKSTNLVKNKCVNFNFNGLTGTGVLTESNKKFLPFQQFGRDIADTTDAVRDPQTLEILDITPCSFGGVSVITPGTNTSNQVAVLYQDVNCTEVPVAIHADQLTPTWRVYSTGSNVFQTRAGCLIGAEHVNNSYECDIPIGAGICASYQTQTNSPRRARSVASQSIIAYTMSLGAENSVAYSNNSIAIPTNFTISVTTEILPVSMTKTSVDCTMYICGDSTECSNLLLQYGSFCTQLNRALTGIAVEQDKNTQEVFAQVKQIYKTPPIKDFGGFNFSQILPDPSKPSKRSFIEDLLFNKVTLADAGFIKQYGDCLGDIAARDLICAQKFNGLTVLPPLLTDEMIAQYCSALLAGTITSGWTFGAGAALQIPFAMQMAYRFNGIGVTQNVLYENQKLIANQFNSAIGKIQDSLSSTASALGKLQDVVNQNAQALNTLVKQLSSNFGAISSVLNDILSRLDKVEAEVQIDRLITGRLQSLQTYVTQQLIRAAEIRASANLAATKMSECVLGQSKRVDFCGKGYHLMSFPQCAPHGVVFLHVTYVPAQEKNFTTAPAICHDGKAHFPREGVFVSNGTHWFVTQRNFYEPQIITTDNTFVSGNCDVVIGIVNNTVYDPLQPELDSFKEELDKYFKNHTSPDVDLGDISGINASVVNIQKEIDRLNEVAKNLNESLIDLQELGKYEQYIKGGSGYIPEAPRDGQAYVRKDGEWVLLSTFL

SEQ ID NO: 6635 - protein, 1235 aa, Artificial Sequence
  SARS-CoV-2/pangolin/Guangxi/P4L/2017__EPI_ISL_410538 spike protein (1-1205)(T868C_S1049C) Foldon construct
MFVFLFVLPLVSSQCVNLTTRTGIPPGYTNSSTRGVYYPDKVFRSSILHLTQDLFLPFFSNVTWFNTINYQGGFKKFDNPVLPFNDGVYFASTEKSNIIRGWIFGTTLDARTQSLLIVNNATNVVIKVCEFQFCTDPFLGVYYHNNNKTWVENEFRVYSSANNCTFEYISQPFLMDLEGKQGNFKNLREFVFKNVDGYFKIYSKHTPIDLVRDLPRGFAALEPLVDLPIGINITRFQTLLALHRSYLTPGNLESGWTTGAAAYYVGYLQQRTFLLSYNQNGTITDAVDCSLDPLSETKCTLKSLTVEKGIYQTSNFRVQPTISIVRFPNITNLCPFGEVFNASKFASVYAWNRKRISNCVADYSVLYNSTSFSTFKCYGVSPTKLNDLCFTNVYADSFVVKGDEVRQIAPGQTGVIADYNYKLPDDFTGCVIAWNSVKQDALTGGNYGYLYRLFRKSKLKPFERDISTEIYQAGSTPCNGQVGLNCYYPLERYGFHPTTGVNYQPFRVVVLSFELLNGPATVCGPKLSTTLVKDKCVNFNFNGLTGTGVLTTSKKQFLPFQQFGRDISDTTDAVRDPQTLEILDITPCSFGGVSVITPGTNTSNQVAVLYQDVNCTEVPMAIHAEQLTPAWRVYSAGANVFQTRAGCLVGAEHVNNSYECDIPVGAGICASYHSMSSLRSVNQRSIIAYTMSLGAENSVAYSNNSIAIPTNFTISVTTEILPVSMTKTSVDCTMYICGDSIECSNLLLQYGSFCTQLNRALTGIAVEQDKNTQEVFAQVKQIYKTPPIKDFGGFNFSQILPDPSKPSKRSFIEDLLFNKVTLADAGFIKQYGDCLGDIAARDLICAQKFNGLTVLPPLLTDEMIAQYCSALLAGTITSGWTFGAGAALQIPFAMQMAYRFNGIGVTQNVLYENQKLIANQFNSAIGKIQDSLSSTASALGKLQDVVNQNAQALNTLVKQLSSNFGAISSVLNDILSRLDKVEAEVQIDRLITGRLQSLQTYVTQQLIRAAEIRASANLAATKMSECVLGQSKRVDFCGKGYHLMSFPQCAPHGVVFLHVTYVPAQEKNFTTAPAICHEGKAHFPREGVFVSNGTHWFITQRNFYEPQIITTDNTFVSGSCDVVIGIVNNTVYDPLQPELDSFKEELDKYFKNHTSPDVDLGDISGINASVVNIQKEIDRLNEVAKNLNESPIDLQELGKYEQYIKGGSGYIPEAPRDGQAYVRKDGEWVLLSTFL

SEQ ID NO: 6636 - protein, 1235 aa, Artificial Sequence
  SARS-CoV-2/pangolin/Guangxi/P5L/2017__EPI_ISL_410540 spike protein (1-1205)(T868C_S1049C) Foldon construct
MFVFLFVLPLVSSQCVNLTTRTGIPPGYTNSSTRGVYYPDKVFRSSILHLTQDLFLPFFSNVTWFNTINYQGGFKKFDNPVLPFNDGVYFASTEKSNIIRGWIFGTTLDARTQSLLIVNNATNVVIKVCEFQFCTDPFLGVYYHNNNKTWVENEFRVYSSANNCTFEYISQPFLMDLEGKQGNFKNLREFVFKNVDGYFKIYSKHTPIDLVRDLPRGFAALEPLVDLPIGINITRFQTLLALHRSYLTPGKLESGWTTGAAAYYVGYLQQRTFLLSYNQNGTITDAVDCSLDPLSETKCTLKSLTVEKGIYQTSNFRVQPTISIVRFPNITNLCPFGEVFNASKFASVYAWNRKRISNCVADYSVLYNSTSFSTFKCYGVSPTKLNDLCFTNVYADSFVVKGDEVRQIAPGQTGVIADYNYKLPDDFTGCVIAWNSVKQDALTGGNYGYLYRLFRKSKLKPFERDISTEIYQAGSTPCNGQVGLNCYYPLERYGFHPTTGVNYQPFRVVVLSFELLNGPATVCGPKLSTTLVKDKCVNFNFNGLTGTGVLTTSKKQFLPFQQFGRDISDTTDAVRDPQTLEILDITPCSFGGVSVITPGTNTSNQVAVLYQDVNCTEVPMAIHAEQLTPAWRVYSAGANVFQTRAGCLVGAEHVNNSYECDIPVGAGICASYHSMSSFRSVNQRSIIAYTMSLGAENSVAYSNNSIAIPTNFTISVTTEILPVSMTKTSVDCTMYICGDSIECSNLLLQYGSFCTQLNRALTGIAVEQDKNTQEVFAQVKQIYKTPPIKDFGGFNFSQILPDPSKPSKRSFIEDLLFNKVTLADAGFIKQYGDCLGDIAARDLICAQKFNGLTVLPPLLTDEMIAQYCSALLAGTITSGWTFGAGAALQIPFAMQMAYRFNGIGVTQNVLYENQKLIANQFNSAIGKIQDSLSSTASALGKLQDVVNQNAQALNTLVKQLSSNFGAISSVLNDILSRLDKVEAEVQIDRLITGRLQSLQTYVTQQLIRAAEIRASANLAATKMSECVLGQSKRVDFCGKGYHLMSFPQCAPHGVVFLHVTYVPAQEKNFTTAPAICHEGKAHFPREGVFVSNGTHWFITQRNFYEPQIITTDNTFVSGSCDVVIGIVNNTVYDPLQPELDSFKEELDKYFKNHTSPDVDLGDISGINASVVNIQKEIDRLNEVAKNLNESLIDLQELGKYEQYIKGGSGYIPEAPRDGQAYVRKDGEWVLLSTFL

SEQ ID NO: 6637 - protein, 1235 aa, Artificial Sequence
  SARS-CoV-2/pangolin/Guangxi/P5E/2017__EPI_ISL_410541 spike protein (1-1205)(T868C_S1049C) Foldon construct
MFVFLFVLPLVSSQCVNLTTRTGIPPGYTNSSTRGVYYPDKVFRSSILHLTQDLFLPFFSNVTWFNTITYQGGSKKFDNPVLPFNDGVYFASTEKSNIIRGWIFGTTLDARTQSLLIVNNATNVVIKVCEFQFCTDPFLGVYYHNNNKTWVENEFRVYSSANNCTFEYISQPFLMDLEGKQGNFKNLREFVFKNVDGYFKIYSKHTPIDLVRDLPRGFAALEPLVDLPIGINITRFQTLLALHRSYLTPGKLESGWTTGAAAYYVGYLQQRTFLLSYNQNGTITDAVDCSLDPLSETKCTLKSLTVEKGIYQTSNFRVQPTISIVRFPNITNLCPFGEVFNASKFASVYAWNRKRISNCVADYSVLYNSTSFSTFKCYGVSPTKLNDLCFTNVYADSFVVKGDEVRQIAPGQTGVIADYNYKLPDDFTGCVIAWNSVKQDALTGDNYGYLYRLFRKSKLKPFERDISTEIYQAGSTPCNGQVGLNCYYPLERYGFHPTTGVNYQPFRVVVLSFELLNGPATVCGPKLSTTLVKDKCVNFNFNGLTGTGVLTTSKKQFLPFQQFGRDISDTTDAVRDPQTLEILDITPCSFGGVSVITPGTNTSNQVAVLYQDVNCTEVPMAIHAEQLTPAWRVYSAGANVFQTRAGCLVGAEHVNNSYECDIPVGAGICASYHSMSSFRSVNQRSIIAYTMSLGAENSVAYSNNSIAIPTNFTISVTTEILPVSMTKTSVDCTMYICGDSIECSNLLLQYGSFCTQLNRALTGIAVEQDKNTQEVFAQVKQIYKTPPIKDFGGFNFSQILPDPSKPSKRSFIEDLLFNKVTLADAGFIKQYGDCLGDIAARDLICAQKFNGLTVLPPLLTDEMIAQYCSALLAGTITSGWTFGAGAALQIPFAMQMAYRFNGIGVTQNVLYENQKLIANQFNSAIGKIQDSLSSTASALGKLQDVVNQNAQALNTLVKQLSSNFGAISSVLNDILSRLDKVEAEVQIDRLITGRLQSLQTYVTQQLIRAAEIRASANLAATKMSECVLGQSKRVDFCGKGYHLMSFPQCAPHGVVFLHVTYVPAQEKNFTTAPAICHEGKAHFPREGVFVSNGTHWFITQRNFYEPQIITTDNTFVSGSCDVVIGIVNNTVYDPLQPELDSFKEELDKYFKNHTSPDVDLGDISGINASVVNIQKEIDRLNEVAKNLNESLIDLQELGKYEQYIKGGSGYIPEAPRDGQAYVRKDGEWVLLSTFL

SEQ ID NO: 6638 - protein, 1233 aa, Artificial Sequence
  SARS-CoV-2/pangolin/Guangxi/P1E/2017__EPI_ISL_410539 spike protein (1-1203)(T866C_S1047C) Foldon construct
MFVFLFVLPLVSSQCVNLTTRTGIQPGYTNSSTRGVYYPDKVFRSSILHLTQDLFLPFFSNVTWFNTINYQGGFKKFDNPVLPFNDGVYFASTEKSNIIRGWIFGTTLDARTQSLLIVNNATNVVIKVCEFQFCTDPFLGVYYHNNNKTWVENEFRVYSSANNCTFEYISQPFLMDLEGKQGNFKNLREFVFKNVDGYFKIYSKHTPIDLVRDLPRGFAALEPLVDLPIGINITRFQTLLALHRSYLTPGKLESGWTTGAAAYYVGYLQQRTFLLSYNQNGTITDAVDCSLDPLSETKCTLKSLTVEKGIYQTSNFRVQPTISIVRFPNITNLCPFGEVFNASKFASVYAWNRKRISNCVADYSVLYNSTSFSTFKCYGVSPTKLNDLCFTNVYADSFVVKGDEVRQIAPGQTGVIADYNYKLPDDFTGCVIAWNSVKQDALTGGNYLYRLFRKSKLKPFERDISTEIYQAGSTPCNGQVGLNCYYPLERYGFHPTTGVNYQPFRVVVLSFELLNGPATVCGPKLSTTLVKDKCVNFNFNGLTGTGVLTTSKKQFLPFQQFGRDISDTTDAVRDPQTLEILDITPCSFGGVSVITPGTNTSNQVAVLYQDVNCTEVPMAIHAEQLTPAWRVYSAGANVFQTRAGCLVGAEHVNNSYECDIPVGAGICASYHSMSSLRSVNQRSIIAYTMSLGAENSVAYSNNSIAIPTNFTISVTTEILPVSMTKTSVDCTMYICGDSIECSNLLLQYGSFCTQLNRALTGIAVEQDKNTQEVFAQVKQIYKTPPIKDFGGFNFSQILPDPSKPSKRSFIEDLLFNKVTLADAGFIKQYGDCLGDIAARDLICAQKFNGLTVLPPLLTDEMIAQYCSALLAGTITSGWTFGAGAALQIPFAMQMAYRFNGIGVTQNVLYENQKLIANQFNSAIGKIQDSLSSTASALGKLQDVVNQNAQALNTLVKQLSSNFGAISSVLNDILSRLDKVEAEVQIDRLITGRLQSLQTYVTQQLIRAAEIRASANLAATKMSECVLGQSKRVDFCGKGYHLMSFPQCAPHGVVFLHVTYVPAQEKNFTTAPAICHEGKAHFPREGVFVSNGTHWFITQRNFYEPQIITTDNTFVSGSCDVVIGIVNNTVYDPLQPELDSFKEELDKYFKNHTSPDVDLGDISGINASVVNIQKEIDRLNEVAKNLNESLIDLQELGKYEQYIKGGSGYIPEAPRDGQAYVRKDGEWVLLSTFL

SEQ ID NO: 6639 - protein, 1365 aa, Artificial Sequence
  SARS-CoV-2/Wuhan/WIV05/2019__EPI_ISL_402128 spike protein (1-1211) WhcAg construct
MFVFLVLLPLVSSQCVNLTTRTQLPPAYTNSFTRGVYYPDKVFRSSVLHSTQDLFLPFFSNVTWFHAIHVSGTNGTKRFDNPVLPFNDGVYFASTEKSNIIRGWIFGTTLDSKTQSLLIVNNATNVVIKVCEFQFCNDPFLGVYYHKNNKSWMESEFRVYSSANNCTFEYVSQPFLMDLEGKQGNFKNLREFVFKNIDGYFKIYSKHTPINLVRDLPQGFSALEPLVDLPIGINITRFQTLLALHRSYLTPGDSSSGWTAGAAAYYVGYLQPRTFLLKYNENGTITDAVDCALDPLSETKCTLKSFTVEKGIYQTSNFRVQPTESIVRFPNITNLCPFGEVFNATRFASVYAWNRKRISNCVADYSVLYNSASFSTFKCYGVSPTKLNDLCFTNVYADSFVIRGDEVRQIAPGQTGKIADYNYKLPDDFTGCVIAWNSNNLDSKVGGNYNYLYRLFRKSNLKPFERDISTEIYQAGSTPCNGVEGFNCYFPLQSYGFQPTNGVGYQPYRVVVLSFELLHAPATVCGPKKSTNLVKNKCVNFNFNGLTGTGVLTESNKKFLPFQQFGRDIADTTDAVRDPQTLEILDITPCSFGGVSVITPGTNTSNQVAVLYQDVNCTEVPVAIHADQLTPTWRVYSTGSNVFQTRAGCLIGAEHVNNSYECDIPIGAGICASYQTQTNSPRRARSVASQSIIAYTMSLGAENSVAYSNNSIAIPTNFTISVTTEILPVSMTKTSVDCTMYICGDSTECSNLLLQYGSFCTQLNRALTGIAVEQDKNTQEVFAQVKQIYKTPPIKDFGGFNFSQILPDPSKPSKRSFIEDLLFNKVTLADAGFIKQYGDCLGDIAARDLICAQKFNGLTVLPPLLTDEMIAQYTSALLAGTITSGWTFGAGAALQIPFAMQMAYRFNGIGVTQNVLYENQKLIANQFNSAIGKIQDSLSSTASALGKLQDVVNQNAQALNTLVKQLSSNFGAISSVLNDILSRLDKVEAEVQIDRLITGRLQSLQTYVTQQLIRAAEIRASANLAATKMSECVLGQSKRVDFCGKGYHLMSFPQSAPHGVVFLHVTYVPAQEKNFTTAPAICHDGKAHFPREGVFVSNGTHWFVTQRNFYEPQIITTDNTFVSGNCDVVIGIVNNTVYDPLQPELDSFKEELDKYFKNHTSPDVDLGDISGINASVVNIQKEIDRLNEVAKNLNESLIDLQELGKYEQYIKGGGGSDIDPYKEFGSSYQLLNFLPLDFFPDLNALVDTATALYEEELTGREHCSPHHTAIRQALVCWDELTKLIAWMSSNITSEQVRTIIVNHVNDTWGLKVRQSLWFHLSCLTFGQHTVQEFLVSFGVWIRTPAPYRPPNAPILSTLPEHTVIC

SEQ ID NO: 6640 - protein, 1361 aa, Artificial Sequence
  SARS-CoV-2/bat/Yunnan/RaTG13/2013__EPI_ISL_402131 spike protein (1-1207) WhcAg construct
MFVFLVLLPLVSSQCVNLTTRTQLPPAYTNSSTRGVYYPDKVFRSSVLHLTQDLFLPFFSNVTWFHAIHVSGTNGIKRFDNPVLPFNDGVYFASTEKSNIIRGWIFGTTLDSKTQSLLIVNNATNVVIKVCEFQFCNDPFLGVYYHKNNKSWMESEFRVYSSANNCTFEYVSQPFLMDLEGKQGNFKNLREFVFKNIDGYFKIYSKHTPINLVRDLPPGFSALEPLVDLPIGINITRFQTLLALHRSYLTPGDSSSGWTAGAAAYYVGYLQPRTFLLKYNENGTITDAVDCALDPLSETKCTLKSFTVEKGIYQTSNFRVQPTDSIVRFPNITNLCPFGEVFNATTFASVYAWNRKRISNCVADYSVLYNSTSFSTFKCYGVSPTKLNDLCFTNVYADSFVITGDEVRQIAPGQTGKIADYNYKLPDDFTGCVIAWNSKHIDAKEGGNFNYLYRLFRKANLKPFERDISTEIYQAGSKPCNGQTGLNCYYPLYRYGFYPTDGVGHQPYRVVVLSFELLNAPATVCGPKKSTNLVKNKCVNFNFNGLTGTGVLTESNKKFLPFQQFGRDIADTTDAVRDPQTLEILDITPCSFGGVSVITPGTNASNQVAVLYQDVNCTEVPVAIHADQLTPTWRVYSTGSNVFQTRAGCLIGAEHVNNSYECDIPIGAGICASYQTQTNSRSVASQSIIAYTMSLGAENSVAYSNNSIAIPTNFTISVTTEILPVSMTKTSVDCTMYICGDSTECSNLLLQYGSFCTQLNRALTGIAVEQDKNTQEVFAQVKQIYKTPPIKDFGGFNFSQILPDPSKPSKRSFIEDLLFNKVTLADAGFIKQYGDCLGDIAARDLICAQKFNGLTVLPPLLTDEMIAQYTSALLAGTITSGWTFGAGAALQIPFAMQMAYRFNGIGVTQNVLYENQKLIANQFNSAIGKIQDSLSSTASALGKLQDVVNQNAQALNTLVKQLSSNFGAISSVLNDILSRLDKVEAEVQIDRLITGRLQSLQTYVTQQLIRAAEIRASANLAATKMSECVLGQSKRVDFCGKGYHLMSFPQSAPHGVVFLHVTYVPAQEKNFTTAPAICHDGKAHFPREGVFVSNGTHWFVTQRNFYEPQIITTDNTFVSGSCDVVIGIVNNTVYDPLQPELDSFKEELDKYFKNHTSPDVDLGDISGINASVVNIQKEIDRLNEVAKNLNESLIDLQELGKYEQYIKGGGGSDIDPYKEFGSSYQLLNFLPLDFFPDLNALVDTATALYEEELTGREHCSPHHTAIRQALVCWDELTKLIAWMSSNITSEQVRTIIVNHVNDTWGLKVRQSLWFHLSCLTFGQHTVQEFLVSFGVWIRTPAPYRPPNAPILSTLPEHTVIC

SEQ ID NO: 6641 - protein, 1365 aa, Artificial Sequence
  SARS-CoV-2/Wuhan/HBCDC-HB-01/2019__EPI_ISL_402132 spike protein (1-1211) WhcAg construct
MFVFLVLLPLVSSQCVNLTTRTQLPPAYTNSITRGVYYPDKVFRSSVLHSTQDLFLPFFSNVTWFHAIHVSGTNGTKRFDNPVLPFNDGVYFASTEKSNIIRGWIFGTTLDSKTQSLLIVNNATNVVIKVCEFQFCNDPFLGVYYHKNNKSWMESEFRVYSSANNCTFEYVSQPFLMDLEGKQGNFKNLREFVFKNIDGYFKIYSKHTPINLVRDLPQGFSALEPLVDLPIGINITRFQTLLALHRSYLTPGDSSSGWTAGAAAYYVGYLQPRTFLLKYNENGTITDAVDCALDPLSETKCTLKSFTVEKGIYQTSNFRVQPTESIVRFPNITNLCPFGEVFNATRFASVYAWNRKRISNCVADYSVLYNSASFSTFKCYGVSPTKLNDLCFTNVYADSFVIRGDEVRQIAPGQTGKIADYNYKLPDDFTGCVIAWNSNNLDSKVGGNYNYLYRLFRKSNLKPFERDISTEIYQAGSTPCNGVEGFNCYFPLQSYGFQPTNGVGYQPYRVVVLSFELLHAPATVCGPKKSTNLVKNKCVNFNFNGLTGTGVLTESNKKFLPFQQFGRDIADTTDAVRDPQTLEILDITPCSFGGVSVITPGTNTSNQVAVLYQDVNCTEVPVAIHADQLTPTWRVYSTGSNVFQTRAGCLIGAEHVNNSYECDIPIGAGICASYQTQTNSPRRARSVASQSIIAYTMSLGAENSVAYSNNSIAIPTNFTISVTTEILPVSMTKTSVDCTMYICGDSTECSNLLLQYGSFCTQLNRALTGIAVEQDKNTQEVFAQVKQIYKTPPIKDFGGFNFSQILPDPSKPSKRSFIEDLLFNKVTLADAGFIKQYGDCLGDIAARDLICAQKFNGLTVLPPLLTDEMIAQYTSALLAGTITSGWTFGAGAALQIPFAMQMAYRFNGIGVTQNVLYENQKLIANQFNSAIGKIQDSLSSTASALGKLQDVVNQNAQALNTLVKQLSSNFGAISSVLNDILSRLDKVEAEVQIDRLITGRLQSLQTYVTQQLIRAAEIRASANLAATKMSECVLGQSKRVDFCGKGYHLMSFPQSAPHGVVFLHVTYVPAQEKNFTTAPAICHDGKAHFPREGVFVSNGTHWFVTQRNFYEPQIITTDNTFVSGNCDVVIGIVNNTVYDPLQPELDSFKEELDKYFKNHTSPDVDLGDISGINASVVNIQKEIDRLNEVAKNLNESLIDLQELGKYEQYIKGGGGSDIDPYKEFGSSYQLLNFLPLDFFPDLNALVDTATALYEEELTGREHCSPHHTAIRQALVCWDELTKLIAWMSSNITSEQVRTIIVNHVNDTWGLKVRQSLWFHLSCLTFGQHTVQEFLVSFGVWIRTPAPYRPPNAPILSTLPEHTVIC

SEQ ID NO: 6642 - protein, 1365 aa, Artificial Sequence
  SARS-CoV-2/Guangdong/20SF028/2020__EPI_ISL_403936 spike protein (1-1211) WhcAg construct
MFVFLVLLPLVSSQCVNLTTRTQLPPAYTNSFTRGVYYPDKVFRSSVLYSTQDLFLPFFSNVTWFHAIHVSGTNGTKRFDNPVLPFNDGVYFASTEKSNIIRGWIFGTTLDSKTQSLLIVNNATNVVIKVCEFQFCNDPFLGVYYHKNNKSWMESEFRVYSSANNCTFEYVSQPFLMDLEGKQGNFKNLREFVFKNIDGYFKIYSKHTPINLVRDLPQGFSALEPLVDLPIGINITRFQTLLALHRSYLTPGDSSSGWTAGAAAYYVGYLQPRTFLLKYNENGTITDAVDCALDPLSETKCTLKSFTVEKGIYQTSNFRVQPTESIVRFPNITNLCPFGEVFNATRFASVYAWNRKRISNCVADYSVLYNSASFSTFKCYGVSPTKLNDLCFTNVYADSFVIRGDEVRQIAPGQTGKIADYNYKLPDDFTGCVIAWNSNNLDSKVGGNYNYLYRLFRKSNLKPFERDISTEIYQAGSTPCNGVEGFNCYFPLQSYGFQPTNGVGYQPYRVVVLSFELLHAPATVCGPKKSTNLVKNKCVNFNFNGLTGTGVLTESNKKFLPFQQFGRDIADTTDAVRDPQTLEILDITPCSFGGVSVITPGTNTSNQVAVLYQDVNCTEVPVAIHADQLTPTWRVYSTGSNVFQTRAGCLIGAEHVNNSYECDIPIGAGICASYQTQTNSPRRARSVASQSIIAYTMSLGAENSVAYSNNSIAIPTNFTISVTTEILPVSMTKTSVDCTMYICGDSTECSNLLLQYGSFCTQLNRALTGIAVEQDKNTQEVFAQVKQIYKTPPIKDFGGFNFSQILPDPSKPSKRSFIEDLLFNKVTLADAGFIKQYGDCLGDIAARDLICAQKFNGLTVLPPLLTDEMIAQYTSALLAGTITSGWTFGAGAALQIPFAMQMAYRFNGIGVTQNVLYENQKLIANQFNSAIGKIQDSLSSTASALGKLQDVVNQNAQALNTLVKQLSSNFGAISSVLNDILSRLDKVEAEVQIDRLITGRLQSLQTYVTQQLIRAAEIRASANLAATKMSECVLGQSKRVDFCGKGYHLMSFPQSAPHGVVFLHVTYVPAQEKNFTTAPAICHDGKAHFPREGVFVSNGTHWFVTQRNFYEPQIITTDNTFVSGNCDVVIGIVNNTVYDPLQPELDSFKEELDKYFKNHTSPDVDLGDISGINASVVNIQKEIDRLNEVAKNLNESLIDLQELGKYEQYIKGGGGSDIDPYKEFGSSYQLLNFLPLDFFPDLNALVDTATALYEEELTGREHCSPHHTAIRQALVCWDELTKLIAWMSSNITSEQVRTIIVNHVNDTWGLKVRQSLWFHLSCLTFGQHTVQEFLVSFGVWIRTPAPYRPPNAPILSTLPEHTVIC

SEQ ID NO: 6643 - protein, 1365 aa, Artificial Sequence
  SARS-CoV-2/Shenzhen/SZTH-001/2020__EPI_ISL_406592 spike protein (1-1211) WhcAg construct
MFVFLVLLPLVSSQCVNLTTRTQLPPAYTNSFTRGVYYPDKVFRSSVLHSTQDLFLPFFSNVTWFHAIHVSGTNGTKRFDNPVLPFNDGVYFASTEKSNIIRGWIFGTTLDSKTQSLLIVNNATNVVIKVCEFQFCNDPFLGVYYHKNNKSWMESEFRVYSSANNCTFEYVSQPFLMDLEGKQGNFKNLREFVFKNIDGYFKIYSKHTPINLVRDLPQGFSALEPLVDLPIGINITRFQTLLALHRSYLTPGDSSSGWTAGAAAYYVGYLQPRTFLLKYNENGTITDAVDCALDPLSETKCTLKSFTVEKGIYQTSNFRVQPTESIVRFPNITNLCPFGEVFNATRFASVYAWNRKRISNCVADYSVLYNSASFSTFKCYGVSPTKLNDLCFTNVYADSFVIRGDEVRQIAPGQTGKIADYNYKLPDDFTGCVIAWNSNNLDSKVGGNYNYLYRLFRKSNLKPFERDISTEIYQAGSTPCNGVEGFNCYFPLQSYGFQPTNGVGYQPYRVVVLSFELLHAPATVCGPKKSTNLVKNKCVNFNFNGLTGTGVLTESNKKFLPFQQFGRDIADTTDAVRDPQTLEILDITPCSFGGVSVITPGTNTSNQVAVLYQDVNCTEVPVAIHADQLTPTWRVYSTGSNVFQTRAGCLIGAEHVNNSYECDIPIGAGICASYQTQTNSPRRARSVASQSIIAYTMSLGAENSVAYSNNSIAIPTNFTISVTTEILPVSMTKTSVDCTMYICGDSTECSNLLLQYGSFCTQLNRALTGIAVEQDKNTQEVFAQVKQIYKTPPIKDFGGFNFSQILPDPSKPSKRSFIEDLLFNKVTLADAGFIKQYGDCLGDIAARDLICAQKFNGLTVLPPLLTDEMIAQYTSALLAGTITSGWTFGAGAALQIPFAMQMAYRFNGIGVTQNVLYENQKLIANQFNSAIGKIQDSLSSTASALGKLQDVVNQNAQALNTLVKQLSSNFGAISSVLNDILSRLDKVEAEVQIDRLITGRLQSLQTYVTQQLIRAAEIRASANLAATKMSECVLGQSKRVDFCGKGYHLMSFPQSAPHGVVFLHVTYVPAQEKNFTTAPAICHDGKAHFPREGVFVSNGTHWFVTQRNFYEPQIITTDNTFVSGNCDVLIGIVNNTVYDPLQPELDSFKEELDKYFKNHTSPDVDLGDISGINASVVNIQKEIDRLNEVAKNLNESLIDLQELGKYEQYIKGGGGSDIDPYKEFGSSYQLLNFLPLDFFPDLNALVDTATALYEEELTGREHCSPHHTAIRQALVCWDELTKLIAWMSSNITSEQVRTIIVNHVNDTWGLKVRQSLWFHLSCLTFGQHTVQEFLVSFGVWIRTPAPYRPPNAPILSTLPEHTVIC

SEQ ID NO: 6644 - protein, 1365 aa, Artificial Sequence
  SARS-CoV-2/Shenzhen/SZTH-004/2020__EPI_ISL_406595 spike protein (1-1211) WhcAg construct
MFVFLVLLPLVSSQCVNLTTRTQLPPAYTNSFTRGVYYPDKVFRSSVLHSTQDLFLPFFSNVTWFHAIHVSGTNGTKRFDNPVLPFNDGVYFASTEKSNIIRGWIFGTTLDSKTQSLLIVNNATNVVIKVCEFQFCNDPFLGVYYHKNNKSWMESEFRVYSSANNCTFEYVSQPFLMDLEGKQGNFKNLREFVFKNIDGYFKIYSKHTPINLVRDLPQGFSALEPLVDLPIGINITRFQTLLALHRSYLTPGDSSSGWTAGAAAYYVGYLQPRTFLLKYNENGTITDAVDCALDPLSETKCTLKSFTVEKGIYQTSNFRVQPTESIVRFPNITNLCPFGEVFNATRFASVYAWDRKRISNCVAYYSVLYNSASFSTFKCYGVSPTKLNDLCFTNVYADSFVIRGDEVRQIAPGQTGKIADYNYKLPDDFTGCVIAWNSNNLDSKVGGNYNYLYRLFRKSNLKPFERDISTEIYQAGSTPCNGVEGFNCYFPLQSYGFQPTNGVGYQPYRVVVLSFELLHAPATVCGPKKSTNLVKNKCVNFNFNGLTGTGVLTESNKKFLPFQQFGRDIADTTDAVRDPQTLEILDITPCSFGGVSVITPGTNTSNQVAVLYQDVNCTEVPVAIHADQLTPTWRVYSTGSNVFQTRAGCLIGAEHVNNSYECDIPIGAGICASYQTQTNSPRRARSVASQSIIAYTMSLGAENSVAYSNNSIAIPTNFTISVTTEILPVSMTKTSVDCTMYICGDSTECSNLLLQYGSFCTQLNRALTGIAVEQDKNTQEVFAQVKQIYKTPPIKDFGGFNFSQILPDPSKPSKRSFIEDLLFNKVTLADAGFIKQYGDCLGDIAARDLICAQKFNGLTVLPPLLTDEMIAQYTSALLAGTITSGWTFGAGAALQIPFAMQMAYRFNGIGVTQNVLYENQKLIANQFNSAIGKIQDSLSSTASALGKLQDVVNQNAQALNTLVKQLSSNFGAISSVLNDILSRLDKVEAEVQIDRLITGRLQSLQTYVTQQLIRAAEIRASANLAATKMSECVLGQSKRVDFCGKGYHLMSFPQSAPHGVVFLHVTYVPAQEKNFTTAPAICHDGKAHFPREGVFVSNGTHWFVTQRNFYEPQIITTDNTFVSGNCDVVIGIVNNTVYDPLQPELDSFKEELDKYFKNHTSPDVDLGDISGINASVVNIQKEIDRLNEVAKNLNESLIDLQELGKYEQYIKGGGGSDIDPYKEFGSSYQLLNFLPLDFFPDLNALVDTATALYEEELTGREHCSPHHTAIRQALVCWDELTKLIAWMSSNITSEQVRTIIVNHVNDTWGLKVRQSLWFHLSCLTFGQHTVQEFLVSFGVWIRTPAPYRPPNAPILSTLPEHTVIC

SEQ ID NO: 6645 - protein, 1365 aa, Artificial Sequence
  SARS-CoV-2/France/IDF0372/2020__EPI_ISL_406596 spike protein (1-1211) WhcAg construct
MFVFLVLLPLVSSQCVNLTTRTQLPPAYTNSFTRGVYYPDKVFRSSVLHSTQDLFLPFFSNVTWFHAIHVSGTNGTKRFDNPVLPFNDGVYFASTEKSNIIRGWIFGTTLDSKTQSLLIVNNATNVVIKVCEFQFCNDPFLGVYYHKNNKSWMESEFRVYSSANNCTFEYVSQPFLMDLEGKQGNFKNLREFVFKNIDGYFKIYSKHTPINLVRDLPQGFSALEPLVDLPIGINITRFQTLLALHRSYLTPGDSSSGWTAGAAAYYVGYLQPRTFLLKYNENGTITDAVDCALDPLSETKCTLKSFTVEKGIYQTSNFRVQPTESIVRFPNITNLCPFGEVFNATRFASVYAWNRKRISNCVADYSFLYNSASFSTFKCYGVSPTKLNDLCFTNVYADSFVIRGDEVRQIAPGQTGKIADYNYKLPDDFTGCVIAWNSNNLDSKVGGNYNYLYRLFRKSNLKPFERDISTEIYQAGSTPCNGVEGFNCYFPLQSYGFQPTNGVGYQPYRVVVLSFELLHAPATVCGPKKSTNLVKNKCVNFNFNGLTGTGVLTESNKKFLPFQQFGRDIADTTDAVRDPQTLEILDITPCSFGGVSVITPGTNTSNQVAVLYQDVNCTEVPVAIHADQLTPTWRVYSTGSNVFQTRAGCLIGAEHVNNSYECDIPIGAGICASYQTQTNSPRRARSVASQSIIAYTMSLGAENSVAYSNNSIAIPTNFTISVTTEILPVSMTKTSVDCTMYICGDSTECSNLLLQYGSFCTQLNRALTGIAVEQDKNTQEVFAQVKQIYKTPPIKDFGGFNFSQILPDPSKPSKRSFIEDLLFNKVTLADAGFIKQYGDCLGDIAARDLICAQKFNGLTVLPPLLTDEMIAQYTSALLAGTITSGWTFGAGAALQIPFAMQMAYRFNGIGVTQNVLYENQKLIANQFNSAIGKIQDSLSSTASALGKLQDVVNQNAQALNTLVKQLSSNFGAISSVLNDILSRLDKVEAEVQIDRLITGRLQSLQTYVTQQLIRAAEIRASANLAATKMSECVLGQSKRVDFCGKGYHLMSFPQSAPHGVVFLHVTYVPAQEKNFTTAPAICHDGKAHFPREGVFVSNGTHWFVTQRNFYEPQIITTDNTFVSGNCDVVIGIVNNTVYDPLQPELDSFKEELDKYFKNHTSPDVDLGDISGINASVVNIQKEIDRLNEVAKNLNESLIDLQELGKYEQYIKGGGGSDIDPYKEFGSSYQLLNFLPLDFFPDLNALVDTATALYEEELTGREHCSPHHTAIRQALVCWDELTKLIAWMSSNITSEQVRTIIVNHVNDTWGLKVRQSLWFHLSCLTFGQHTVQEFLVSFGVWIRTPAPYRPPNAPILSTLPEHTVIC

SEQ ID NO: 6646 - protein, 1365 aa, Artificial Sequence
  SARS-CoV-2/Australia/VIC01/2020__EPI_ISL_406844 spike protein (1-1211) WhcAg construct
MFVFLVLLPLVSSQCVNLTTRTQLPPAYTNSFTRGVYYPDKVFRSSVLHSTQDLFLPFFSNVTWFHAIHVSGTNGTKRFDNPVLPFNDGVYFASTEKSNIIRGWIFGTTLDSKTQSLLIVNNATNVVIKVCEFQFCNDPFLGVYYHKNNKSWMESEFRVYSSANNCTFEYVSQPFLMDLEGKQGNFKNLREFVFKNIDGYFKIYSKHTPINLVRDLPQGFSALEPLVDLPIGINITRFQTLLALHRRYLTPGDSSSGWTAGAAAYYVGYLQPRTFLLKYNENGTITDAVDCALDPLSETKCTLKSFTVEKGIYQTSNFRVQPTESIVRFPNITNLCPFGEVFNATRFASVYAWNRKRISNCVADYSVLYNSASFSTFKCYGVSPTKLNDLCFTNVYADSFVIRGDEVRQIAPGQTGKIADYNYKLPDDFTGCVIAWNSNNLDSKVGGNYNYLYRLFRKSNLKPFERDISTEIYQAGSTPCNGVEGFNCYFPLQSYGFQPTNGVGYQPYRVVVLSFELLHAPATVCGPKKSTNLVKNKCVNFNFNGLTGTGVLTESNKKFLPFQQFGRDIADTTDAVRDPQTLEILDITPCSFGGVSVITPGTNTSNQVAVLYQDVNCTEVPVAIHADQLTPTWRVYSTGSNVFQTRAGCLIGAEHVNNSYECDIPIGAGICASYQTQTNSPRRARSVASQSIIAYTMSLGAENSVAYSNNSIAIPTNFTISVTTEILPVSMTKTSVDCTMYICGDSTECSNLLLQYGSFCTQLNRALTGIAVEQDKNTQEVFAQVKQIYKTPPIKDFGGFNFSQILPDPSKPSKRSFIEDLLFNKVTLADAGFIKQYGDCLGDIAARDLICAQKFNGLTVLPPLLTDEMIAQYTSALLAGTITSGWTFGAGAALQIPFAMQMAYRFNGIGVTQNVLYENQKLIANQFNSAIGKIQDSLSSTASALGKLQDVVNQNAQALNTLVKQLSSNFGAISSVLNDILSRLDKVEAEVQIDRLITGRLQSLQTYVTQQLIRAAEIRASANLAATKMSECVLGQSKRVDFCGKGYHLMSFPQSAPHGVVFLHVTYVPAQEKNFTTAPAICHDGKAHFPREGVFVSNGTHWFVTQRNFYEPQIITTDNTFVSGNCDVVIGIVNNTVYDPLQPELDSFKEELDKYFKNHTSPDVDLGDISGINASVVNIQKEIDRLNEVAKNLNESLIDLQELGKYEQYIKGGGGSDIDPYKEFGSSYQLLNFLPLDFFPDLNALVDTATALYEEELTGREHCSPHHTAIRQALVCWDELTKLIAWMSSNITSEQVRTIIVNHVNDTWGLKVRQSLWFHLSCLTFGQHTVQEFLVSFGVWIRTPAPYRPPNAPILSTLPEHTVIC

SEQ ID NO: 6647 - protein, 1365 aa, Artificial Sequence
  SARS-CoV-2/Germany/BavPat1/2020__EPI_ISL_406862 spike protein (1-1211) WhcAg construct
MFVFLVLLPLVSSQCVNLTTRTQLPPAYTNSFTRGVYYPDKVFRSSVLHSTQDLFLPFFSNVTWFHAIHVSGTNGTKRFDNPVLPFNDGVYFASTEKSNIIRGWIFGTTLDSKTQSLLIVNNATNVVIKVCEFQFCNDPFLGVYYHKNNKSWMESEFRVYSSANNCTFEYVSQPFLMDLEGKQGNFKNLREFVFKNIDGYFKIYSKHTPINLVRDLPQGFSALEPLVDLPIGINITRFQTLLALHRSYLTPGDSSSGWTAGAAAYYVGYLQPRTFLLKYNENGTITDAVDCALDPLSETKCTLKSFTVEKGIYQTSNFRVQPTESIVRFPNITNLCPFGEVFNATRFASVYAWNRKRISNCVADYSVLYNSASFSTFKCYGVSPTKLNDLCFTNVYADSFVIRGDEVRQIAPGQTGKIADYNYKLPDDFTGCVIAWNSNNLDSKVGGNYNYLYRLFRKSNLKPFERDISTEIYQAGSTPCNGVEGFNCYFPLQSYGFQPTNGVGYQPYRVVVLSFELLHAPATVCGPKKSTNLVKNKCVNFNFNGLTGTGVLTESNKKFLPFQQFGRDIADTTDAVRDPQTLEILDITPCSFGGVSVITPGTNTSNQVAVLYQGVNCTEVPVAIHADQLTPTWRVYSTGSNVFQTRAGCLIGAEHVNNSYECDIPIGAGICASYQTQTNSPRRARSVASQSIIAYTMSLGAENSVAYSNNSIAIPTNFTISVTTEILPVSMTKTSVDCTMYICGDSTECSNLLLQYGSFCTQLNRALTGIAVEQDKNTQEVFAQVKQIYKTPPIKDFGGFNFSQILPDPSKPSKRSFIEDLLFNKVTLADAGFIKQYGDCLGDIAARDLICAQKFNGLTVLPPLLTDEMIAQYTSALLAGTITSGWTFGAGAALQIPFAMQMAYRFNGIGVTQNVLYENQKLIANQFNSAIGKIQDSLSSTASALGKLQDVVNQNAQALNTLVKQLSSNFGAISSVLNDILSRLDKVEAEVQIDRLITGRLQSLQTYVTQQLIRAAEIRASANLAATKMSECVLGQSKRVDFCGKGYHLMSFPQSAPHGVVFLHVTYVPAQEKNFTTAPAICHDGKAHFPREGVFVSNGTHWFVTQRNFYEPQIITTDNTFVSGNCDVVIGIVNNTVYDPLQPELDSFKEELDKYFKNHTSPDVDLGDISGINASVVNIQKEIDRLNEVAKNLNESLIDLQELGKYEQYIKGGGGSDIDPYKEFGSSYQLLNFLPLDFFPDLNALVDTATALYEEELTGREHCSPHHTAIRQALVCWDELTKLIAWMSSNITSEQVRTIIVNHVNDTWGLKVRQSLWFHLSCLTFGQHTVQEFLVSFGVWIRTPAPYRPPNAPILSTLPEHTVIC

SEQ ID NO: 6648 - protein, 1365 aa, Artificial Sequence
  SARS-CoV-2/Wuhan/HBCDC-HB-02/2020__EPI_ISL_412978 spike protein (1-1211) WhcAg construct
MFVFLVLLPLVSSQCVNLTTRTQLPPAYTNSFTRGVYYPDKVFRSSVLHSTQDLFLPFFSNVTWFHAIHVSGTNGTKRFDNPVLPFNDGVYFASTEKSNIIRGWIFGTTLDSKTQSLLIVNNATNVVIKVCEFQFCNDPFLGVYYHKNNKSWMESEFRVYSSANNCTFEYVSQPFLMDLEGKQGNFKNLREFVFKNIDGYFKIYSKHTPINLVRDLPQGFSALEPLVDLPIGINITRFQTLLALHRSYLTPGDSSSGWTAGAAAYYVGYLQPRTFLLKYNENGTITDAVDCALDPLSETKCTLKSFTVEKGIYQTSNFRVQPTESIVRFPNITNLCPFGEVFNATRFASVYAWNRKRISNCVADYSVLYNSASFSTFKCYGVSPTKLNDLCFTNVYADSFVIRGDEVRQIAPGQTGKIADYNYKLPDDFTGCVIAWNSNNLDSKVGGNYNYLYRLFRKSNLKPFERDISTEIYQAGSTPCNGVEGFNCYFPLQSYGFQPTNGVGYQPYRVVVLSFELLHAPATVCGPKKSTNLVKNKCVNFNFNGLTGTGVLTESNKKFLPFQQFGRDIADTTDAVRDPQTLEILDITPCSFGGVSVITPGTNTSNQVAVLYQDVNCTEVPVAIHADQLTPTWRVYSTGSNVFQTRAGCLIGAEHVNNSYECDIPIGAGICASYQTQTNSPRRARSVASQSIIAYTMSLGAENSVAYSNNSIAIPTNFTISVTTEILPVSMTKTSVDCTMYICGDSTECSNFLLQYGSFCTQLNRALTGIAVEQDKNTQEVFAQVKQIYKTPPIKDFGGFNFSQILPDPSKPSKRSFIEDLLFNKVTLADAGFIKQYGDCLGDIAARDLICAQKFNGLTVLPPLLTDEMIAQYTSALLAGTITSGWTFGAGAALQIPFAMQMAYRFNGIGVTQNVLYENQKLIANQFNSAIGKIQDSLSSTASALGKLQDVVNQNAQALNTLVKQLSSNFGAISSVLNDILSRLDKVEAEVQIDRLITGRLQSLQTYVTQQLIRAAEIRASANLAATKMSECVLGQSKRVDFCGKGYHLMSFPQSAPHGVVFLHVTYVPAQEKNFTTAPAICHDGKAHFPREGVFVSNGTHWFVTQRNFYEPQIITTDNTFVSGNCDVVIGIVNNTVYDPLQPELDSFKEELDKYFKNHTSPDVDLGDISGINASVVNIQKEIDRLNEVAKNLNESLIDLQELGKYEQYIKGGGGSDIDPYKEFGSSYQLLNFLPLDFFPDLNALVDTATALYEEELTGREHCSPHHTAIRQALVCWDELTKLIAWMSSNITSEQVRTIIVNHVNDTWGLKVRQSLWFHLSCLTFGQHTVQEFLVSFGVWIRTPAPYRPPNAPILSTLPEHTVIC

SEQ ID NO: 6649 - protein, 1365 aa, Artificial Sequence
  SARS-CoV-2/Australia/QLD02/2020__EPI_ISL_407896 spike protein (1-1211) WhcAg construct
MFVFLVLLPLVSSQCVNLTTRTQLPPAYTNSFTRGVYYPDKVFRSSVLHSTQDLFLPFFSNVTWFHAIHVSGTNGTKRFDNPVLPFNDGVYFASTEKSNIIRGWIFGTTLDSKTQSLLIVNNATNVVIKVCEFQFCNDPFLGVYYHKNNKSWMESEFRVYSSANNCTFEYVSQPFLMDLEGKQGNFKNLREFVFKNIDGYFKIYSKHTPINLVRDLPQGFSALEPLVDLPIGINITRFQTLLALHRSYLTPGDSSSGWTAGAAAYYVGYLQPRTFLLKYNENGTITDAVDCALDPLSETKCTLKSFTVEKGIYQTSNFRVQPTESIVRFPNITNLCPFGEVFNATRFASVYAWNRKRISNCVADYSVLYNSASFSTFKCYGVSPTKLNDLCFTNVYADSFVIRGDEVRQIAPGQTGKIADYNYKLPDDFTGCVIAWNSNNLDSKVGGNYNYLYRLFRKSNLKPFERDISTEIYQAGSTPCNGVEGFNCYFPLQSYGFQPTNGVGYQPYRVVVLSFELLHAPATVCGPKKSTNLVKNKCVNFNFNGLTGTGVLTESNKKFLPFQQFGRDIADTTDAVRDPQTLEILDITPCSFGGVSVITPGTNTSNQVAVLYQDVNCTEVPVAIHADQLTPTWRVYSTGSNVFQTRAGCLIGAEHVNNSYECDIPIGAGICASYQTQTNSPRRARSVASQSIIAYTMSLGAENSVAYSNNSIAIPTNFTISVTTEILPVSMTKTSVDCTMYICGDSTECSNLLLQYGSFCTQLNRALTGIAVEQDKNTQEVFAQVKQIYKTPPIKDFGGFNFSQILPDPSKPSKRSFIEDLLFNKVTLADAGFIKQYGDCLGDIAARDLICAQKFNGLTVLPPLLTDEMIAQYTSALLAGTITSGWTFGAGAALQIPFAMQMAYRFNGIGVTQNVLYENQKLIANQFNSAIGKIQDSLSSTASALGKLQDVVNQNAQALNTLVKQLSSNFGAISSVLNDILSRLDKVEAEVQIDRLITGRLQSLQTYVTQQLIRAAEIRASANLAATKMSECVLGQSKRVDFCGKGYHLMSFPQSAPHGVVFLHVTYVPAQEKNFTTAPAICHDGKAHFPREGVFVSNGTHWFVTQRNFYEPQIITTDNTFVSGNCDVVIGIVNNTVYDPLQLELDSFKEELDKYFKNHTSPDVDLGDISGINASVVNIQKEIDRLNEVAKNLNESLIDLQELGKYEQYIKGGGGSDIDPYKEFGSSYQLLNFLPLDFFPDLNALVDTATALYEEELTGREHCSPHHTAIRQALVCWDELTKLIAWMSSNITSEQVRTIIVNHVNDTWGLKVRQSLWFHLSCLTFGQHTVQEFLVSFGVWIRTPAPYRPPNAPILSTLPEHTVIC

SEQ ID NO: 6650 - protein, 1365 aa, Artificial Sequence
  SARS-CoV-2/India/1-31/2020__EPI_ISL_413523 spike protein (1-1211) WhcAg construct
MFVFLVLLPLVSSQCVNLTTRTQLPPAYTNSFTRGVYYPDKVFRSSVLHSTQDLFLPFFSNVTWFHAIHVSGTNGTKRFDNPVLPFNDGVYFASTEKSNIIRGWIFGTTLDSKTQSLLIVNNATNVVIKVCEFQFCNDPFLGVYYHKNNKSWMESEFRVYSSANNCTFEYVSQPFLMDLEGKQGNFKNLREFVFKNIDGYFKIYSKHTPINLVRDLPQGFSALEPLVDLPIGINITRFQTLLALHRSYLTPGDSSSGWTAGAAAYYVGYLQPRTFLLKYNENGTITDAVDCALDPLSETKCTLKSFTVEKGIYQTSNFRVQPTESIVRFPNITNLCPFGEVFNATRFASVYAWNRKRISNCVADYSVLYNSASFSTFKCYGVSPTKLNDLCFTNVYADSFVIRGDEVRQIAPGQTGKIADYNYKLPDDFTGCVIAWNSNNLDSKVGGNYNYLYRLFRKSNLKPFERDISTEIYQAGSTPCNGVEGFNCYFPLQSYGFQPTNGVGYQPYRVVVLSFELLHAPATVCGPKKSTNLVKNKCVNFNFNGLTGTGVLTESNKKFLPFQQFGRDIADTTDAVRDPQTLEILDITPCSFGGVSVITPGTNTSNQVAVLYQDVNCTEVPVAIHADQLTPTWRVYSTGSNVFQTRAGCLIGAEHVNNSYECDIPIGAGICASYQTQTNSPRRARSVASQSIIAYTMSLGAENSVAYSNNSIAIPTNFTISVTTEILPVSMTKTSVDCTMYICGDSTECSNLLLQYGSFCTQLNRALTGIAVEQDKNTQEVFAQVKQIYKTPPIKDFGGFNFSQILPDPSKPSKRSFIEDLLFNKVTLADAGFIKQYGDCLGDIAARDLICAQKFNGLTVLPPLLTDEMIAQYTSALLAGTITSGWTFGAGAALQIPFAMQMAYRFNGIGVTQNVLYENQKLIANQFNSVIGKIQDSLSSTASALGKLQDVVNQNAQALNTLVKQLSSNFGAISSVLNDILSRLDKVEAEVQIDRLITGRLQSLQTYVTQQLIRAAEIRASANLAATKMSECVLGQSKRVDFCGKGYHLMSFPQSAPHGVVFLHVTYVPAQEKNFTTAPAICHDGKAHFPREGVFVSNGTHWFVTQRNFYEPQIITTDNTFVSGNCDVVIGIVNNTVYDPLQPELDSFKEELDKYFKNHTSPDVDLGDISGINASVVNIQKEIDRLNEVAKNLNESLIDLQELGKYEQYIKGGGGSDIDPYKEFGSSYQLLNFLPLDFFPDLNALVDTATALYEEELTGREHCSPHHTAIRQALVCWDELTKLIAWMSSNITSEQVRTIIVNHVNDTWGLKVRQSLWFHLSCLTFGQHTVQEFLVSFGVWIRTPAPYRPPNAPILSTLPEHTVIC

SEQ ID NO: 6651 - protein, 1365 aa, Artificial Sequence
  SARS-CoV-2/Guangdong/GD2020087-P0008/2020__EPI_ISL_413863 spike protein (1-1211) WhcAg construct
MFVFLVLLPLVSSQCVNLTTRTQLPPAYTNSFTRGVYYPDKVFRSSVLHSTQDLFLPFFSNVTWFHAIHVSGTNGTKRFDNPVLPFNDGVYFASTEKSNIIRGWIFGTTLDSKTQSLLIVNNATNVVIKVCEFQFCNDPFLGVYYHKNNKSWMESEFRVYSSANNCTFEYVSQPFLMDLEGKQGNFKNLREFVFKNIDGYFKIYSKHTPINLVRDLPQGFSALEPLVDLPIGINITRFQTLLALHRSYLTPGDSSSGWTAGAAAYYVGYLQPRTFLLKYNENGTITDAVDCALDPLSETKCTLKSFTVEKGIYQTSNFRVQPTESIVRFPNITNLCPFGEVFNATRFASVYAWNRKRISNCVADYSVLYNSASFSTFKCYGVSPTKLNDLCFTNVYADSFVIRGDEVREIAPGQTGKIADYNYKLPDDFTGCVIAWNSNNLDSKVGGNYNYLYRLFRKSNLKPFERDISTEIYQAGSTPCNGVEGFNCYFPLQSYGFQPTNGVGYQPYRVVVLSFELLHAPATVCGPKKSTNLVKNKCVNFNFNGLTGTGVLTESNKKFLPFQQFGRDIADTTDAVRDPQTLEILDITPCSFGGVSVITPGTNTSNQVAVLYQDVNCTEVPVAIHADQLTPTWRVYSTGSNVFQTRAGCLIGAEHVNNSYECDIPIGAGICASYQTQTNSPRRARSVASQSIIAYTMSLGAENSVAYSNNSIAIPTNFTISVTTEILPVSMTKTSVDCTMYICGDSTECSNLLLQYGSFCTQLNRALTGIAVEQDKNTQEVFAQVKQIYKTPPIKDFGGFNFSQILPDPSKPSKRSFIEDLLFNKVTLADAGFIKQYGDCLGDIAARDLICAQKFNGLTVLPPLLTDEMIAQYTSALLAGTITSGWTFGAGAALQIPFAMQMAYRFNGIGVTQNVLYENQKLIANQFNSAIGKIQDSLSSTASALGKLQDVVNQNAQALNTLVKQLSSNFGAISSVLNDILSRLDKVEAEVQIDRLITGRLQSLQTYVTQQLIRAAEIRASANLAATKMSECVLGQSKRVDFCGKGYHLMSFPQSAPHGVVFLHVTYVPAQEKNFTTAPAICHDGKAHFPREGVFVSNGTHWFVTQRNFYEPQIITTDNTFVSGNCDVVIGIVNNTVYDPLQPELDSFKEELDKYFKNHTSPDVDLGDISGINASVVNIQKEIDRLNEVAKNLNESLIDLQELGKYEQYIKGGGGSDIDPYKEFGSSYQLLNFLPLDFFPDLNALVDTATALYEEELTGREHCSPHHTAIRQALVCWDELTKLIAWMSSNITSEQVRTIIVNHVNDTWGLKVRQSLWFHLSCLTFGQHTVQEFLVSFGVWIRTPAPYRPPNAPILSTLPEHTVIC

SEQ ID NO: 6652 - protein, 1365 aa, Artificial Sequence
  SARS-CoV-2/Sweden/01/2020__EPI_ISL_411951 spike protein (1-1211) WhcAg construct
MFVFLVLLPLVSSQCVNLTTRTQLPPAYTNSFTRGVYYPDKVFRSSVLHSTQDLFLPFFSNVTWFHAIHVSGTNGTKRFDNPVLPFNDGVYFASTEKSNIIRGWIFGTTLDSKTQSLLIVNNATNVVIKVCEFQFCNDPFLGVYYHKNNKSWMESEFRVYSSANNCTFEYVSQPFLMDLEGKQGNFKNLREFVFKNIDGYFKIYSKHTPINLVRDLPQGFSALEPLVDLPIGINITRFQTLLALHRSYLTPGDSSSGWTAGAAAYYVGYLQPRTFLLKYNENGTITDAVDCALDPLSETKCTLKSFTVEKGIYQTSNFRVQPTESIVRFPNITNLCPFGEVFNATRFASVYAWNRKRISNCVADYSVLYNSASFSTFKCYGVSPTKLNDLCFTNVYADSFVIRGDEVRQIAPGQTGKIADYNYKLPDDFTGCVIAWNSNNLDSKVGGNYNYLYRLFRKSNLKPFERDISTEIYQAGSTPCNGVEGFNCYFPLQSYGFQPTNGVGYQPYRVVVLSFELLHAPATVCGPKKSTNLVKNKCVNFNFNGLTGTGVLTESNKKFLPFQQFGRDIADTTDAVRDPQTLEILDITPCSFGGVSVITPGTNTSNQVAVLYQDVNCTEVPVAIHADQLTPTWRVYSTGSNVFQTRAGCLIGAEHVNNSYECDIPIGAGICASYQTQTNSPRRARSVASQSIIAYTMSLGAENSVAYSNNSIAIPTNFTISVTTEILPVSMTKTSVDCTMYICGDSTECSNLLLQYGSFCTQLNRALTGIAVEQDKNTQEVFAQVKQIYKTPPIKDCGGFNFSQILPDPSKPSKRSFIEDLLFNKVTLADAGFIKQYGDCLGDIAARDLICAQKFNGLTVLPPLLTDEMIAQYTSALLAGTITSGWTFGAGAALQIPFAMQMAYRFNGIGVTQNVLYENQKLIANQFNSAIGKIQDSLSSTASALGKLQDVVNQNAQALNTLVKQLSSNFGAISSVLNDILSRLDKVEAEVQIDRLITGRLQSLQTYVTQQLIRAAEIRASANLAATKMSECVLGQSKRVDFCGKGYHLMSFPQSAPHGVVFLHVTYVPAQEKNFTTAPAICHDGKAHFPREGVFVSNGTHWFVTQRNFYEPQIITTDNTFVSGNCDVVIGIVNNTVYDPLQPELDSFKEELDKYFKNHTSPDVDLGDISGINASVVNIQKEIDRLNEVAKNLNESLIDLQELGKYEQYIKGGGGSDIDPYKEFGSSYQLLNFLPLDFFPDLNALVDTATALYEEELTGREHCSPHHTAIRQALVCWDELTKLIAWMSSNITSEQVRTIIVNHVNDTWGLKVRQSLWFHLSCLTFGQHTVQEFLVSFGVWIRTPAPYRPPNAPILSTLPEHTVIC

SEQ ID NO: 6653 - protein, 1365 aa, Artificial Sequence
  SARS-CoV-2/Tianmen/HBCDC-HB-07/2020__EPI_ISL_412983 spike protein (1-1211) WhcAg construct
MFVFLVLLPLVSSQCVNLTTRTQLPPAYTNSFTRGVYYPDKVFRSSVLHSTQDLFLPFFSNVTWFHAIHVSGTNGTKRFDNPVLPFNDGVYFASTEKSNIIRGWIFGTTLDSKTQSLLIVNNATNVVIKVCEFQFCNDPFLGVYYHKNNKSWMESEFRVYSSANNCTFEYVSQPFLMDLEGKQGNFKNLREFVFKNIDGYFKIYSKHTPINLVRDLPQGFSALEPLVDLPIGINITRFQTLLALHRSYLTPGDSSSGWTAGAAAYYVGYLQPRTFLLKYNENGTITDAVDCALDPLSETKCTLKSFTVEKGIYQTSNFRVQPTESIVRFPNITNLCPFGEVFNATRFASVYAWNRKRISNCVADYSVLYNSASFSTFKCYGVSPTKLNDLCFTNVYADSFVIRGDEVRQIAPGQTGKIADYNYKLPDDFTGCVIAWNSNNLDSKVGGNYNYLYRLFRKSNLKPFERDISTEIYQAGSTPCNGVEGFNCYFPLQSYGFQPTNGVGYQPYRVVVLSFELLHAPATVCGPKKSTNLVKNKCVNFNFNGLTGTGVLTESNKKFLPFQQFGRDIADTTDAVRDPQTLEILDITPCSFGGVSVITPGTNTSNQVAVLYQDLNCTEVPVAIHADQLTPTWRVYSTGSNVFQTRAGCLIGAEHVNNSYECDIPIGAGICASYQTQTNSPRRARSVASQSIIAYTMSLGAENSVAYSNNSIAIPTNFTISVTTEILPVSMTKTSVDCTMYICGDSTECSNLLLQYGSFCTQLNRALTGIAVEQDKNTQEVFAQVKQIYKTPPIKDFGGFNFSQILPDPSKPSKRSFIEDLLFNKVTLADAGFIKQYGDCLGDIAARDLICAQKFNGLTVLPPLLTDEMIAQYTSALLAGTITSGWTFGAGAALQIPFAMQMAYRFNGIGVTQNVLYENQKLIANQFNSAIGKIQDSLSSTASALGKLQDVVNQNAQALNTLVKQLSSNFGAISSVLNDILSRLDKVEAEVQIDRLITGRLQSLQTYVTQQLIRAAEIRASANLAATKMSECVLGQSKRVDFCGKGYHLMSFPQSAPHGVVFLHVTYVPAQEKNFTTAPAICHDGKAHFPREGVFVSNGTHWFVTQRNFYEPQIITTDNTFVSGNCDVVIGIVNNTVYDPLQPELDSFKEELDKYFKNHTSPDVDLGDISGINASVVNIQKEIDRLNEVAKNLNESLIDLQELGKYEQYIKGGGGSDIDPYKEFGSSYQLLNFLPLDFFPDLNALVDTATALYEEELTGREHCSPHHTAIRQALVCWDELTKLIAWMSSNITSEQVRTIIVNHVNDTWGLKVRQSLWFHLSCLTFGQHTVQEFLVSFGVWIRTPAPYRPPNAPILSTLPEHTVIC

SEQ ID NO: 6654 - protein, 1365 aa, Artificial Sequence
  SARS-CoV-2/Hong Kong/case42_VM20002493/2020__EPI_ISL_414527 spike protein (1-1211) WhcAg construct
MFVFLVLLPLVSSQCVNLTTRTQLPPAYTNSFTRGVYYPDKVFRSSVLHSTQDLFLPFFSNVTWFHAIHVSGTNGTKRFDNPVLPFNDGVYFASTEKSNIIRGWIFGTTLDSKTQSLLIVNNATNVVIKVCEFQFCNDPFLGVYYHKNNKSWMESEFRVYSSANNCTFEYVSQPFLMDLEGKQGNFKNLREFVFKNIDGYFKIYSKHTPINLVRDLPQGFSALEPLVDLPIGINITRFQTLLALHRSYLTPGDSSSGWTAGAAAYYVGYLQPRTFLLKYNENGTITDAVDCALDPLSETKCTLKSFTVEKGIYQTSNFRVQPTESIVRFPNITNLCPFGEVFNATRFASVYAWNRKRISNCVADYSVLYNSASFSTFKCYGVSPTKLNDLCFTNVYADSFVIRGDEVRQIAPGQTGKIADYNYKLPDDFTGCVIAWNSNNLDSKVGGNYNYLYRLFRKSNLKPFERDISTEIYQAGSTPCNGVEGFNCYFPLQSYGFQPTNGVGYQPYRVVVLSFELLHAPATVCGPKKSTNLVKNKCVNFNFNGLTGTGVLTESNKKFLPFQQFGRDIADTTDAVRDPQTLEILDITPCSFGGVSVITPGTNTSNQVAVLYQDVNCTEVPVAIHADQLTPTWRVYSTGSNVFQTRAGCLIGAEHVNNSYECDIPIGAGICASYQTQTNSPRRARSVASQSIIAYTMSLGAENSVAYSNNSIAIPTNFAISVTTEILPVSMTKTSVDCTMYICGDSTECSNLLLQYGSFCTQLNRALTGIAVEQDKNTQEVFAQVKQIYKTPPIKDFGGFNFSQILPDPSKPSKRSFIEDLLFNKVTLADAGFIKQYGDCLGDIAARDLICAQKFNGLTVLPPLLTDEMIAQYTSALLAGTITSGWTFGAGAALQIPFAMQMAYRFNGIGVTQNVLYENQKLIANQFNSAIGKIQDSLSSTASALGKLQDVVNQNAQALNTLVKQLSSNFGAISSVLNDILSRLDKVEAEVQIDRLITGRLQSLQTYVTQQLIRAAEIRASANLAATKMSECVLGQSKRVDFCGKGYHLMSFPQSAPHGVVFLHVTYVPAQEKNFTTAPAICHDGKAHFPREGVFVSNGTHWFVTQRNFYEPQIITTDNTFVSGNCDVVIGIVNNTVYDPLQPELDSFKEELDKYFKNHTSPDVDLGDISGINASVVNIQKEIDRLNEVAKNLNESLIDLQELGKYEQYIKGGGGSDIDPYKEFGSSYQLLNFLPLDFFPDLNALVDTATALYEEELTGREHCSPHHTAIRQALVCWDELTKLIAWMSSNITSEQVRTIIVNHVNDTWGLKVRQSLWFHLSCLTFGQHTVQEFLVSFGVWIRTPAPYRPPNAPILSTLPEHTVIC

SEQ ID NO: 6655 - protein, 1365 aa, Artificial Sequence
  SARS-CoV-2/USA/CruiseA-23/2020__EPI_ISL_414482 spike protein (1-1211) WhcAg construct
MFVFLVLLPLVSSQCVNLTTRTQLPPAYTNSFTRGVYYPDKVFRSSVLHSTQDLFLPFFSNVTWFHAIHVSGTNGTKRFDNPVLPFNDGVYFASTEKSNIIRGWIFGTTLDSKTQSLLIVNNATNVVIKVCEFQFCNDPFLGVYYHKNNKSWMESEFRVYSSANNCTFEYVSQPFLMDLEVKQGNFKNLREFVFKNIDGYFKIYSKHTPINLVRDLPQGFSALEPLVDLPIGINITRFQTLLALHRSYLTPGDSSSGWTAGAAAYYVGYLQPRTFLLKYNENGTITDAVDCALDPLSETKCTLKSFTVEKGIYQTSNFRVQPTESIVRFPNITNLCPFGEVFNATRFASVYAWNRKRISNCVADYSVLYNSASFSTFKCYGVSPTKLNDLCFTNVYADSFVIRGDEVRQIAPGQTGKIADYNYKLPDDFTGCVIAWNSNNLDSKVGGNYNYLYRLFRKSNLKPFERDISTEIYQAGSTPCNGVEGFNCYFPLQSYGFQPTNGVGYQPYRVVVLSFELLHAPATVCGPKKSTNLVKNKCVNFNFNGLTGTGVLTESNKKFLPFQQFGRDIADTTDAVRDPQTLEILDITPCSFGGVSVITPGTNTSNQVAVLYQDVNCTEVPVAIHADQLTPTWRVYSTGSNVFQTRAGCLIGAEHVNNSYECDIPIGAGICASYQTQTNSPRRARSVASQSIIAYTMSLGAENSVAYSNNSIAIPTNFTISVTTEILPVSMTKTSVDCTMYICGDSTECSNLLLQYGSFCTQLNRALTGIAVEQDKNTQEVFAQVKQIYKTPPIKDFGGFNFSQILPDPSKPSKRSFIEDLLFNKVTLADAGFIKQYGDCLGDIAARDLICAQKFNGLTVLPPLLTDEMIAQYTSALLAGTITSGWTFGAGAALQIPFAMQMAYRFNGIGVTQNVLYENQKLIANQFNSAIGKIQDSLSSTASALGKLQDVVNQNAQALNTLVKQLSSNFGAISSVLNDILSRLDKVEAEVQIDRLITGRLQSLQTYVTQQLIRAAEIRASANLAATKMSECVLGQSKRVDFCGKGYHLMSFPQSAPHGVVFLHVTYVPAQEKNFTTAPAICHDGKAHFPREGVFVSNGTHWFVTQRNFYEPQIITTDNTFVSGNCDVVIGIVNNTVYDPLQPELDSFKEELDKYFKNHTSPDVDLGDISGINASVVNIQKEIDRLNEVAKNLNESLIDLQELGKYEQYIKGGGGSDIDPYKEFGSSYQLLNFLPLDFFPDLNALVDTATALYEEELTGREHCSPHHTAIRQALVCWDELTKLIAWMSSNITSEQVRTIIVNHVNDTWGLKVRQSLWFHLSCLTFGQHTVQEFLVSFGVWIRTPAPYRPPNAPILSTLPEHTVIC

SEQ ID NO: 6656 - protein, 1365 aa, Artificial Sequence
  SARS-CoV-2/Hong Kong/case85_VM20002868/2020__EPI_ISL_414519 spike protein (1-1211) WhcAg construct
MFVFLVLVPLVSSQCVNLTTRTQLPPAYTNSFTRGVYYPDKVFRSSVLHSTQDLFLPFFSNVTWFHAIHVSGTNGTKRFDNPVLPFNDGVYFASTEKSNIIRGWIFGTTLDSKTQSLLIVNNATNVVIKVCEFQFCNDPFLGVYYHKNNKSWMESEFRVYSSANNCTFEYVSQPFLMDLEGKQGNFKNLREFVFKNIDGYFKIYSKHTPINLVRDLPQGFSALEPLVDLPIGINITRFQTLLALHRSYLTPGDSSSGWTAGAAAYYVGYLQPRTFLLKYNENGTITDAVDCALDPLSETKCTLKSFTVEKGIYQTSNFRVQPTESIVRFPNITNLCPFGEVFNATRFASVYAWNRKRISNCVADYSVLYNSASFSTFKCYGVSPTKLNDLCFTNVYADSFVIRGDEVRQIAPGQTGKIADYNYKLPDDFTGCVIAWNSNNLDSKVGGNYNYLYRLFRKSNLKPFERDISTEIYQAGSTPCNGVEGFNCYFPLQSYGFQPTNGVGYQPYRVVVLSFELLHAPATVCGPKKSTNLVKNKCVNFNFNGLTGTGVLTESNKKFLPFQQFGRDIADTTDAVRDPQTLEILDITPCSFGGVSVITPGTNTSNQVAVLYQDVNCTEVPVAIHADQLTPTWRVYSTGSNVFQTRAGCLIGAEHVNNSYECDIPIGAGICASYQTQTNSPRRARSVASQSIIAYTMSLGAENSVAYSNNSIAIPTNFTISVTTEILPVSMTKTSVDCTMYICGDSTECSNLLLQYGSFCTQLNRALTGIAVEQDKNTQEVFAQVKQIYKTPPIKDFGGFNFSQILPDPSKPSKRSFIEDLLFNKVTLADAGFIKQYGDCLGDIAARDLICAQKFNGLTVLPPLLTDEMIAQYTSALLAGTITSGWTFGAGAALQIPFAMQMAYRFNGIGVTQNVLYENQKLIANQFNSAIGKIQDSLSSTASALGKLQDVVNQNAQALNTLVKQLSSNFGAISSVLNDILSRLDKVEAEVQIDRLITGRLQSLQTYVTQQLIRAAEIRASANLAATKMSECVLGQSKRVDFCGKGYHLMSFPQSAPHGVVFLHVTYVPAQEKNFTTAPAICHDGKAHFPREGVFVSNGTHWFVTQRNFYEPQIITTDNTFVSGNCDVVIGIVNNTVYDPLQPELDSFKEELDKYFKNHTSPDVDLGDISGINASVVNIQKEIDRLNEVAKNLNESLIDLQELGKYEQYIKGGGGSDIDPYKEFGSSYQLLNFLPLDFFPDLNALVDTATALYEEELTGREHCSPHHTAIRQALVCWDELTKLIAWMSSNITSEQVRTIIVNHVNDTWGLKVRQSLWFHLSCLTFGQHTVQEFLVSFGVWIRTPAPYRPPNAPILSTLPEHTVIC

SEQ ID NO: 6657 - protein, 1365 aa, Artificial Sequence; identical to SEQ ID NO: 6647
  SARS-CoV-2/England/200990660/2020__EPI_ISL_414523 spike protein (1-1211) WhcAg construct

SEQ ID NO: 6658 - protein, 1365 aa, Artificial Sequence
  SARS-CoV-2/Australia/NSW09/2020__EPI_ISL_413595 spike protein (1-1211) WhcAg construct
MFVFLVLLPLVSSQCVNLTTRTQLPPAYTNSFTRGVYYPDKVFRSSVLHSTQDLFLPFFSNVTWFHAIHVSGTNGTKRFDNPVLPFNDGVYFASTEKSNIIRGWIFGTTLDSKTQSLLIVNNATNVVIKVCEFQFCNDPFLGVYYHKNNKSWMESEFRVYSSANNCTFEYVSQPFLMDLEGKQGNFKNLREFVFKNIDGYFKIYSKHTPINLVRDLPQGFSALEPLVDLPIGINITRFQTLLALHRSYLTPGDSSSGWTAGAAAYYVGYLQPRTFLLKYNENGTITDAVDCALDPLSETKCTLKSFTVEKGIYQTSNFRVQPTESIVRFPNITNLCPFGEVFNATRFASVYAWNRKRISNCVADYSVLYNSASFSTFKCYGVSPTKLNDLCFTNVYADSFVIRGDEVRQIAPGQTGKIADYNYKLPDDFTGCVIAWNSNNLDSKVGGNYNYLYRLFRKSNLKPFERDISTEIYQAGSTPCNGVEGFNCYFPLQSYGFQPTNGVGYQPYRVVVLSFELLHAPATVCGPKKSTNLVKNKCVNFNFNGLTGTGVLTESNKKFLPFQQFGRDIADTTDAVRDPQTLEILDITPCSFGGVSVITPGTNTSNQVAVLYQDVNCTEVPVAIHADQLTPTWRVYSTGSNVFQTRAGCLIGAEHVNNSYECDIPIGAGICASYQTQTNSPRRARSVASQSIIAYTMSLGAENSVAYSNNSIAIPTNFTISVTTEILPVSMTKTSVDCTMYICGDSTECSNLLLQYGSFCTQLNRALTGIAVEQDKNTQEVFAQVKQIYKTPPIKDFGGFNFSQILPDPSKPSKRSFIEDLLFNKVTLADAGFIKQYGDCLGDIAARDLICAQKFNGLTVLPPLLTDEMIAQYTSALLAGTITSGWTFGAGAALQIPFAMQMAYRFNGIGVTQNVLYENQKLIANQFNSAIGKIQDSLSFTASALGKLQDVVNQNAQALNTLVKQLSSNFGAISSVLNDILSRLDKVEAEVQIDRLITGRLQSLQTYVTQQLIRAAEIRASANLAATKMSECVLGQSKRVDFCGKGYHLMSFPQSAPHGVVFLHVTYVPAQEKNFTTAPAICHDGKAHFPREGVFVSNGTHWFVTQRNFYEPQIITTDNTFVSGNCDVVIGIVNNTVYDPLQPELDSFKEELDKYFKNHTSPDVDLGDISGINASVVNIQKEIDRLNEVAKNLNESLIDLQELGKYEQYIKGGGGSDIDPYKEFGSSYQLLNFLPLDFFPDLNALVDTATALYEEELTGREHCSPHHTAIRQALVCWDELTKLIAWMSSNITSEQVRTIIVNHVNDTWGLKVRQSLWFHLSCLTFGQHTVQEFLVSFGVWIRTPAPYRPPNAPILSTLPEHTVIC

SEQ ID NO: 6659 - protein, 1365 aa, Artificial Sequence; identical to SEQ ID NO: 6639
  SARS-CoV-2/Australia/NSW10/2020__EPI_ISL_413596 spike protein (1-1211) WhcAg construct

SEQ ID NO: 6660 - protein, 1365 aa, Artificial Sequence
  SARS-CoV-2/Switzerland/1000477797/2020__EPI_ISL_413023 spike protein (1-1211) WhcAg construct
MFVFLVLLPLVSSQCVNLTTRTQLPPAYTNSFTRGVYYPDKVFRSSVLHSTQDLFLPFFSNVTWFHAIHVSGTNGTKRFDNPVLPFNDGVYFASTEKSNIIRGWIFGTTLDSKTQSLLIVNNATNVVIKVCEFQFCNDPFLGVYYHKNNKSWMESEFRVYSSANNCTFEYVSQPFLMDLEGKQGNFKNLREFVFKNIDGYFNIYSKHTPINLVRDLPQGFSALEPLVDLPIGINITRFQTLLALHRSYLTPGDSSSGWTAGAAAYYVGYLQPRTFLLKYNENGTITDAVDCALDPLSETKCTLKSFTVEKGIYQTSNFRVQPTESIVRFPNITNLCPFGEVFNATRFASVYAWNRKRISNCVADYSVLYNSASFSTFKCYGVSPTKLNDLCFTNVYADSFVIRGDEVRQIAPGQTGKIADYNYKLPDDFTGCVIAWNSNNLDSKVGGNYNYLYRLFRKSNLKPFERDISTEIYQAGSTPCNGVEGFNCYFPLQSYGFQPTNGVGYQPYRVVVLSFELLHAPATVCGPKKSTNLVKNKCVNFNFNGLTGTGVLTESNKKFLPFQQFGRDIADTTDAVRDPQTLEILDITPCSFGGVSVITPGTNTSNQVAVLYQGVNCTEVPVAIHADQLTPTWRVYSTGSNVFQTRAGCLIGAEHVNNSYECDIPIGAGICASYQTQTNSPRRARSVASQSIIAYTMSLGAENSVAYSNNSIAIPTNFTISVTTEILPVSMTKTSVDCTMYICGDSTECSNLLLQYGSFCTQLNRALTGIAVEQDKNTQEVFAQVKQIYKTPPIKDFGGFNFSQILPDPSKPSKRSFIEDLLFNKVTLADAGFIKQYGDCLGDIAARDLICAQKFNGLTVLPPLLTDEMIAQYTSALLAGTITSGWTFGAGAALQIPFAMQMAYRFNGIGVTQNVLYENQKLIANQFNSAIGKIQDSLSSTASALGKLQDVVNQNAQALNTLVKQLSSNFGAISSVLNDILSRLDKVEAEVQIDRLITGRLQSLQTYVTQQLIRAAEIRASANLAATKMSECVLGQSKRVDFCGKGYHLMSFPQSAPHGVVFLHVTYVPAQEKNFTTAPAICHDGKAHFPREGVFVSNGTHWFVTQRNFYEPQIITTDNTFVSGNCDVVIGIVNNTVYDPLQPELDSFKEELDKYFKNHTSPDVDLGDISGINASVVNIQKEIDRLNEVAKNLNESLIDLQELGKYEQYIKGGGGSDIDPYKEFGSSYQLLNFLPLDFFPDLNALVDTATALYEEELTGREHCSPHHTAIRQALVCWDELTKLIAWMSSNITSEQVRTIIVNHVNDTWGLKVRQSLWFHLSCLTFGQHTVQEFLVSFGVWIRTPAPYRPPNAPILSTLPEHTVIC

SEQ ID NO: 6661 - protein, 1365 aa, Artificial Sequence
  SARS-CoV-2/Belgium/BA-02291/2020__EPI_ISL_415159 spike protein (1-1211) WhcAg construct
MFVFLVLLPLVSSQCVNLTTRTQLPPAYTNSFTRGVYYPDKVFRSSVLHSTQDLFLPFFSNVTWFHAIHVSGTNGTKRFDNPVLPFNDGVYFASTEKSNIIRGWIFGTTLDSKTQSLLIVNNATNVVIKVCEFQFCNDPFLGVYYHKNNKSWMESEFRVYSSANNCTFEYVSQPFLMDLEGKQGNFKNLREFVFKNIDGYFKIYSKHTPINLVRDLPQGFSALEPLVDLPIGINITRFQTLLALHRSYLTPGDSSSGWTAGAAAYYVGYLQPRTFLLKYNENGTITDAVDCALDPLSETKCTLKSFTVEKGIYQTSNFRVQPTESIVRFPNITNLCPFGEVFNATRFASVYAWNRKRISNCVADYSVLYNSASFSTFKCYGVSPTKLNDLCFTNVYADSFVIRGDEVRQIAPGQTGKIADYNYKLPDDFTGCVIAWNSNNLDSKVGGNYNYLYRLFRRSNLKPFERDISTEIYQAGSTPCNGVEGFNCYFPLQSYGFQPTNGVGYQPYRVVVLSFELLPAPATVCGPKKSTNLVKNKCVNFNFNGLTGTGVLTESNKKFLPFQQFGRDIADTTDAVRDPQTLEILDITPCSFGGVSVITPGTNTSNQVAVLYQGVNCTEVPVAIHADQLTPTWRVYSTGSNVFQTRAGCLIGAEHVNNSYECDIPIGAGICASYQTQTNSPRRARSVASQSIIAYTMSLGAENSVAYSNNSIAIPTNFTISVTTEILPVSMTKTSVDCTMYICGDSTECSNLLLQYGSFCTQLNRALTGIAVEQDKNTQEVFAQVKQIYKTPPIKDFGGFNFSQILPDPSKPSKRSFIEDLLFNKVTLADAGFIKQYGDCLGDIAARDLICAQKFNGLTVLPPLLTDEMIAQYTSALLAGTITSGWTFGAGAALQIPFAMQMAYRFNGIGVTQNVLYENQKLIANQFNSAIGKIQDSLSSAAPALGKLQDVVNQNAQALNTLVKQLSSNFGAISSVLNDILSRLDKVEAEVQIDRLITGRLQSLQTYVTQQLIRAAEIRASANLAATKMSECVLGQSKRVDFCGKGYHLMSFPQSAPHGVVFLHVTYVPAQEKNFTTAPAICHDGKAHFPREGVFVSNGTHWFVTQRNFYEPQIITTDNTFVSGNCDVVIGIVNNTVYDPLQPELDSFKEELDKYFKNHTSPDVDLGDISGINASVVNIQKEIDRLNEVAKNLNESLIDLQELGKYEQYIKGGGGSDIDPYKEFGSSYQLLNFLPLDFFPDLNALVDTATALYEEELTGREHCSPHHTAIRQALVCWDELTKLIAWMSSNITSEQVRTIIVNHVNDTWGLKVRQSLWFHLSCLTFGQHTVQEFLVSFGVWIRTPAPYRPPNAPILSTLPEHTVIC

SEQ ID NO: 6662 - protein, 1365 aa, Artificial Sequence
  SARS-CoV-2/USA/WA8-UW5/2020__EPI_ISL_413486 spike protein (1-1211) WhcAg construct
MFVFLVLLPLVSSQCVNLTTRTQLPPAYTNSFTRGVYYPDKVFRSSVLHSTQDLFLPFFSNVTWFHAIHVSGTNGTKRFDNPVLPFNDGVYFASTEKSNIIRGWIFGTTLDSKTQSLLIVNNATNVVIKVCEFQFCNDPFLGVYYHKNNKSWMESEFRVYSSANNCTFEYVSQPFLMDLEGKQGNFKNLREFVFKNIDGYFKIYSKHTPINLVRDLPQGFSALEPLVDLPIGINITRFQTLLALHRSYLTPGDSSSGWTAGAAAYYVGYLQPRTFLLKYNENGTITDAVDCALDPLSETKCTLKSFTVEKGIYQTSNFRVQPTESIVRFPNITNLCPFGEVFNATRFASVYAWNRKRISNCVADYSVLYNSASFSTFKCYGVSPTKLNDLCFTNVYADSFVIRGDEVRQIAPGQTGKIADYNYKLPDDFTGCVIAWNSNNLDSKVGGNYNYLYRLFRKSNLKPFERDISTEIYQAGSTPCNGVEGFNCYFPLQSYGFQPTNGVGYQPYRVVVLSFELLHAPATVCGPKKSTNLVKNKCVNFNFNGLTGTGVLTESNKKFLPFQQFGRDIADTTDAVRDPQTLEILDITPCSFGGVSVITPGTNTSNQVAVLYQDVNCTEVPVAIHADQLTPTWRVYSTGSNVFQTRAGCLIGAEYVNNSYECDIPIGAGICASYQTQTNSPRRARSVASQSIIAYTMSLGAENSVAYSNNSIAIPTNFTISVTTEILPVSMTKTSVDCTMYICGDSTECSNLLLQYGSFCTQLNRALTGIAVEQDKNTQEVFAQVKQIYKTPPIKDFGGFNFSQILPDPSKPSKRSFIEDLLFNKVTLADAGFIKQYGDCLGDIAARDLICAQKFNGLTVLPPLLTDEMIAQYTSALLAGTITSGWTFGAGAALQIPFAMQMAYRFNGIGVTQNVLYENQKLIANQFNSAIGKIQDSLSSTASALGKLQDVVNQNAQALNTLVKQLSSNFGAISSVLNDILSRLDKVEAEVQIDRLITGRLQSLQTYVTQQLIRAAEIRASANLAATKMSECVLGQSKRVDFCGKGYHLMSFPQSAPHGVVFLHVTYVPAQEKNFTTAPAICHDGKAHFPREGVFVSNGTHWFVTQRNFYEPQIITTDNTFVSGNCDVVIGIVNNTVYDPLQPELDSFKEELDKYFKNHTSPDVDLGDISGINASVVNIQKEIDRLNEVAKNLNESLIDLQELGKYEQYIKGGGGSDIDPYKEFGSSYQLLNFLPLDFFPDLNALVDTATALYEEELTGREHCSPHHTAIRQALVCWDELTKLIAWMSSNITSEQVRTIIVNHVNDTWGLKVRQSLWFHLSCLTFGQHTVQEFLVSFGVWIRTPAPYRPPNAPILSTLPEHTVIC

SEQ ID NO: 6663 - protein, 1365 aa, Artificial Sequence
  SARS-CoV-2/England/20102000506/2020__EPI_ISL_415147 spike protein (1-1211) WhcAg construct
MFVFLVLLPLVSSQCVNLTTRTQLPPAYTNSFTRGVYYPDKVFRSSVLHSTQDLFLPFFSNVTWFHAIHVSGTNGTKRFDNPVLPFNDGVYFASTEKSNIIRGWIFGTTLDSKTQSLLIVNNATNVVIKVCEFQFCNDPFLGVYYHKNNKSWMESEFRVYSSANNCTFEYVSQPFLMDLEGKQGNFKNLREFVFKNIDGYFKIYSKHTPINLVRDLPQGFSALEPLVDLPIGINITRFQTLLALHRSYLTPGDSSSGWTAGAAAYYVGYLQPRTFLLKYNENGTITDAVDCALDPLSETKCTLKSFTVEKGIYQTSNFRVQPTESIVRFPNITNLCPFGEVFNATRFASVYAWNRKRISNCVADYSVLYNSASFSTFKCYGVSPTKLNDLCFTNVYADSFVIRGDEVRQIAPGQTGKIADYNYKLPDDFTGCVIAWNSNNLDSKVGGNYNYLYRLFRKSNLKPFERDISTEIYQAGSTPCNGVEGFNCYFPLQSYGFQPTNGVGYQPYRVVVLSFELLHAPATVCGPKKSTNLVKNKCVNFNFNGLTGTGVLTESNKKFLPFQQFGRDIADTTDAVRDPQTLEILDITPCSFGGVSVITPGTNTSNQVAVLYQGVNCTEVPVAIHADQLTPTWRVYSTGSNVFQTRAGCLIGAEHVNNSYECDIPIGAGICASYQTQTNSPRRARSVASQSIIAYTMSLGAENSVAYSNNSIAIPTNFTISVTTEILPVSMTKTSVDCTMYICGDSTECSNLLLQYGSFCTQLNRALTGIAVEQDKNTQEVFAQVKQIYKTPPIKDFGGFNFSQILPDPSKPSKRSFIEDLLFNKVTLADAGFIKQYGYCLGDIAARDLICAQKFNGLTVLPPLLTDEMIAQYTSALLAGTITSGWTFGAGAALQIPFAMQMAYRFNGIGVTQNVLYENQKLIANQFNSAIGKIQDSLSSTASALGKLQDVVNQNAQALNTLVKQLSSNFGAISSVLNDILSRLDKVEAEVQIDRLITGRLQSLQTYVTQQLIRAAEIRASANLAATKMSECVLGQSKRVDFCGKGYHLMSFPQSAPHGVVFLHVTYVPAQEKNFTTAPAICHDGKAHFPREGVFVSNGTHWFVTQRNFYEPQIITTDNTFVSGNCDVVIGIVNNTVYDPLQPELDSFKEELDKYFKNHTSPDVDLGDISGINASVVNIQKEIDRLNEVAKNLNESLIDLQELGKYEQYIKGGGGSDIDPYKEFGSSYQLLNFLPLDFFPDLNALVDTATALYEEELTGREHCSPHHTAIRQALVCWDELTKLIAWMSSNITSEQVRTIIVNHVNDTWGLKVRQSLWFHLSCLTFGQHTVQEFLVSFGVWIRTPAPYRPPNAPILSTLPEHTVIC

SEQ ID NO: 6664 - protein, 1365 aa, Artificial Sequence
  SARS-CoV-2/Belgium/VAG-03013/2020__EPI_ISL_415155 spike protein (1-1211) WhcAg construct
MFVFLVLLPLVSSQCVNLTTRTQLPPAYTNSFTRGVYYPDKVFRSSVLHSTQDLFLPFFSNVTWFHAIHVSGTNGTKRFDNPVLPFNDGVYFASTEKSNIIRGWIFGTTLDSKTQSLLIVNNATNVVIKVCEFQFCNDPFLGVYYHKNNKSWMESEFRVYSSANNCTFEYVSQPFLMDLEGKQGNFKNLREFVFKNIDGYFKIYSKHTPINLVRDLPQGFSALEPLVDLPIGINITRFQTLLALHRSYLTPGDSSSGWTAGAAAYYVGYLQPRTFLLKYNENGTITDAVDCALDPLSETKCTLKSFTVEKGIYQTSNFRVQPTESIVRFPNITNLCPFGEVFNATRFASVYAWNRKRISNCVADYSVLYNSASFSTFKCYGVSPTKLNDLCFTNVYADSFVIRGDEVRQIAPGQTGKIADYNYKLPDDFTGCVIAWNSNNLDSKVGGNYNYLYRLFRKSNLKPFERDISTEIYQAGSTPCNGVEGFNCYFPLQSYGFQPTNGVGYQPYRVVVLSFELLHAPATVCGPKKSTNLVKNKCVNFNFNGLTGTGVLTESNKKFLPFQQFGRDIADTTDAVRDPQTLEILDITPCSFGGVSVITPGTNTSNQVAVLYQGVNCTEVPVAIHADQLTPTWRVYSTGSNVFQTRAGCLIGAEHVNNSYECDIPIGAGICASYQTQTNSPRRARSVASQSIIAYTMSLGAENSVAYSNNSIAIPTNFTISVTTEILPVSMTKTSVDCTMYICGDSTECSNLLLQYGSFCTQLNRALTGIAVEQDKNTQEVFAQVKQIYKTPPIKDFGGFNFSQILPDPSKPSKRSFIEDLLFNKVTLADAGFIKQYGDCLGDIAARDLICAQKFNGLTVLPPLLTDEMIAQYTSALLAGTITSGWTFGAGAALQIPFAMQMAYRFNGIGVTQNVLYENQKLIANQFNSAIGKIQDSLSSTATALGKLQDVVNQNAQALNTLVKQLSSNFGAISSVLNDILSRLDKVEAEVQIDRLITGRLQSLQTYVTQQLIRAAEIRASANLAATKMSECVLGQSKRVDFCGKGYHLMSFPQSAPHGVVFLHVTYVPAQEKNFTTAPAICHDGKAHFPREGVFVSNGTHWFVTQRNFYEPQIITTDNTFVSGNCDVVIGIVNNTVYDPLQPELDSFKEELDKYFKNHTSPDVDLGDISGINASVVNIQKEIDRLNEVAKNLNESLIDLQELGKYEQYIKGGGGSDIDPYKEFGSSYQLLNFLPLDFFPDLNALVDTATALYEEELTGREHCSPHHTAIRQALVCWDELTKLIAWMSSNITSEQVRTIIVNHVNDTWGLKVRQSLWFHLSCLTFGQHTVQEFLVSFGVWIRTPAPYRPPNAPILSTLPEHTVIC

SEQ ID NO: 6665 - protein, 1365 aa, Artificial Sequence
  SARS-CoV-2/Belgium/BC-03016/2020__EPI_ISL_415157 spike protein (1-1211) WhcAg construct
MFVFLVLLPLVSSQCVNLTTRTQLPPAYTNSFTRGVYYPDKVFRSSVLHSTQDLFLPFFSNVTWFHAIHVSGTNGTKRFDNPVLPFNDGVYFASTEKSNIIRGWIFGTTLDSKTQSLLIVNNATNVVIKVCEFQFCNDPFLGVYYHKNNKSWMESEFRVYSSANNCTFEYVSQPFLMDLEGKQGNFKNLREFVFKNIDGYFKIYSKHTPINLVRDLPQGFSALEPLVDLPIGINITRFQTLLALHRSYLTPGDSSSGWTAGAAAYYVGYLQPRTFLLKYNENGTITDAVDCALDPLSETKCTLKSFTVEKGIYQTSNFRVQPTESIVRFPNITNLCPFGEVFNATRFASVYAWNRKRISNCVADYSVLYNSASFSTFKCYGVSPTKLNDLCFTNVYADSFVIRGDEVRQIAPGQTGKIADYNYKLPDDFTGCVIAWNSNNLDSKVGGNYNYLYRLFRKSNLKPFERDISTEIYQAGSTPCNGVEGFNCYFPLQSYGFQPTNGVGYQPYRVVVLSFELLHAPATVCGPKKSTNLVKNKCVNFNFNGLTGTGVLTESNKKFLPFQQFGRDIADTTDAVRDPQTLEILDITPCSFGGVSVITPGTNTSNQVAVLYQGVNCTEVPVAIHADQLTPTWRVYSTGSNVFQTRAGCLIGAEHVNNSYECDIPIGAGICASYQTQTNSPRRARSVASQSIIAYTMSLGAENSVAYSNNSIAIPTNFTISVTTEILPVSMTKTSVDCTMYICGDSTECSNLLLQYGSFCTQLNRALTGIAVEQDKNTQEVFAQVKQIYKTPPIKDFGGFNFSQILPDPSKPSKRSFIEDLLFNKVTLADAGFIKQYGDCLGDIAARDLICAQKFNGLTVLPPLLTDEMIAQYTSALLAGTITSGWTFGAGAALQIPFAMQMAYRFNGIGVTQNVLYENQKLIANQFNSAIGKIQDSLSSTAPALGKLQDVVNQNAQALNTLVKQLSSNFGAISSVLNDILSRLDKVEAEVQIDRLITGRLQSLQTYVTQQLIRAAEIRASANLAATKMSECVLGQSKRVDFCGKGYHLMSFPQSAPHGVVFLHVTYVPAQEKNFTTAPAICHDGKAHFPREGVFVSNGTHWFVTQRNFYEPQIITTDNTFVSGNCDVVIGIVNNTVYDPLQPELDSFKEELDKYFKNHTSPDVDLGDISGINASVVNIQKEIDRLNEVAKNLNESLIDLQELGKYEQYIKGGGGSDIDPYKEFGSSYQLLNFLPLDFFPDLNALVDTATALYEEELTGREHCSPHHTAIRQALVCWDELTKLIAWMSSNITSEQVRTIIVNHVNDTWGLKVRQSLWFHLSCLTFGQHTVQEFLVSFGVWIRTPAPYRPPNAPILSTLPEHTVIC

SEQ ID NO: 6666 - protein, 1365 aa, Artificial Sequence
  SARS-CoV-2/Germany/BavPat3/2020__EPI_ISL_414521 spike protein (1-1211) WhcAg construct
MFVFLVLLPLVSSQCVNLTTRTQLPPAYTNSFTRGVYYPDKVFRSSVLHSTQDLFLPFFSNVTWFHAIHVSGTNGTKRFDNPVLPFNDGVYFASTEKSNIIRGWIFGTTLDSKTQSLLIVNNATNVVIKVCEFQFCNDPFLGVYYHKNNKSWMESEFRVYSSANNCTFEYVSQPFLMDLEGKQGNFKNLREFVFKNIDGYFKIYSKHTPINLVRDLPQGFSALEPLVDLPIGINITRFQTLLALHRSYLTPGDSSSGWTAGAAAYYVGYLQPRTFLLKYNENGTITDAVDCALDPLSETKCTLKSFTVEKGIYQTSNFRVQPTESIVRFPNITNLCPFGEVFNATRFASVYAWNRKRISNCVADYSVLYNSASFSTFKCYGVSPTKLNDLCFTNVYADSFVIRGDEVRQIAPGQTGKIADYNYKLPDDFTGCVIAWNSNNLDSKVGGNYNYLYRLFRKSNLKPFERDISTEIYQAGSTPCNGVEGFNCYFPLQSYGFQPTNGVGYQPYRVVVLSFELLHAPATVCGPKKSTNLVKNKCVNFNFNGLTGTGVLTESNKKFLPFQQFGRDIADTTDAVRDPQTLEILDITPCSFGGVSVITPGTNTSNQVAVLYQDVNCTEVPVAIHADQLTPTWRVYSTGSNVFQTRAGCLIGAEHVNNSYECDIPIGAGICASYQTQTNSPRRARSVASQSIIAYTMSLGAENSVAYSNNSIAIPTNFTISVTTEILPVSMTKTSVDCTMYICGDSTECSNLLLQYGSFCTQLNRALTGIAVEQDKNTQQVFAQVKQIYKTPPIKDFGGFNFSQILPDPSKPSKRSFIEDLLFNKVTLADAGFIKQYGDCLGDIAARDLICAQKFNGLTVLPPLLTDEMIAQYTSALLAGTITSGWTFGAGAALQIPFAMQMAYRFNGIGVTQNVLYENQKLIANQFNSAIGKIQDSLSSTASALGKLQDVVNQNAQALNTLVKQLSSNFGAISSVLNDILSRLDKVEAEVQIDRLITGRLQSLQTYVTQQLIRAAEIRASANLAATKMSECVLGQSKRVDFCGKGYHLMSFPQSAPHGVVFLHVTYVPAQEKNFTTAPAICHDGKAHFPREGVFVSNGTHWFVTQRNFYEPQIITTDNTFVSGNCDVVIGIVNNTVYDPLQPELDSFKEELDKYFKNHTSPDVDLGDISGINASVVNIQKEIDRLNEVAKNLNESLIDLQELGKYEQYIKGGGGSDIDPYKEFGSSYQLLNFLPLDFFPDLNALVDTATALYEEELTGREHCSPHHTAIRQALVCWDELTKLIAWMSSNITSEQVRTIIVNHVNDTWGLKVRQSLWFHLSCLTFGQHTVQEFLVSFGVWIRTPAPYRPPNAPILSTLPEHTVIC

SEQ ID NO: 6667 - protein, 1365 aa, Artificial Sequence
  SARS-CoV-2/France/HF1805/2020__EPI_ISL_414628 spike protein (1-1211) WhcAg construct
MFVFLVLLPLVSSQCVNLTTRTQLPPAYTNSFTRGVYYPDKVFRSSVLHSTQDLFLPFFSNVTWFHAIHVSGTNGTKRFDNPVLPFNDGVYFASTEKSNIIRGWIFGTTLDSKTQSLLIVNNATNVVIKVCEFQFCNDPFLGVYYHKNNKSWMESEFRVYSSANNCTFEYVSQPFLMDLEGKQGNFKNLREFVFKNIDGYFKIYSKHTPINLVRDLPQGFSALEPLVDLPIGINITRFQTLLALHRSYLTPGDSSSGWTAGAAAYYVGYLQPRTFLLKYNENGTITDAVDCALDPLSETKCTLKSFTVEKGIYQTSNFRVQPTESIVRFPNITNLCPFGEVFNATRFASVYAWNRKRISNCVADYSVLYNSASFSTFKCYGVSPTKLNDLCFTNVYADSFVIRGDEVRQIAPGQTGKIADYNYKLPDDFTGCVIAWNSNNLDSKVGGNYNYLYRLFRKSNLKPFERDISTEIYQAGSTPCNGVEGFNCYFPLQSYGFQPTNGVGYQPYRVVVLSFELLHAPATVCGPKKSTNLVKNKCVNFNFNGLTGTGVLTESNKKFLPFQQFGRDIADTTDAVRDPQTLEILDITPCSFGGVSVITPGTNTSNQVAVLYQGVNCTEVPVAIHADQLTPTWRVYSTGSNVFQTRAGCLIGAEHVNNSYECDIPIGAGICASYQTQTNSPRRARSVASQSIIAYTMSLGAENSVAYSNNSIAIPTNFTISVTTEILPVSMTKTSVDCTMYICGDSTECSNLLLQYGSFCTQLNRALTGIAVEQDKNTQEVFAQVKQIYKTPPIKDFGGFNFSQILPDPSKPSKRSFIEDLLFNKVTLADAGFIKQYGDCLGDIAARDLICAQKFNGLTVLPPLLTDEMIAQYTSALLAGTITSGWTFGAGAALQIPFAMQMAYRFNGIGVTQNVLYENQKLIANQFNSAIGKIQDSLSSTASALGKLQDVVNQNAQALNTLVKQLSSNFGAISSVLNDILSRLDKVEAEVQIDRLITGRLQSLQTYVTQQLIRAAEIRASANLAATKMSECVLGQSKRVDFCGKGYHLMSFPQSAPHGVVFLHVTYVPAQEKNFTTAPAICHDGKAHFPREGVFVSNGTHWFVTQRNFYEPQIITTDNTFVSGNCDVVIGVVNNTVYDPLQPELDSFKEELDKYFKNHTSPDVDLGDISGINASVVNIQKEIDRLNEVAKNLNESLIDLQELGKYEQYIKGGGGSDIDPYKEFGSSYQLLNFLPLDFFPDLNALVDTATALYEEELTGREHCSPHHTAIRQALVCWDELTKLIAWMSSNITSEQVRTIIVNHVNDTWGLKVRQSLWFHLSCLTFGQHTVQEFLVSFGVWIRTPAPYRPPNAPILSTLPEHTVIC

SEQ ID NO: 6668 - protein, 1365 aa, Artificial Sequence
  SARS-CoV-2/Netherlands/ZuidHolland_9/2020__EPI_ISL_414445 spike protein (1-1211) WhcAg construct
MFVFLVLLPLVSSQCVNLTTRTQLPPAYTNSFTRGVYYPDKVFRSSVLHSTQDLFLPFFSNVTWFHAIHVSGTNGTKRFDNPVLPFNDGVYFASTEKSNIIRGWIFGTTLDSKTQSLLIVNNATNVVIKVCEFQFCNDPFLGVYYHKNNKSWMESEFRVYSSANNCTFEYVSQPFLMDLEGKQGNFKNLREFVFKNIDGYFKIYSKHTPINLVRDLPQGFSALEPLVDLPIGINITRFQTLLALHRSYLTPGDSSSGWTAGAAAYYVGYLQPRTFLLKYNENGTITDAVDCALDPLSETKCTLKSFTVEKGIYQTSNFRVQPTESIVRFPNITNLCPFGEVFNATRFASVYAWNRKRISNCVADYSVLYNSASFSTFKCYGVSPTKLNDLCFTNVYADSFVIRGDEVRQIAPGQTGKIADYNYKLPDDFTGCVIAWNSNNLDSKVGGNYNYLYRLFRKSNLKPFERDISTEIYQAGSTPCNGVEGFNCYFPLQSYGFQPTNGVGYQPYRVVVLSFELLHAPATVCGPKKSTNLVKNKCVNFNFNGLTGTGVLTESNKKFLPFQQFGRDIADTTDAVRDPQTLEILDITPCSFGGVSVITPGTNTSNQVAVLYQGVNCTEVPVAIHADQLTPTWRVYSTGSNVFQTRAGCLIGAEHVNNSYECDIPIGAGICASYQTQTNSPRRARSVASQSIIAYTMSLGAENSVAYSNNSIAIPTNFTISVTTEILPVSMTKTSVDCTMYICGDSTECSNLLLQYGSFCTQLNRALTGIAVEQDKNTQEVFAQVKQIYKTPPIKDFGGFNFSQILPDPSKPSKRSFIEDLLFNKVTLADAGFIKQYGDCLGDIAARDLICVQKFNGLTVLPPLLTDEMIAQYTSALLAGTITSGWTFGAGAALQIPFAMQMAYRFNGIGVTQNVLYENQKLIANQFNSAIGKIQDSLSSTASALGKLQDVVNQNAQALNTLVKQLSSNFGAISSVLNDILSRLDKVEAEVQIDRLITGRLQSLQTYVTQQLIRAAEIRASANLAATKMSECVLGQSKRVDFCGKGYHLMSFPQSAPHGVVFLHVTYVPAQEKNFTTAPAICHDGKAHFPREGVFVSNGTHWFVTQRNFYEPQIITTDNTFVSGNCDVVIGIVNNTVYDPLQPELDSFKEELDKYFKNHTSPDVDLGDISGINASVVNIQKEIDRLNEVAKNLNESLIDLQELGKYEQYIKGGGGSDIDPYKEFGSSYQLLNFLPLDFFPDLNALVDTATALYEEELTGREHCSPHHTAIRQALVCWDELTKLIAWMSSNITSEQVRTIIVNHVNDTWGLKVRQSLWFHLSCLTFGQHTVQEFLVSFGVWIRTPAPYRPPNAPILSTLPEHTVIC

SEQ ID NO: 6669 - protein, 1365 aa, Artificial Sequence
  SARS-CoV-2/Finland/FIN03032020A/2020__EPI_ISL_413602 spike protein (1-1211) WhcAg construct
MFVFLVLLPLVSSQCVNLTTRTQLPPAYTNSFTRGVYYPDKVFRSSVLHSTQDLFLPFFSNVTWFHAIHVSGTNGTKRFDNPVLPFNDGVYFASTEKSNIIRGWIFGTTLDSKTQSLLIVNNATNVVIKVCEFQFCNDPFLGVYYHKNNKSWMESEFRVYSSANNCTFEYVSQPFLMDLEGKQGNFKNLREFVFKNIDGYFKIYSKHTPINLVRDLPQGFSALEPLVDLPIGINITRFQTLLALHRSYLTPGDSSSGWTAGAAAYYVGYLQPRTFLLKYNENGTITDAVDCALDPLSETKCTLKSFTVEKGIYQTSNFRVQPTESIVRFPNITNLCPFGEVFNATRFASVYAWNRKRISNCVADYSVLYNSASFSTFKCYGVSPTKLNDLCFTNVYADSFVIRGDEVRQIAPGQTGKIADYNYKLPDDFTGCVISWNSNNLDSKVGGNYNYLYRLFRKSNLKPFERDISTEIYQAGSTPCNGVEGFNCYFPLQSYGFQPTNGVGYQPYRVVVLSFELLHAPATVCGPKKSTNLVKNKCVNFNFNGLTGTGVLTESNKKFLPFQQFGRDIADTTDAVRDPQTLEILDITPCSFGGVSVITPGTNTSNQVAVLYQGVNCTEVPVAIHADQLTPTWRVYSTGSNVFQTRAGCLIGAEHVNNSYECDIPIGAGICASYQTQTNSPRRARSVASQSIIAYTMSLGAENSVAYSNNSIAIPTNFTISVTTEILPVSMTKTSVDCTMYICGDSTECSNLLLQYGSFCTQLNRALTGIAVEQDKNTQEVFAQVKQIYKTPPIKDFGGFNFSQILPDPSKPSKRSFIEDLLFNKVTLADAGFIKQYGDCLGDIAARDLICAQKFNGLTVLPPLLTDEMIAQYTSALLAGTITSGWTFGAGAALQIPFAMQMAYRFNGIGVTQNVLYENQKLIANQFNSAIGKIQDSLSSTASALGKLQDVVNQNAQALNTLVKQLSSNFGAISSVLNDILSRLDKVEAEVQIDRLITGRLQSLQTYVTQQLIRAAEIRASANLAATKMSECVLGQSKRVDFCGKGYHLMSFPQSAPHGVVFLHVTYVPAQEKNFTTAPAICHDGKAHFPREGVFVSNGTHWFVTQRNFYEPQIITTDNTFVSGNCDVVIGIVNNTVYDPLQPELDSFKEELDKYFKNHTSPDVDLGDISGINASVVNIQKEIDRLNEVAKNLNESLIDLQELGKYEQYIKGGGGSDIDPYKEFGSSYQLLNFLPLDFFPDLNALVDTATALYEEELTGREHCSPHHTAIRQALVCWDELTKLIAWMSSNITSEQVRTIIVNHVNDTWGLKVRQSLWFHLSCLTFGQHTVQEFLVSFGVWIRTPAPYRPPNAPILSTLPEHTVIC

SEQ ID NO: 6670 - protein, 1365 aa, Artificial Sequence
  SARS-CoV-2/France/GE1977/2020__EPI_ISL_414632 spike protein (1-1211) WhcAg construct
MFVFLVLLPLVSSQCVNLTTRTQLPPAYTNSFTRGVYYPDKVFRSSVLHSTQDLFLPFFSNVTWFHAIHVSGTNGTKRFDNPVLPFNDGVYFASTEKSNIIRGWIFGTTLDSKTQSLLIVNNATNVVIKVCEFQFCNDPFLGVYYHKNNKSWMESEFRVYSSANNCTFEYVSQPFLMDLEGKQGNFKNLREFVFKNIDGYFKIYSKHTPINLVRDLPQGFSALEPLVDLPIGINITRFQTLLALHRSYLTPGDSSSGWTAGAAAYYVGYLQPRTFLLKYNENGTITDAVDCALDPLSETKCTLKSFTVEKGIYQTSNFRVQPTESIVRFPNITNLCPFGEVFNATRFASVYAWNRKRISNCVADYSVLYNSASFSTFKCYGVSPTKLNDLCFTNVYADSFVIRGDEVRQIAPGQTGKIADYNYKLPDDFTGCVIAWNSNNLDSKVGGNYNYLYRLFRKSNLKPFERDISTEIYQAGSTPCNGVEGFNCYFPLQSYGFQPTNGVGYQPYRVVVLSFELLHAPATVCGPKKSTNLVKNKCVNFNFNGLTGTGVLTESNKKFLPFQQFGRDIADTTDAVRDPQTLEILDITPCSFGGVSVITPGTNTSNQVAVLYQGVNCTEVPVAIHADQLTPTWRVYSTGSNVFQTRAGCLIGAEHVNNSYECDIPIGAGICASYQTQTNSPRRARSVASQSIIAYTMSLGAENSVAYSNNSIAIPTNFTISVTTEILPVSMTKTSVDCTMYICGDSTECSNLLLQYGSFCTQLNRALTGIAVEQDKNTQEVFAQVKQIYKTPPIKDFGGFNFSQILPDPSKPSKRSFIEDLLFNKVTLADAGFIKQYGDCLGDIAARDLICAQKFNGLTVLPPLLTDEMIAQYTSALLAGTITSGWTFGAGAALQIPFAMQMAYRFNGIGVTQNVLYENQKLIANQFNSAIGKIQDSLFSTASALGKLQDVVNQNAQALNTLVKQLSSNFGAISSVLNDILSRLDKVEAEVQIDRLITGRLQSLQTYVTQQLIRAAEIRASANLAATKMSECVLGQSKRVDFCGKGYHLMSFPQSAPHGVVFLHVTYVPAQEKNFTTAPAICHDGKAHFPREGVFVSNGTHWFVTQRNFYEPQIITTDNTFVSGNCDVVIGIVNNTVYDPLQPELDSFKEELDKYFKNHTSPDVDLGDISGINASVVNIQKEIDRLNEVAKNLNESLIDLQELGKYEQYIKGGGGSDIDPYKEFGSSYQLLNFLPLDFFPDLNALVDTATALYEEELTGREHCSPHHTAIRQALVCWDELTKLIAWMSSNITSEQVRTIIVNHVNDTWGLKVRQSLWFHLSCLTFGQHTVQEFLVSFGVWIRTPAPYRPPNAPILSTLPEHTVIC

SEQ ID NO: 6671 - protein, 1365 aa, Artificial Sequence
  SARS-CoV-2/Finland/FIN-313/2020__EPI_ISL_414641 spike protein (1-1211) WhcAg construct
MFVFLVLLPLVSSQCVNLTTRTQLPPAYTNSFTRGVYYPDKVFRSSVLHSTQDLFLPFFSNVTWFHAIHVSGTNGTKRFDNPVLPFNDGVYFASTEKSNIIRGWIFGTTLDSKTQSLLIVNNATNVVIKVCEFQFCNDPFLGVYYHKNNKSWMESEFRVYSSANNCTFEYVSQPFLMDLEGKQGNFKNLREFVFKNIDGYFKIYSKHTPINLVRDLPQGFSALEPLVDLPIGINITRFKTLLALHRSYLTPGDSSSGWTAGAAAYYVGYLQPRTFLLKYNENGTITDAVDCALDPLSETKCTLKSFTVEKGIYQTSNFRVQPTESIVRFPNITNLCPFGEVFNATRFASVYAWNRKRISNCVADYSVLYNSASFSTFKCYGVSPTKLNDLCFTNVYADSFVIRGDEVRQIAPGQTGKIADYNYKLPDDFTGCVIAWNSNNLDSKVGGNYNYLYRLFRKSNLKPFERDISTEIYQAGSTPCNGVEGFNCYFPLQSYGFQPTNGVGYQPYRVVVLSFELLHAPATVCGPKKSTNLVKNKCVNFNFNGLTGTGVLTESNKKFLPFQQFGRDIADTTDAVRDPQTLEILDITPCSFGGVSVITPGTNTSNQVAVLYQGVNCTEVPVAIHADQLTPTWRVYSTGSNVFQTRAGCLIGAEHVNNSYECDIPIGAGICASYQTQTNSPRRARSVASQSIIAYTMSLGAENSVAYSNNSIAIPTNFTISVTTEILPVSMTKTSVDCTMYICGDSTECSNLLLQYGSFCTQLNRALTGIAVEQDKNTQEVFAQVKQIYKTPPIKDFGGFNFSQILPDPSKPSKRSFIEDLLFNKVTLADAGFIKQYGDCLGDIAARDLICAQKFNGLTVLPPLLTDEMIAQYTSALLAGTITSGWTFGAGAALQIPFAMQMAYRFNGIGVTQNVLYENQKLIANQFNSAIGKIQDSLSSTASALGKLQDVVNQNAQALNTLVKQLSSNFGAISSVLNDILSRLDKVEAEVQIDRLITGRLQSLQTYVTQQLIRAAEIRASANLAATKMSECVLGQSKRVDFCGKGYHLMSFPQSAPHGVVFLHVTYVPAQEKNFTTAPAICHDGKAHFPREGVFVSNGTHWFVTQRNFYEPQIITTDNTFVSGNCDVVIGIVNNTVYDPLQPELDSFKEELDKYFKNHTSPDVDLGDISGINASVVNIQKEIDRLNEVAKNLNESLIDLQELGKYEQYIKGGGGSDIDPYKEFGSSYQLLNFLPLDFFPDLNALVDTATALYEEELTGREHCSPHHTAIRQALVCWDELTKLIAWMSSNITSEQVRTIIVNHVNDTWGLKVRQSLWFHLSCLTFGQHTVQEFLVSFGVWIRTPAPYRPPNAPILSTLPEHTVIC

SEQ ID NO: 6672 - protein, 1365 aa, Artificial Sequence
  SARS-CoV-2/Netherlands/ZuidHolland_2/2020__EPI_ISL_414556 spike protein (1-1211) WhcAg construct
MFVFLVLLPLVSSQCVNLTTRTQLPPAYTNSFTRGVYYPDKVFRSSVLHSTQDLFLPFFSNVTWFHAIHVSGTNGTKRFDNPVLPFNDGVYFASTEKSNIIRGWIFGTTLDSKTQSLLIVNNATNVVIKVCEFQFCNDPFLGVYYHKNNKSWMESEFRVYSSANNCTFEYVSQPFLMDLEGKQGNFKNLREFVFKNIDGYFKIYSKHTPINLVRDLPQGFSALEPLVDLPIGINITRFQTLLALHRSYLTPGDSSSGWTAGAAAYYVGYLQPRTFLLKYNENGTITDAVDCALDPLSETKCTLKSFTVEKGIYQTSNFRVQPTESIVRFPNITNLCPFGEVFNATRFASVYAWNRKRISNCVADYSVLYNSASFSTFKCYGVSPTKLNDLCFTNVYADSFVIRGDEVRQIAPGQTGKIADYNYKLPDDFTGCVIAWNSNNLDSKVGGNYNYLYRLFRKSNLKPFERDISTEIYQAGSTPCNGVEGFNCYFPLQSYGFQPTNGVGYQPYRVVVLSFELLHAPATVCGPKKSTNLVKNKCVNFNFNGLTGTGVLTESNKKFLPFQQFGRDIADTTDAVRDPQTLEILDITPCSFGGVSVITPGTNTSNQVAVLYQGVNCTEVPVAIHADQLTPTWRVYSTGSNVFQTRAGCLIGAEHVNNSYECDIPIGAGICASYQTQTNSPRRARSVASQSIIAYTMSLGAENSVAYSNNSIAIPTNFTISVTTEILPVSMTKTSVDCTMYICGDSTECSNLLLQYGSFCTQLNRALTGIALEQDKNTQEVFAQVKQIYKTPPIKDFGGFNFSQILPDPSKPSKRSFIEDLLFNKVTLADAGFIKQYGDCLGDIAARDLICAQKFNGLTVLPPLLTDEMIAQYTSALLAGTITSGWTFGAGAALQIPFAMQMAYRFNGIGVTQNVLYENQKLIANQFNSAIGKIQDSLSSTASALGKLQDVVNQNAQALNTLVKQLSSNFGAISSVLNDILSRLDKVEAEVQIDRLITGRLQSLQTYVTQQLIRAAEIRASANLAATKMSECVLGQSKRVDFCGKGYHLMSFPQSAPHGVVFLHVTYVPAQEKNFTTAPAICHDGKAHFPREGVFVSNGTHWFVTQRNFYEPQIITTDNTFVSGNCDVVIGIVNNTVYDPLQPELDSFKEELDKYFKNHTSPDVDLGDISGINASVVNIQKEIDRLNEVAKNLNESLIDLQELGKYEQYIKGGGGSDIDPYKEFGSSYQLLNFLPLDFFPDLNALVDTATALYEEELTGREHCSPHHTAIRQALVCWDELTKLIAWMSSNITSEQVRTIIVNHVNDTWGLKVRQSLWFHLSCLTFGQHTVQEFLVSFGVWIRTPAPYRPPNAPILSTLPEHTVIC

SEQ ID NO: 6673 - protein, 1365 aa, Artificial Sequence
  SARS-CoV-2/USA/WA-UW31/2020__EPI_ISL_414618 spike protein (1-1211) WhcAg construct
MFVFLVLLPLVSSQCVNLTTRTQLPPAYTNSFTRGVYYPDKVFRSSVLHSTQDLFLPFFSNVTWFHAIHVSGTNGTKRFDNPVLPFNDGVYFASTEKSNIIRGWIFGTTLDSKTQSLLIVNNATNVVIKVCEFQFCNDPFLGVYYHKNNKSWMESEFRVYSSANNCTFEYVSQPFLMDLEGKQGNFKNLREFVFKNIDGYFKIYSKHTPINLVRDLPQGFSALEPLVDLPIGINITRFQTLLALHRSYLTPGDSSSGWTAGAAAYYVGYLQPRTFLLKYNENGTITDAVDCALDPLSETKCTLKSFTVEKGIYQTSNFRVQPTESIVRFPNITNLCPFGEVFNATRFASVYAWNRKRISNCVADYSVLYNSASFSTFKCYGVSPTKLNDLCFTNVYADSFVIRGDEVRQIAPGQTGKIADYNYKLPDDFTGCVIAWNSNNLDSKVGGNYNYLYRLFRKSNLKPFERDISTEIYQAGSTPCNGAEGFNCYFPLQSYGFQPTNGVGYQPYRVVVLSFELLHAPATVCGPKKSTNLVKNKCVNFNFNGLTGTGVLTESNKKFLPFQQFGRDIADTTDAVRDPQTLEILDITPCSFGGVSVITPGTNTSNQVAVLYQDVNCTEVPVAIHADQLTPTWRVYSTGSNVFQTRAGCLIGAEHVNNSYECDIPIGAGICASYQTQTNSPRRARSVASQSIIAYTMSLGAENSVAYSNNSIAIPTNFTISVTTEILPVSMTKTSVDCTMYICGDSTECSNLLLQYGSFCTQLNRALTGIAVEQDKNTQEVFAQVKQIYKTPPIKDFGGFNFSQILPDPSKPSKRSFIEDLLFNKVTLADAGFIKQYGDCLGDIAARDLICAQKFNGLTVLPPLLTDEMIAQYTSALLAGTITSGWTFGAGAALQIPFAMQMAYRFNGIGVTQNVLYENQKLIANQFNSAIGKIQDSLSSTASALGKLQDVVNQNAQALNTLVKQLSSNFGAISSVLNDILSRLDKVEAEVQIDRLITGRLQSLQTYVTQQLIRAAEIRASANLAATKMSECVLGQSKRVDFCGKGYHLMSFPQSAPHGVVFLHVTYVPAQEKNFTTAPAICHDGKAHFPREGVFVSNGTHWFVTQRNFYEPQIITTDNTFVSGNCDVVIGIVNNTVYDPLQPELDSFKEELDKYFKNHTSPDVDLGDISGINASVVNIQKEIDRLNEVAKNLNESLIDLQELGKYEQYIKGGGGSDIDPYKEFGSSYQLLNFLPLDFFPDLNALVDTATALYEEELTGREHCSPHHTAIRQALVCWDELTKLIAWMSSNITSEQVRTIIVNHVNDTWGLKVRQSLWFHLSCLTFGQHTVQEFLVSFGVWIRTPAPYRPPNAPILSTLPEHTVIC

SEQ ID NO: 6674 - protein, 1365 aa, Artificial Sequence
  SARS-CoV-2/South Korea/SNU01/2020__EPI_ISL_411929 spike protein (1-1211) WhcAg construct
MFVFLVLLPLVSSQCVNLTTRTQLPPAYTNSFTRGVYYPDKVFRSSVLHSTQDLFLPFFSNVTWFHAIHVSGTNGTKRFDNPVLPFNDGVYFASTEKSNIIRGWIFGTTLDSKTQSLLIVNNATNVVIKVCEFQFCNDPFLGVYYHKNNKSWMESEFRVYSSANNCTFEYVSQPFLMDLEGKQGNFKNLREFVFKNIDGYFKIYSKHTPINLVRDLPQGFWALEPLVDLPIGINITRFQTLLALHRSYLTPGDSSSGWTAGAAAYYVGYLQPRTFLLKYNENGTITDAVDCALDPLSETKCTLKSFTVEKGIYQTSNFRVQPTESIVRFPNITNLCPFGEVFNATRFASVYAWNRKRISNCVADYSVLYNSASFSTFKCYGVSPTKLNDLCFTNVYADSFVIRGDEVRQIAPGQTGKIADYNYKLPDDFTGCVIAWNSNNLDSKVGGNYNYLYRLFRKSNLKPFERDISTEIYQAGSTPCNGVEGFNCYFPLQSYGFQPTNGVGYQPYRVVVLSFELLHAPATVCGPKKSTNLVKNKCVNFNFNGLTGTGVLTESNKKFLPFQQFGRDIADTTDAVRDPQTLEILDITPCSFGGVSVITPGTNTSNQVAVLYQDVNCTEVPVAIHADQLTPTWRVYSTGSNVFQTRAGCLIGAEHVNNSYECDIPIGAGICASYQTQTNSPRRARSVASQSIIAYTMSLGAENSVAYSNNSIAIPTNFTISVTTEILPVSMTKTSVDCTMYICGDSTECSNLLLQYGSFCTQLNRALTGIAVEQDKNTQEVFAQVKQIYKTPPIKDFGGFNFSQILPDPSKPSKRSFIEDLLFNKVTLADAGFIKQYGDCLGDIAARDLICAQKFNGLTVLPPLLTDEMIAQYTSALLAGTITSGWTFGAGAALQIPFAMQMAYRFNGIGVTQNVLYENQKLIANQFNSAIGKIQDSLSSTASALGKLQDVVNQNAQALNTLVKQLSSNFGAISSVLNDILSRLDKVEAEVQIDRLITGRLQSLQTYVTQQLIRAAEIRASANLAATKMSECVLGQSKRVDFCGKGYHLMSFPQSAPHGVVFLHVTYVPAQEKNFTTAPAICHDGKAHFPREGVFVSNGTHWFVTQRNFYEPQIITTDNTFVSGNCDVVIGIVNNTVYDPLQPELDSFKEELDKYFKNHTSPDVDLGDISGINASVVNIQKEIDRLNEVAKNLNESLIDLQELGKYEQYIKGGGGSDIDPYKEFGSSYQLLNFLPLDFFPDLNALVDTATALYEEELTGREHCSPHHTAIRQALVCWDELTKLIAWMSSNITSEQVRTIIVNHVNDTWGLKVRQSLWFHLSCLTFGQHTVQEFLVSFGVWIRTPAPYRPPNAPILSTLPEHTVIC

SEQ ID NO: 6675 - protein, 1365 aa, Artificial Sequence
  SARS-CoV-2/China/WF0004/2020__EPI_ISL_413694 spike protein (1-1211) WhcAg construct
MFVFLVLLPLVSSQCVNLTTRTQLPPAYTNSFTRGVYYPDKVFRSSVLHSTQDLFLPFFSNVTWFHAIHVSGTNGTKRFDNPVLPFNDGVYFASTEKSNIIRGWIFGTTLDSKTQSLLIVNNATNVVIKVCEFQFCNDPFLGVYYHKNNKSWTESEFRVYSSANNCTFEYVSQPFLMDLEGKQGNFKNLREFVFKNIDGYFKIYSKHTPINLVRDLPQGFSALEPLVDLPIGINITRFQTLLALHRSYLTPGDSSSGWTAGAAAYYVGYLQPRTFLLKYNENGTITDAVDCALDPLSETKCTLKSFTVEKGIYQTSNFRVQPTESIVRFPNITNLCPFGEVFNATRFASVYAWNRKRISNCVADYSVLYNSASFSTFKCYGVSPTKLNDLCFTNVYADSFVIRGDEVRQIAPGQTGKIADYNYKLPDDFTGCVIAWNSNNLDSKVGGNYNYLYRLFRKSNLKPFERDISTEIYQAGSTPCNGVEGFNCYFPLQSYGFQPTNGVGYQPYRVVVLSFELLHAPATVCGPKKSTNLVKNKCVNFNFNGLTGTGVLTESNKKFLPFQQFGRDIADTTDAVRDPQTLEILDITPCSFGGVSVITPGTNTSNQVAVLYQDVNCTEVPVAIHADQLTPTWRVYSTGSNVFQTRAGCLIGAEHVNNSYECDIPIGAGICASYQTQTNSPRRARSVASQSIIAYTMSLGAENSVAYSNNSIAIPTNFTISVTTEILPVSMTKTSVDCTMYICGDSTECSNLLLQYGSFCTQLNRALTGIAVEQDKNTQEVFAQVKQIYKTPPIKDFGGFNFSQILPDPSKPSKRSFIEDLLFNKVTLADAGFIKQYGDCLGDIAARDLICAQKFNGLTVLPPLLTDEMIAQYTSALLAGTITSGWTFGAGAALQIPFAMQMAYRFNGIGVTQNVLYENQKLIANQFNSAIGKIQDSLSSTASALGKLQDVVNQNAQALNTLVKQLSSNFGAISSVLNDILSRLDKVEAEVQIDRLITGRLQSLQTYVTQQLIRAAEIRASANLAATKMSECVLGQSKRFDFCGKGYHLMSFPQSAPHGVVFLHVTYVPAQEKNFTTAPAICHDGKAHFPREGVFVSNGTHWFVTQRNFYEPQIITTDNTFVSGNCDVVIGIVNNTVYDPLQPELDSFKEELDKYFKNHTSPDVDLGDISGINASVVNIQKEIDRLNEVAKNLNESLIDLQELGKYEQYIKGGGGSDIDPYKEFGSSYQLLNFLPLDFFPDLNALVDTATALYEEELTGREHCSPHHTAIRQALVCWDELTKLIAWMSSNITSEQVRTIIVNHVNDTWGLKVRQSLWFHLSCLTFGQHTVQEFLVSFGVWIRTPAPYRPPNAPILSTLPEHTVIC

SEQ ID NO: 6676 - protein, 1365 aa, Artificial Sequence
  SARS-CoV-2/China/WF0028/2020__EPI_ISL_413791 spike protein (1-1211) WhcAg construct
MFVFLVLLPLVSSQCVNLTTRTQLPPAYTNSFTRGVYYPDKVFRSSVLHSTQDLFLPFFSNVTWFHAIHVSGTNGTKRFDNPVLPFNDGVYFASTEKSNIIRGWIFGTTLDSKTQSLLIVNNATNVVIKVCEFQFCNDPFLGVYYHKNNKSWMESEFRVYSSANNCTFEYVSQPFLMDLEGKQGNFKNLREFVFKNIDGYFKIYSKHTPINLVRDLPQGFSALEPLVDLPIGINITRFQTLLALHRSYLTPGDSSSGWTAGAAAYYVGYLQPRTFLLKYNENGTITDAVDCALDPLSETKCTLKSFTVEKGIYQTSNFRVQPTESIVRFPNITNLCPFGEVFNATRFASVYAWNRKRISNCVADYSVLYNSASFSTFKCYGVSPTKLNDLCFTNVYADSFVIRGDEVRQIAPGQTGKIADYNYKLPDDFTGCVIAWNSNNLDSKVGGNYNYLYRLFRKSNLKPFERDISTEIYQAGSTPCNGVEGFNCYFPLQSYGFQPTNGVGYQPYRVVVLSFELLHAPATVCGPKKSTNLVKNKCVNFNFNGLTGTGVLTESNKKFLPFQQFGRDIADTTDAVRDPQTLEILDITPCSFGGVSVITPGTNTSNQVAVLYQDVNCTEVPVAIHADQLTPTWRVYSTGSNVFQTRAGCLIGAEHVNNSYECDIPIGAGICASYQTQTNSPRRARSVASQSIIAYTMSLGAENSVAYSNNSIAIPTNFTISVTTEILPVSMTKTSVDCTMYICGDSTECSNLLLQYGSFCTQLNRALTGIAVEQDKNTQEVFAQVKQIYKTPPIKDFGGFNFSQILPDPSKPSKRSFIEDLLFNKVTLADAGFIKQYGDCLGDIAARDLICAQKFNGLTVLPPLLTDEMIAQYTSALLAGTITSGWTFGAGAALQIPFAMQMAYRFNGIGVTQNVLYENQKLIANQFNSAIGKIQDSLSSTASALGKLQDVVNQNAQALNTLVKQLSSNFGAISSVLNDILSRLDKVEAEVQIDRLITGRLQSLQTYVTQQLIRAAEIRASANLAATKMSECVLGQSKRVDFCGKGYHLMSFPQSAPHGVVFLHVTYVPAQEKNFTTAPAICHDGKAHFPREGVFVSNGTHWFVTQRNFYEPQIITTDNTFVSGNCDVVIGIVNNTVYDPLQPELESFKEELDKYFKNHTSPDVDLGDISGINASVVNIQKEIDRLNEVAKNLNESLIDLQELGKYEQYIKGGGGSDIDPYKEFGSSYQLLNFLPLDFFPDLNALVDTATALYEEELTGREHCSPHHTAIRQALVCWDELTKLIAWMSSNITSEQVRTIIVNHVNDTWGLKVRQSLWFHLSCLTFGQHTVQEFLVSFGVWIRTPAPYRPPNAPILSTLPEHTVIC

SEQ ID NO: 6677 - protein, 1365 aa, Artificial Sequence
  SARS-CoV-2/2019-nCoV/USA-CruiseA-18/2020__MT159716.1 spike protein (1-1211) WhcAg construct
MFVFLVLLPLVSSQCVNLTTRTQLPPAYTNSFTRGVYYPDKVFRSSVLHSTQDLFLPFFSNVTWFHAIHVSGTNGTKRFDNPVLPFNDGVYFASTEKSNIIRGWIFGTTLDSKTQSLLIVNNATNVVIKVCEFQFCNDPFLGVYYHKNNKSWMESELRVYSSANNCTFEYVSQPFLMDLEGKQGNFKNLREFVFKNIDGYFKIYSKHTPINLVRDLPQGFSALEPLVDLPIGINITRFQTLLALHRSYLTPGDSSSGWTAGAAAYYVGYLQPRTFLLKYNENGTITDAVDCALDPLSETKCTLKSFTVEKGIYQTSNFRVQPTESIVRFPNITNLCPFGEVFNATRFASVYAWNRKRISNCVADYSVLYNSASFSTFKCYGVSPTKLNDLCFTNVYADSFVIRGDEVRQIAPGQTGKIADYNYKLPDDFTGCVIAWNSNNLDSKVGGNYNYLYRLFRKSNLKPFERDISTEIYQAGSTPCNGVEGFNCYFPLQSYGFQPTNGVGYQPYRVVVLSFELLHAPATVCGPKKSTNLVKNKCVNFNFNGLTGTGVLTESNKKFLPFQQFGRDIADTTDAVRDPQTLEILDITPCSFGGVSVITPGTNTSNQVAVLYQDVNCTEVPVAIHADQLTPTWRVYSTGSNVFQTRAGCLIGAEHVNNSYECDIPIGAGICASYQTQTNSPRRARSVASQSIIAYTMSLGAENSVAYSNNSIAIPTNFTISVTTEILPVSMTKTSVDCTMYICGDSTECSNLLLQYGSFCTQLNRALTGIAVEQDKNTQEVFAQVKQIYKTPPIKDFGGFNFSQILPDPSKPSKRSFIEDLLFNKVTLADAGFIKQYGDCLGDIAARDLICAQKFNGLTVLPPLLTDEMIAQYTSALLAGTITSGWTFGAGAALQIPFAMQMAYRFNGIGVTQNVLYENQKLIANQFNSAIGKIQDSLSSTASALGKLQDVVNQNAQALNTLVKQLSSNFGAISSVLNDILSRLDKVEAEVQIDRLITGRLQSLQTYVTQQLIRAAEIRASANLAATKMSECVLGQSKRVDFCGKGYHLMSFPQSAPHGVVFLHVTYVPAQEKNFTTAPAICHDGKAHFPREGVFVSNGTHWFVTQRNFYEPQIITTDNTFVSGNCDVVIGIVNNTVYDPLQPELDSFKEELDKYFKNHTSPDVDLGDISGINASVVNIQKEIDRLNEVAKNLNESLIDLQELGKYEQYIKGGGGSDIDPYKEFGSSYQLLNFLPLDFFPDLNALVDTATALYEEELTGREHCSPHHTAIRQALVCWDELTKLIAWMSSNITSEQVRTIIVNHVNDTWGLKVRQSLWFHLSCLTFGQHTVQEFLVSFGVWIRTPAPYRPPNAPILSTLPEHTVIC

SEQ ID NO: 6678 - protein, 1365 aa, Artificial Sequence
  SARS-CoV-2/SARS-CoV-2/Yunnan-01/human/2020/CHN__MT049951.1 spike protein (1-1211) WhcAg construct
MFVFLVLLPLVSSQCVNLTTRTQLPPANTNSFTRGVYYPDKVFRSSVLHSTQDLFLPFFSNVTWFHAIHVSGTNGTKRFDNPVLPFNDGVYFASTEKSNIIRGWIFGTTLDSKTQSLLIVNNATNVVIKVCEFQFCNDPFLGVYYHKNNKSWMESEFRVYSSANNCTFEYVSQPFLMDLEGKQGNFKNLREFVFKNIDGYFKIYSKHTPINLVRDLPQGFSALEPLVDLPIGINITRFQTLLALHRSYLTPGDSSSGWTAGAAAYYVGYLQPRTFLLKYNENGTITDAVDCALDPLSETKCTLKSFTVEKGIYQTSNFRVQPTESIVRFPNITNLCPFGEVFNATRFASVYAWNRKRISNCVADYSVLYNSASFSTFKCYGVSPTKLNDLCFTNVYADSFVIRGDEVRQIAPGQTGKIADYNYKLPDDFTGCVIAWNSNNLDSKVGGNYNYLYRLFRKSNLKPFERDISTEIYQAGSTPCNGVEGFNCYFPLQSYGFQPTNGVGYQPYRVVVLSFELLHAPATVCGPKKSTNLVKNKCVNFNFNGLTGTGVLTESNKKFLPFQQFGRDIADTTDAVRDPQTLEILDITPCSFGGVSVITPGTNTSNQVAVLYQDVNCTEVPVAIHADQLTPTWRVYSTGSNVFQTRAGCLIGAEHVNNSYECDIPIGAGICASYQTQTNSPRRARSVASQSIIAYTMSLGAENSVAYSNNSIAIPTNFTISVTTEILPVSMTKTSVDCTMYICGDSTECSNLLLQYGSFCTQLNRALTGIAVEQDKNTQEVFAQVKQIYKTPPIKDFGGFNFSQILPDPSKPSKRSFIEDLLFNKVTLADAGFIKQYGDCLGDIAARDLICAQKFNGLTVLPPLLTDEMIAQYTSALLAGTITSGWTFGAGAALQIPFAMQMAYRFNGIGVTQNVLYENQKLIANQFNSAIGKIQDSLSSTASALGKLQDVVNQNAQALNTLVKQLSSNFGAISSVLNDILSRLDKVEAEVQIDRLITGRLQSLQTYVTQQLIRAAEIRASANLAATKMSECVLGQSKRVDFCGKGYHLMSFPQSAPHGVVFLHVTYVPAQEKNFTTAPAICHDGKAHFPREGVFVSNGTHWFVTQRNFYEPQIITTDNTFVSGNCDVVIGIVNNTVYDPLQPELDSFKEELDKYFKNHTSPDVDLGDISGINASVVNIQKEIDRLNEVAKNLNESLIDLQELGKYEQYIKGGGGSDIDPYKEFGSSYQLLNFLPLDFFPDLNALVDTATALYEEELTGREHCSPHHTAIRQALVCWDELTKLIAWMSSNITSEQVRTIIVNHVNDTWGLKVRQSLWFHLSCLTFGQHTVQEFLVSFGVWIRTPAPYRPPNAPILSTLPEHTVIC

SEQ ID NO: 6679 - protein, 1365 aa, Artificial Sequence
  SARS-CoV-2/USA/WA-UW292/2020__EPI_ISL_418077 spike protein (1-1211) WhcAg construct
MFVFLVLLPLVSSQCVNLTTRTQLPPAYTNSFTRGVYYPDKVFRSSVLHSTQDLFLPFFSNVTWFHAIHVSGTNGTKRFDNPVLPFNDGVYFASTEKSNIIRGWIFGTTLDSKTQSLLIVNNATNVVIKVCEFQFCNDPFLGVYYHKNNKSWMESEFRVYSSANNCTFEYVSQPFLMDLEGKQGNFKNLREFVFKNIDGYFKIYSKHTPINLVRDLPQGFSALEPLVDLPIGINITRFQTLLALHRSYLTPGDSSSGWTAGAAAYYVGYLQPRTFLLKYNENGTITDAVDCALDPLSETKCTLKSFTVEKGIYQTSNFRVQPTESIVRFPNITNLCPFGEVFNATRFASVYAWNRKRISNCVADYSVLYNSASFSTFKCYGVSPTKLNDLCFTNVYADSFVIRGDEVRQIAPGQTGKIADYNYKLPDDFTGCVIAWNSNNLDSKVGGNYNYLYRLFRKSNLKPFERDISTEIYQASSTPCNGVEGFNCYFPLQSYGFQPTNGVGYQPYRVVVLSFELLHAPATVCGPKKSTNLVKNKCVNFNFNGLTGTGVLTESNKKFLPFQQFGRDIADTTDAVRDPQTLEILDITPCSFGGVSVITPGTNTSNQVAVLYQDVNCTEVPVAIHADQLTPTWRVYSTGSNVFQTRAGCLIGAEHVNNSYECDIPIGAGICASYQTQTNSPRRARSVASQSIIAYTMSLGAENSVAYSNNSIAIPTNFTISVTTEILPVSMTKTSVDCTMYICGDSTECSNLLLQYGSFCTQLNRALTGIAVEQDKNTQEVFAQVKQIYKTPPIKDFGGFNFSQILPDPSKPSKRSFIEDLLFNKVTLADAGFIKQYGDCLGDIAARDLICAQKFNGLTVLPPLLTDEMIAQYTSALLAGTITSGWTFGAGAALQIPFAMQMAYRFNGIGVTQNVLYENQKLIANQFNSAIGKIQDSLSSTASALGKLQDVVNQNAQALNTLVKQLSSNFGAISSVLNDILSRLDKVEAEVQIDRLITGRLQSLQTYVTQQLIRAAEIRASANLAATKMSECVLGQSKRVDFCGKGYHLMSFPQSAPHGVVFLHVTYVPAQEKNFTTAPAICHDGKAHFPREGVFVSNGTHWFVTQRNFYEPQIITTDNTFVSGNCDVVIGIVNNTVYDPLQPELDSFKEELDKYFKNHTSPDVDLGDISGINASVVNIQKEIDRLNEVAKNLNESLIDLQELGKYEQYIKGGGGSDIDPYKEFGSSYQLLNFLPLDFFPDLNALVDTATALYEEELTGREHCSPHHTAIRQALVCWDELTKLIAWMSSNITSEQVRTIIVNHVNDTWGLKVRQSLWFHLSCLTFGQHTVQEFLVSFGVWIRTPAPYRPPNAPILSTLPEHTVIC

SEQ ID NO: 6680 - protein, 1365 aa, Artificial Sequence
  SARS-CoV-2/Iceland/192/2020__EPI_ISL_417819 spike protein (1-1211) WhcAg construct
MFVFFVLLPLVSSQCVNLTTRTQLPPAYTNSFTRGVYYPDKVFRSSVLHSTQDLFLPFFSNVTWFHAIHVSGTNGTKRFDNPVLPFNDGVYFASTEKSNIIRGWIFGTTLDSKTQSLLIVNNATNVVIKVCEFQFCNDPFLGVYYHKNNKSWMESEFRVYSSANNCTFEYVSQPFLMDLEGKQGNFKNLREFVFKNIDGYFKIYSKHTPINLVRDLPQGFSALEPLVDLPIGINITRFQTLLALHRSYLTPGDSSSGWTAGAAAYYVGYLQPRTFLLKYNENGTITDAVDCALDPLSETKCTLKSFTVEKGIYQTSNFRVQPTESIVRFPNITNLCPFGEVFNATRFASVYAWNRKRISNCVADYSVLYNSASFSTFKCYGVSPTKLNDLCFTNVYADSFVIRGDEVRQIAPGQTGKIADYNYKLPDDFTGCVIAWNSNNLDSKVGGNYNYLYRLFRKSNLKPFERDISTEIYQAGSTPCNGVEGFNCYFPLQSYGFQPTNGVGYQPYRVVVLSFELLHAPATVCGPKKSTNLVKNKCVNFNFNGLTGTGVLTESNKKFLPFQQFGRDIADTTDAVRDPQTLEILDITPCSFGGVSVITPGTNTSNQVAVLYQGVNCTEVPVAIHADQLTPTWRVYSTGSNVFQTRAGCLIGAEHVNNSYECDIPIGAGICASYQTQTNSPRRARSVASQSIIAYTMSLGAENSVAYSNNSIAIPTNFTISVTTEILPVSMTKTSVDCTMYICGDSTECSNLLLQYGSFCTQLNRALTGIAVEQDKNTQEVFAQVKQIYKTPPIKDFGGFNFSQILPDPSKPSKRSFIEDLLFNKVTLADAGFIKQYGDCLGDIAARDLICAQKFNGLTVLPPLLTDEMIAQYTSALLAGTITSGWTFGAGAALQIPFAMQMAYRFNGIGVTQNVLYENQKLIANQFNSAIGKIQDSLSSTASALGKLQDVVNQNAQALNTLVKQLSSNFGAISSVLNDILSRLDKVEAEVQIDRLITGRLQSLQTYVTQQLIRAAEIRASANLAATKMSECVLGQSKRVDFCGKGYHLMSFPQSAPHGVVFLHVTYVPAQEKNFTTAPAICHDGKAHFPREGVFVSNGTHWFVTQRNFYEPQIITTDNTFVSGNCDVVIGIVNNTVYDPLQPELDSFKEELDKYFKNHTSPDVDLGDISGINASVVNIQKEIDRLNEVAKNLNESLIDLQELGKYEQYIKGGGGSDIDPYKEFGSSYQLLNFLPLDFFPDLNALVDTATALYEEELTGREHCSPHHTAIRQALVCWDELTKLIAWMSSNITSEQVRTIIVNHVNDTWGLKVRQSLWFHLSCLTFGQHTVQEFLVSFGVWIRTPAPYRPPNAPILSTLPEHTVIC

SEQ ID NO: 6681 - protein, 1365 aa, Artificial Sequence
  SARS-CoV-2/Belgium/ULG-6939/2020__EPI_ISL_417020 spike protein (1-1211) WhcAg construct
MFVFLVLLPLVSSQCVNLTTRTQLPPAYTNSFTRGVYYPDKVFRSSVLHSTQDLFLPFFSNVTWFHAIHVSGTNGTKRFDNPVLPFNDGVYFASTEKSNIIRGWIFGTTLDSKTQSLLIVNNATNVVIKVCEFQFCNDPFLGVYYHKNNKSWMESEFRVYSSANNCTFEYVSQPFLMDLEGKQGNFKNLREFVFKNIDGYFKIYSKHTPINLVRDLPQGFSALEPLVDLPIGINITRFQTLLALHRSYLTPGDSSSGWTAGAAAYYVGYLQPRTFLLKYNENGTITDAVDCALDPLSETKCTLKSFTVEKGIYQTSNFRVQPTESIVRFPNITNLCPFGEVFNATRFASVYAWNRKRISNCVADYSVLYNSASFSTFKCYGVSPTKLNDLCFTNVYADSFVIRGDEVRQIAPGQTGKIADYNYKLPDDFTGCVIAWNSNNLDSKVGGNYNYLYRLFRKSNLKPFERDISTEIYQAGSTPCNGVEGFNCYFPLQSYGFQPTNGVGYQPYRVVVLSFELLHAPATVCGPKKSTNLVKNKCVNFNFNGLTGTGVLTESNKKFLPFQQFGRDIADTTDAVRDPQTLEILDITPCSFGGVSVITPGTNTSNQVAVLYQGVNCTEVPVAIHADQLTPTWRVYSTGSNVFQTRAGCLIGAEHVNNSYECDIPIGAGICASYQTQTNSPRRARSVASQSIIAYTMSLGAENSVVYSNNSIAIPTNFTISVTTEILPVSMTKTSVDCTMYICGDSTECSNLLLQYGSFCTQLNRALTGIAVEQDKNTQEVFAQVKQIYKTPPIKDFGGFNFSQILPDPSKPSKRSFIEDLLFNKVTLADAGFIKQYGDCLGDIAARDLICAQKFNGLTVLPPLLTDEMIAQYTSALLAGTITSGWTFGAGAALQIPFAMQMAYRFNGIGVTQNVLYENQKLIANQFNSAIGKIQDSLSSTASALGKLQDVVNQNAQALNTLVKQLSSNFGAISSVLNDILSRLDKVEAEVQIDRLITGRLQSLQTYVTQQLIRAAEIRASANLAATKMSECVLGQSKRVDFCGKGYHLMSFPQSAPHGVVFLHVTYVPAQEKNFTTAPAICHDGKAHFPREGVFVSNGTHWFVTQRNFYEPQIITTDNTFVSGNCDVVIGIVNNTVYDPLQPELDSFKEELDKYFKNHTSPDVDLGDISGINASVVNIQKEIDRLNEVAKNLNESLIDLQELGKYEQYIKGGGGSDIDPYKEFGSSYQLLNFLPLDFFPDLNALVDTATALYEEELTGREHCSPHHTAIRQALVCWDELTKLIAWMSSNITSEQVRTIIVNHVNDTWGLKVRQSLWFHLSCLTFGQHTVQEFLVSFGVWIRTPAPYRPPNAPILSTLPEHTVIC

SEQ ID NO: 6682 - protein, 1365 aa, Artificial Sequence
  SARS-CoV-2/France/HF2496/2020__EPI_ISL_418231 spike protein (1-1211) WhcAg construct
MFVFLVLLPLVSSQCVNLTTRTQLPPAYTNSFTRGVYYPDKVFRSSVLHSTQDLFLPFFSNVTWFHAIHVSGTNGTKRFDNPVLPFNDGVYFASTEKSNIIRGWIFGTTLDSKTQSLLIVNNATNVVIKVCEFQFCNDPFLGVYYHKNNKSWMESEFRVYSSANNCTFEYVSQPFLMDLEGKQGNFKNLREFVFKNIDGYFKIYSKHTPINLVRDLPQGFSALEPLVDLPIGINITRFQTLLALHRSYLTPGDSSSGWTAGAAAYYVGYLQPRTFLLKYNENGTITDAVDCALDPLSETKCTLKSFTVEKGIYQTSNFRVQPTESIVRFPNITNLCPFGEVFNATRFASVYAWNRKRISNCVADYSVLYNSASFSTFKCYGVSPTKLNDLCFTNVYADSFVIRGDEVRQIAPGQTGKIADYNYKLPDDFTGCVIAWNSNNLDSKVGGNYNYLYRLFRKSNLKPFERDISTEIYQAGSTPCNGVEGFNCYFPLQSYGFQPTNGVGYQPYRVVVLSFELLHAPATVCGPKKSTNLVKNKCVNFNFNGLTGTGVLTESNKKFLPFQQFGRDIADTTDAVRDPQTLEILDITPCSFGGVSVITPGTNTSNQVAVLYQGVNCTEVPVAIHADQLTPTWRVYSTGSNVFQTRAGCLIGAEHVNNSYECDIPIGAGICASYQTQTNSPRRARSVASQSIIAYTMSLGAENSVAYSNNSIAIPTNFTISVTTEILPVSMTKTSVDCTMYICGDSTECSNLLLQYGSFCTQLNRALTGIAVEQDKNTQEVFAQVKQIYKTPPIKDFGGFNFSQILPDPSKPSKRSFIEDLLFNKVTLADAGFIKQYGDCLGDIVARDLICAQKFNGLTVLPPLLTDEMIAQYTSALLAGTITSGWTFGAGAALQIPFAMQMAYRFNGIGVTQNVLYENQKLIANQFNSAIGKIQDSLSSTASALGKLQDVVNQNAQALNTLVKQLSSNFGAISSVLNDILSRLDKVEAEVQIDRLITGRLQSLQTYVTQQLIRAAEIRASANLAATKMSECVLGQSKRVDFCGKGYHLMSFPQSAPHGVVFLHVTYVPAQEKNFTTAPAICHDGKAHFPREGVFVSNGTHWFVTQRNFYEPQIITTDNTFVSGNCDVVIGIVNNTVYDPLQPELDSFKEELDKYFKNHTSPDVDLGDISGINASVVNIQKEIDRLNEVAKNLNESLIDLQELGKYEQYIKGGGGSDIDPYKEFGSSYQLLNFLPLDFFPDLNALVDTATALYEEELTGREHCSPHHTAIRQALVCWDELTKLIAWMSSNITSEQVRTIIVNHVNDTWGLKVRQSLWFHLSCLTFGQHTVQEFLVSFGVWIRTPAPYRPPNAPILSTLPEHTVIC

SEQ ID NO: 6683 - protein, 1365 aa, Artificial Sequence
  SARS-CoV-2/USA/WA-UW291/2020__EPI_ISL_418076 spike protein (1-1211) WhcAg construct
MFVFLVLLPLVSSQCVNLTTRTQLPPAYTNSFTRGVYYPDKVFRSSVLHSTQDLFLPFFSNVTWFHAIHVSGTNGTKRFDNPVLPFNDGVYFASTEKSNIIRGWIFGTTLDSKTQSLLIVNNATNVVIKVCEFQFCNDPFLGVYYHKNNKSWMESEFRVYSSANNCTFEYVSQPFLMDLEGKQGNFKNLREFVFKNIDGYFKIYSKHTPINLVRDLPQGFSALEPLVDLPIGINITRFQTLLALHRSYLTPGDSSSGWTAGAAAYYVGYLQPRTFLLKYNENGTITDAVDCALDPLSETKCTLKSFTVEKGIYQTSNFRVQPTESIVRFPNITNLCPFGEVFNATRFASVYAWNRKRISNCVADYSVLYNSASFSTFKCYGVSPTKLNDLCFTNVYADSFVIRGDEVRQIAPGQTGKIADYNYKLPDDFTGCVIAWNSNNLDSKVGGNYNYLYRLFRKSNLKPFERDISTEIYQAGSTPCNGVEGFNCYFPLQSYGFQPTNGVGYQPYRVVVLSFELLHAPATVCGPKKSTNLVKNKCVNFNFNGLTGTGVLTESNKKFLPFQQFGRDIADTTDAVRDPQTLEILDITPCSFGGVSVITPGTNTSNQVAVLYQGVNCTEVPVAIHADQLTPTWRVYSTGSNVFQTRAGCLIGAEHVNNSYECDIPIGAGICASYQTQTNSPRRARSVASQSIIAYTMSLGAENSVAYSNNSIAIPTNFTISVTTEILPVSMTKTSVDCTMYICGDSTECSNLLLQYGSFCTQLNRALTGIAVEQDKNTQEVFAQVKQIYKTPPIKDFGGFNFSQILPDPSKPSKRSFIEDLLFNKVTLADAGFIKQYGDCLGDIAARDLICAQKFNGLTVLPPLLTDEMIAQYTSALLAGTITSGWTFGAGAALQIPFAMQMAYRFNGIGVTQNVLYENQKLIANQFNSAIGKIQYSLSSTASALGKLQDVVNQNAQALNTLVKQLSSNFGAISSVLNDILSRLDKVEAEVQIDRLITGRLQSLQTYVTQQLIRAAEIRASANLAATKMSECVLGQSKRVDFCGKGYHLMSFPQSAPHGVVFLHVTYVPAQEKNFTTAPAICHDGKAHFPREGVFVSNGTHWFVTQRNFYEPQIITTDNTFVSGNCDVVIGIVNNTVYDPLQPELDSFKEELDKYFKNHTSPDVDLGDISGINASVVNIQKEIDRLNEVAKNLNESLIDLQELGKYEQYIKGGGGSDIDPYKEFGSSYQLLNFLPLDFFPDLNALVDTATALYEEELTGREHCSPHHTAIRQALVCWDELTKLIAWMSSNITSEQVRTIIVNHVNDTWGLKVRQSLWFHLSCLTFGQHTVQEFLVSFGVWIRTPAPYRPPNAPILSTLPEHTVIC

SEQ ID NO: 6684 - protein, 1365 aa, Artificial Sequence; identical to SEQ ID NO: 6647
  SARS-CoV-2/Portugal/PT0034/2020__EPI_ISL_418019 spike protein (1-1211) WhcAg construct

SEQ ID NO: 6685 - protein, 1365 aa, Artificial Sequence
  SARS-CoV-2/Iceland/202/2020__EPI_ISL_417750 spike protein (1-1211) WhcAg construct
MFVFLVLLPLVSSQCVNLTTRTQLPPAYTNSFTRGVYYPDKVFRSSVLHSTQDLFLPFFSNVTWFHAIHVSGTNGTKRFDNPVLPFNDGVYFASTEKSNIIRGWIFGTTLDSKTQSLLIVNNATNVVIKVCEFQFCNDPFLGVYYHKNNKSWMESEFRVYSSANNCTFEYVSQPFLMDLEGKQGNFKNLREFVFKNIDGYFKIYSKHTPINLVRDLPQGFSALEPLVDLPIGINITRFQTLLALHRSYLTPGDSSSGWTAGAAAYYVGYLQPRTFLLKYNENGTITDAVDCALDPLSETKCTLKSFTVEKGIYQTSNFRVQPTESIVRFPNITNLCPFGEVFNATRFASVYAWNRKRISNCVADYSVLYNSASFSTFKCYGVSPTKLNDLCFTNVYADSFVIRGDEVRQIAPGQTGKIADYNYKLPDDFTGCVIAWNSNNLDSKVGGNYNYLYRLFRKSNLKPFERDISTEIYQAGSTPCNGVEGFNCYFPLQSYGFQPTNGVGYQPYRVVVLSFELLHAPATVCGPKKSTNLVKNKCVNFNFNGLTGTGVLTESNKKFLPFQQFGRDIADTTDAVRDPQTLEILDITPCSFGGVSVITPGTNTSNQVAVLYQDVNCTEVPVAIHADQLTPTWRVYSTGSNVFQTRAGCLIGAEHVNNSYECDIPIGAGICASYQTQTNSPRRARSVASQSIIAYTMSLGAENSVAYSNNSIAIPTNFTISVTTEILPVSMTKTSVDCTMYICGDSTECSNLLLQYGSFCTQLNRALTGIAVEQDKNTQEVFAQVKQIYKTPPIKDFGGFNFSQILPDPSKPSKRSFIEDLLFNKVTLADAGFIKQYGDCLGDIAARDLICAQKFNGLTVLPPLLTDEMIAQYTSALLAGTITSGWTFGAGAALQIPFAMQMAYRFNGIGVTQNVLYENQKLIANQFNSAIGKIQDSLSSTASALGKLQDVVNQNAQALNTLVKQLSSNFGAISSVLNDILSRLDKVEAEVQIDRLITGRLQSLQTYVTQQLIRAAEIRASANLAATKMSECVLGQSKRVDFCGKGYHLMSFPQSAPHGVVFLHVTYVPAQEKNFTTAPAICHDGKAHFPREGVFVSNGTHWFVTQRNFYEPQIITTDNTFVSGNCDVVIGIVNNTVYDPLQPELDSFKEELDKYFKNHTSPDVDLGDIPGINASVVNIQKEIDRLNEVAKNLNESLIDLQELGKYEQYIKGGGGSDIDPYKEFGSSYQLLNFLPLDFFPDLNALVDTATALYEEELTGREHCSPHHTAIRQALVCWDELTKLIAWMSSNITSEQVRTIIVNHVNDTWGLKVRQSLWFHLSCLTFGQHTVQEFLVSFGVWIRTPAPYRPPNAPILSTLPEHTVIC

SEQ ID NO: 6686 - protein, 1365 aa, Artificial Sequence
  SARS-CoV-2/USA/WA-UW261/2020__EPI_ISL_418046 spike protein (1-1211) WhcAg construct
MFVFLVLLPLVSSQCVNLTTRTQLPPAYTNSFTRGVYYPDKVFRSSVLHSTQDLFLPFFSNVTWFHAIHVSGTNGTKRFDNPVLPFNDGVYFASTEKSNIIRGWIFGTTLDSKTQSLLIVNNATNVVIKVCEFQFCNDPFLGVYYHKNNKSWMESEFRVYSSANNCTFEYVSQPFLMDLEGKQGNFKNLREFVFKNIDGYFKIYSKHTPINLVRDLPQGFSALEPLVDLPIGINITRFQTLLALHRSYLTPGDSSSGWTAGAAAYYVGYLQPRTFLLKYNENGTITDAVDCALDPLSETKCTLKSFTVEKGIYQTSNFRVQPTESIVRFPNITNLCPFGEVFNATRFTSVYAWNRKRISNCVADYSVLYNSASFSTFKCYGVSPTKLNDLCFTNVYADSFVIRGDEVRQIAPGQTGKIADYNYKLPDDFTGCVIAWNSNNLDSKVGGNYNYLYRLFRKSNLKPFERDISTEIYQAGSTPCNGVEGFNCYFPLQSYGFQPTNGVGYQPYRVVVLSFELLHAPATVCGPKKSTNLVKNKCVNFNFNGLTGTGVLTESNKKFLPFQQFGRDIADTTDAVRDPQTLEILDITPCSFGGVSVITPGTNTSNQVAVLYQDVNCTEVPVAIHADQLTPTWRVYSTGSNVFQTRAGCLIGAEHVNNSYECDIPIGAGICASYQTQTNSPRRARSVASQSIIAYTMSLGAENSVAYSNNSIAIPTNFTISVTTEILPVSMTKTSVDCTMYICGDSTECSNLLLQYGSFCTQLNRALTGIAVEQDKNTQEVFAQVKQIYKTPPIKDFGGFNFSQILPDPSKPSKRSFIEDLLFNKVTLADAGFIKQYGDCLGDIAARDLICAQKFNGLTVLPPLLTDEMIAQYTSALLAGTITSGWTFGAGAALQIPFAMQMAYRFNGIGVTQNVLYENQKLIANQFNSAIGKIQDSLSSTASALGKLQDVVNQNAQALNTLVKQLSSNFGAISSVLNDILSRLDKVEAEVQIDRLITGRLQSLQTYVTQQLIRAAEIRASANLAATKMSECVLGQSKRVDFCGKGYHLMSFPQSAPHGVVFLHVTYVPAQEKNFTTAPAICHDGKAHFPREGVFVSNGTHWFVTQRNFYEPQIITTDNTFVSGNCDVVIGIVNNTVYDPLQPELDSFKEELDKYFKNHTSPDVDLGDISGINASVVNIQKEIDRLNEVAKNLNESLIDLQELGKYEQYIKGGGGSDIDPYKEFGSSYQLLNFLPLDFFPDLNALVDTATALYEEELTGREHCSPHHTAIRQALVCWDELTKLIAWMSSNITSEQVRTIIVNHVNDTWGLKVRQSLWFHLSCLTFGQHTVQEFLVSFGVWIRTPAPYRPPNAPILSTLPEHTVIC

SEQ ID NO: 6687 - protein, 1365 aa, Artificial Sequence
  SARS-CoV-2/Portugal/PT0035/2020__EPI_ISL_418020 spike protein (1-1211) WhcAg construct
MFVFLVLLPLVSSQCVNLTTRTQLPPAYTNSFTRGVYYPDKVFRSSVLHSTQDLFLPFFSNVTWFHAIHVSGTNGTKRFDNPVLPFNDGVYFASTEKSNIIRGWIFGTTLDSKTQSLLIVNNATNVVIKVCEFQFCNDPFLGVYYHKNNKSWMESEFRVYSSANNCTFEYVSQPFLMDLEGKQGNFKNLREFVFKNIDGYFKIYSKHTPINLVRDLPQGFSALEPLVDLPIGINITRFQTLLALHRSYLTPGDSSSGWTAGAAAYYVGYLQPRTFLLKYNENGTITDAVDCALDPLSETKCTLKSFTVEKGIYQTSNFRVQPTESIVRFPNITNLCPFGEVFNATRFASVYAWNRKRISNCVADYSVLYNSASFSTFKCYGVSPTKLNDLCFTNVYADSFVIRGDEVRQIAPGQTGKIADYNYKLPDDFTGCVIAWNSNNLDSKVGGNYNYLYRLFRKSNLKPFERDISTEIYQAGSTPCNGVEGFNCYFPLQSYGFQPTNGVGYQPYRVVVLSFELLHAPATVCGPKKSTNLVKNKCVNFNFNGLTGTGVLTESNKKFLPFQQFGRDIADTTDAVRDPQTLEILDITPCSFGGVSVITPGTNTSNQVAVLYQDVNCTEVPVAIHADQLTPTWRVYSTGSNVFQTRAGCLIGAEHVNNSYECDIPIGAGICASYQTQTNSPRRARSVASQSIIAYTMSLGAENSVAYSNNSIAIPTNFTISVTTEILPVSMTKTSVDCTMYICGDSTECSNLLLQYGSFCTQLNRALTGIAVEQDKNTQEVFAQVKQIYKTPPIKDFGGFNFSQILPDPSKPSKRSFIEDLLFNKVTLADAGFIKQYGDCLGDISARDLICAQKFNGLTVLPPLLTDEMIAQYTSALLAGTITSGWTFGAGAALQIPFAMQMAYRFNGIGVTQNVLYENQKLIANQFNSAIGKIQDSLSSTASALGKLQDVVNQNAQALNTLVKQLSSNFGAISSVLNDILSRLDKVEAEVQIDRLITGRLQSLQTYVTQQLIRAAEIRASANLAATKMSECVLGQSKRVDFCGKGYHLMSFPQSAPHGVVFLHVTYVPAQEKNFTTAPAICHDGKAHFPREGVFVSNGTHWFVTQRNFYEPQIITTDNTFVSGNCDVVIGIVNNTVYDPLQPELDSFKEELDKYFKNHTSPDVDLGDISGINASVVNIQKEIDRLNEVAKNLNESLIDLQELGKYEQYIKGGGGSDIDPYKEFGSSYQLLNFLPLDFFPDLNALVDTATALYEEELTGREHCSPHHTAIRQALVCWDELTKLIAWMSSNITSEQVRTIIVNHVNDTWGLKVRQSLWFHLSCLTFGQHTVQEFLVSFGVWIRTPAPYRPPNAPILSTLPEHTVIC

SEQ ID NO: 6688 - protein, 1365 aa, Artificial Sequence
  SARS-CoV-2/USA/NY-NYUMC7/2020__EPI_ISL_418192 spike protein (1-1211) WhcAg construct
MFVFLVLLPLVSSQCVNLTTRTQLPPAYTNSFTRGVYYPDKVFRSSVLHSTQDLFLPFFSNVTWFHAIHVSGTNGTKRFDNPVLPFNDGVYFASTEKSNIIRGWIFGTTLDSKTQSLLIVNNATNVVIKVCEFQFCNDPFLGVYHHKNNKSWMESEFRVYSSANNCTFEYVSQPFLMDLEGKQGNFKNLREFVFKNIDGYFKIYSKHTPINLVRDLPQGFSALEPLVDLPIGINITRFQTLLALHRSYLTPGDSSSGWTAGAAAYYVGYLQPRTFLLKYNENGTITDAVDCALDPLSETKCTLKSFTVEKGIYQTSNFRVQPTESIVRFPNITNLCPFGEVFNATRFASVYAWNRKRISNCVADYSVLYNSASFSTFKCYGVSPTKLNDLCFTNVYADSFVIRGDEVRQIAPGQTGKIADYNYKLPDDFTGCVIAWNSNNLDSKVGGNYNYLYRLFRKSNLKPFERDISTEIYQAGSTPCNGVEGFNCYFPLQSYGFQPTNGVGYQPYRVVVLSFELLHAPATVCGPKKSTNLVKNKCVNFNFNGLTGTGVLTESNKKFLPFQQFGRDIADTTDAVRDPQTLEILDITPCSFGGVSVITPGTNTSNQVAVLYQGVNCTEVPVAIHADQLTPTWRVYSTGSNVFQTRAGCLIGAEHVNNSYECDIPIGAGICASYQTQTNSPRRARSVASQSIIAYTMSLGAENSVAYSNNSIAIPTNFTISVTTEILPVSMTKTSVDCTMYICGDSTECSNLLLQYGSFCTQLNRALTGIAVEQDKNTQEVFAQVKQIYKTPPIKDFGGFNFSQILPDPSKPSKRSFIEDLLFNKVTLADAGFIKQYGDCLGDIAARDLICAQKFNGLTVLPPLLTDEMIAQYTSALLAGTITSGWTFGAGAALQIPFAMQMAYRFNGIGVTQNVLYENQKLIANQFNSAIGKIQDSLSSTASALGKLQDVVNQNAQALNTLVKQLSSNFGAISSVLNDILSRLDKVEAEVQIDRLITGRLQSLQTYVTQQLIRAAEIRASANLAATKMSECVLGQSKRVDFCGKGYHLMSFPQSAPHGVVFLHVTYVPAQEKNFTTAPAICHDGKAHFPREGVFVSNGTHWFVTQRNFYEPQIITTDNTFVSGNCDVVIGIVNNTVYDPLQPELDSFKEELDKYFKNHTSPDVDLGDISGINASVVNIQKEIDRLNEVAKNLNESLIDLQELGKYEQYIKGGGGSDIDPYKEFGSSYQLLNFLPLDFFPDLNALVDTATALYEEELTGREHCSPHHTAIRQALVCWDELTKLIAWMSSNITSEQVRTIIVNHVNDTWGLKVRQSLWFHLSCLTFGQHTVQEFLVSFGVWIRTPAPYRPPNAPILSTLPEHTVIC

SEQ ID NO: 6689 - protein, 1365 aa, Artificial Sequence
  SARS-CoV-2/Iceland/189/2020__EPI_ISL_417709 spike protein (1-1211) WhcAg construct
MFVFLVLLPLVSSQCVNLTTRTQLPPAYTNSFTRGVYYPDKVFRSSVLHSTQDLFLPFFSNVTWFHAIHVSGTNGTKRFDNPVLPFNDGVYFASTEKSNIIRGWIFGTTLDSKTQSLLIVNNATNVVIKVCEFQFCNDPFLGVYYHKNNKSWMESEFRVYSSANNCTFEYVSQPFLMDLEGKQGNFKNLREFVFKNIDGYFKIYSKHTPINLVRDLPQGFSALEPLVDLPIGINITRFQTLLALHRSYLTPGDSSSGWTAGAAAYYVGYLQPRTFLLKYNENGTITDAVDCALDPLSETKCTLKSFTVEKGIYQTSNFRVQPTESIVRFPNITNLCPFGEVFNATRFASVYAWNRKRISNCVADYSVLYNSASFSTFKCYGVSPTKLNDLCFTNVYADSFVIRGDEVRQIAPGQTGKIADYNYKLPDDFTGCVIAWNSNNLDSKVGGNYNYLYRLFRKSNLKPFERDISTEIYQAGSTPCNGVEGFNCYFPLQSYGFQPTNGVGYQPYRVVVLSFELLHAPATVCGPKKSTNLVKNKCVNFNFNGLTGTGVLTESNKKFLPFQQFGRDIADTTDAVRDPQTLEILDITPCSFGGVSVITPGTNTSNQVAVLYQGVNCTEVPVAIHADQLTPTWRVYSTGSNVFQTRAGCLIGAEHVNNSYECDIPIGAGICASYQTQTNSPRRARSVASQSIIAYTMSLGAENSVAYSNNSIAIPTNFTISVTTEILPVSMTKTSVDCTMYICGDSTECSNLLLQYGSFCTQLNRALTGIAVEQDKNTQEVFAQVKQIYKTPPIKDFGGFNFSQILPDPSKPSKRSFIEDLLFNKVTLADAGFTKQYGDCLGDIAARDLICAQKFNGLTVLPPLLTDEMIAQYTSALLAGTITSGWTFGAGAALQIPFAMQMAYRFNGIGVTQNVLYENQKLIANQFNSAIGKIQDSLSSTASALGKLQDVVNQNAQALNTLVKQLSSNFGAISSVLNDILSRLDKVEAEVQIDRLITGRLQSLQTYVTQQLIRAAEIRASANLAATKMSECVLGQSKRVDFCGKGYHLMSFPQSAPHGVVFLHVTYVPAQEKNFTTAPAICHDGKAHFPREGVFVSNGTHWFVTQRNFYEPQIITTDNTFVSGNCDVVIGIVNNTVYDPLQPELDSFKEELDKYFKNHTSPDVDLGDISGINASVVNIQKEIDRLNEVAKNLNESLIDLQELGKYEQYIKGGGGSDIDPYKEFGSSYQLLNFLPLDFFPDLNALVDTATALYEEELTGREHCSPHHTAIRQALVCWDELTKLIAWMSSNITSEQVRTIIVNHVNDTWGLKVRQSLWFHLSCLTFGQHTVQEFLVSFGVWIRTPAPYRPPNAPILSTLPEHTVIC

SEQ ID NO: 6690 - protein, 1365 aa, Artificial Sequence
  SARS-CoV-2/Australia/NSW56/2020__EPI_ISL_417408 spike protein (1-1211) WhcAg construct
MFVFLVLLPLVSSQCVNLTTRTQLPPAYTNSFTRGVYYPDKVFRSSVLHSTQDLFLPFFSNVTWFHAIHVSGTNGTKRFDNPVLPFNDGVYFASTEKSNIIRGWIFGTTLDSKTQSLLIVNNATNVVIKVCEFQFCNDPFLGVYYHKNNKSWMESEFRVYSSANNCTFEYVSQPFLMDLEGKQGNFKNLREFVFKNIDGYFKIYSKHTPINLVRDLPQGFSALEPLVDLPIGINITRFQTLLALHRSYLTPGDSSSGWTAGAAAYYVGYLQPRTFLLKYNENGTITDAVDCALDPLSETKCTLKSFTVEKGIYQTSNFRVQPTESIVRFPNITNLCPFGEVFNATRFASVYAWNRKRISNCVADYSVLYNSASFSTFKCYGVSPTKLNDLCFTNVYADSFVIRGDEVRQIAPGQTGKIADYNYKLPDDFTGCVIAWNSNNLDSKVGGNYNYLYRLFRKSNLKPFERDISTEIYQAGSTPCNGVEGFNCYFPLQSYGFQPTNGVGYQPYRVVVLSFELLHAPATVCGPKKSTNLVKNKCVNFNFNGLTGTGVLTESNKKFLPFQQFGRDIADTTDAVRDPQTLEILDITPCSFGGVSVITPGTNTSNQVAVLYQDVNCTEVPVAIHADQLTPTWRVYSTGSNVFQTRAGCLIGAEHVNNSYECDIPIGAGICASYQTQTNSPRRARSVASQSIIAYTMSLGAENSVAYSNNSIAIPTNFTISVTTEILPVSMTKTSVDCTMYICGDSTECSNLLLQYGSFCTQLNRALTGIAVEQDKNTQEVFAQVKQIYKTPPIKDFGGFNFSQILPDSSKPSKRSFIEDLLFNKVTLADAGFIKQYGDCLGDIAARDLICAQKFNGLTVLPPLLTDEMIAQYTSALLAGTITSGWTFGAGAALQIPFAMQMAYRFNGIGVTQNVLYENQKLIANQFNSAIGKIQDSLSSTASALGKLQDVVNQNAQALNTLVKQLSSNFGAISSVLNDILSRLDKVEAEVQIDRLITGRLQSLQTYVTQQLIRAAEIRASANLAATKMSECVLGQSKRVDFCGKGYHLMSFPQSAPHGVVFLHVTYVPAQEKNFTTAPAICHDGKAHFPREGVFVSNGTHWFVTQRNFYEPQIITTDNTFVSGNCDVVIGIVNNTVYDPLQPELDSFKEELDKYFKNHTSPDVDLGDISGINASVVNIQKEIDRLNEVAKNLNESLIDLQELGKYEQYIKGGGGSDIDPYKEFGSSYQLLNFLPLDFFPDLNALVDTATALYEEELTGREHCSPHHTAIRQALVCWDELTKLIAWMSSNITSEQVRTIIVNHVNDTWGLKVRQSLWFHLSCLTFGQHTVQEFLVSFGVWIRTPAPYRPPNAPILSTLPEHTVIC

SEQ ID NO: 6691 - protein, 1365 aa, Artificial Sequence
  SARS-CoV-2/Iceland/280/2020__EPI_ISL_417608 spike protein (1-1211) WhcAg construct
MFVFLVLLPLVSSQCVNLTTRTQLPPAYTNSFTRGVYYPDKVFRSSVLHSTQDLFLPFFSNVTWFHAIHVSGTNGTKRFDNPVLPFNDGVYFASTEKSNIIRGWIFGTTLDSKTQSLLIVNNATNVVIKVCEFQFCNDPFLGVYYHKNNKSWMESEFRVYSSANNCTFEYVSQPFLMDLEGKQGNFKNLREFVFKNIDGYFKIYSKHTPINLVRDLPQGFSALEPLVDLPIGINITRFQTLLALHRSYLTPGDSSSGWTAGAAAYYVGYLQPRTFLLKYNENGTITDAVDCALDPLSETKCTLKSFTVEKGIYQTSNFRVQPTESIVRFPNITNLCPFGEVFNATRFASVYAWNRKRISNCVADYSVLYNSASFSTFKCYGVSPTKLNDLCFTNVYADSFVIRGDEVRQIAPGQTGKIADYNYKLPDDFTGCVIAWNSNNLDSKVGGNYNYLYRLFRKSNLKPFERDISTEIYQAGSTPCNGVEGFNCYFPLQSYGFQPTNGVGYQPYRVVVLSFELLHAPATVCGPKKSTNLVKNKCVNFNFNGLTGTGVLTESNKKFLPFQQFGRDIADTTDAVRDPQTLEILDITPCSFGGVSVITPGTNTSNQVAVLYQGVNCTEVPVAIHADQLTPTWRVYSTGSNVFQTRAGCLIGAEHVNNSYECDIPIGAGICASYHTQTNSPRRARSVASQSIIAYTMSLGAENSVAYSNNSIAIPTNFTISVTTEILPVSMTKTSVDCTMYICGDSTECSNLLLQYGSFCTQLNRALTGIAVEQDKNTQEVFAQVKQIYKTPPIKDFGGFNFSQILPDPSKPSKRSFIEDLLFNKVTLADAGFIKQYGDCLGDIAARDLICAQKFNGLTVLPPLLTDEMIAQYTSALLAGTITSGWTFGAGAALQIPFAMQMAYRFNGIGVTQNVLYENQKLIANQFNSAIGKIQDSLSSTASALGKLQDVVNQNAQALNTLVKQLSSNFGAISSVLNDILSRLDKVEAEVQIDRLITGRLQSLQTYVTQQLIRAAEIRASANLAATKMSECVLGQSKRVDFCGKGYHLMSFPQSAPHGVVFLHVTYVPAQEKNFTTAPAICHDGKAHFPREGVFVSNGTHWFVTQRNFYEPQIITTDNTFVSGNCDVVIGIVNNTVYDPLQPELDSFKEELDKYFKNHTSPDVDLGDISGINASVVNIQKEIDRLNEVAKNLNESLIDLQELGKYEQYIKGGGGSDIDPYKEFGSSYQLLNFLPLDFFPDLNALVDTATALYEEELTGREHCSPHHTAIRQALVCWDELTKLIAWMSSNITSEQVRTIIVNHVNDTWGLKVRQSLWFHLSCLTFGQHTVQEFLVSFGVWIRTPAPYRPPNAPILSTLPEHTVIC

SEQ ID NO: 6692 - protein, 1365 aa, Artificial Sequence; identical to SEQ ID NO: 6647
  SARS-CoV-2/Iceland/247/2020__EPI_ISL_417575 spike protein (1-1211) WhcAg construct

SEQ ID NO: 6693 - protein, 1365 aa, Artificial Sequence
  SARS-CoV-2/Iceland/238/2020__EPI_ISL_417566 spike protein (1-1211) WhcAg construct
MFVFLVLLPLVSSQCVNLTTRTQLPPAYTNSFTRGVYYPDKVFRSSVLHSTQDLFLPFFSNVTWFHAIHVSGTNGTKRFDNPVLPFNDGVYFASTEKSNIIRGWIFGTTLDSKTQSLLIVNNATNVVIKVCEFQFCNDPFLGVYYHKNNKSWMESEFRVYSSANNCTFEYVSQPFLMDLEGKQGNFKNLREFVFKNIDGYFKIYSKHTPINLVRDLPQGFSALEPLVDLPIGINITRFQTLLALHRSYLTPGDSSSGWTAGAAAYYVGYLQPRTFLLKYNENGTITDAVDCALDPLSETKCTLKSFTVEKGIYQTSNFRVQPTESIVRFPNITNLCPFGEVFNATRFASVYAWNRKRISNCVADYSVLYNSASFSTFKCYGVSPTKLNDLCFTNVYADSFVIRGDEVRQIAPGQTGKIADYNYKLPDDFTGCVIAWNSNNLDSKVGGNYNYLYRLFRKSNLKPFERDISTEIYQAGSTPCNGVEGFNCYFPLQSYGFQPTNGVGYQPYRVVVLSFELLHAPATVCGPKKSTNLVKNKCVNFNFNGLTGTGVLTESNKKFLPFQQFGRDIADTTDAVRDPQTLEILDITPCSFGGVSVITPGTNTSNQVAVLYQGVNCTEVPVAIHADQLTPTWRVYSTGSNVFQTRAGCLIGAEHVNNSYECDIPIGAGICASYQTQTNSPRRARSVASQSIIAYTMSLGAENSVAYSNNSIAIPTNFTISVTTEILPVSMTKTSVDCTMYICGDSTECSNLLLQYGSFCTQLNRALTGIAVEQDKNTQEVFAQVKQIYKTPPIKDFGGFNFSQILPDPSKPSKRSFIEDLLFNKVTLADVGFIKQYGDCLGDIAARDLICAQKFNGLTVLPPLLTDEMIAQYTSALLAGTITSGWTFGAGAALQIPFAMQMAYRFNGIGVTQNVLYENQKLIANQFNSAIGKIQDSLSSTASALGKLQDVVNQNAQALNTLVKQLSSNFGAISSVLNDILSRLDKVEAEVQIDRLITGRLQSLQTYVTQQLIRAAEIRASANLAATKMSECVLGQSKRVDFCGKGYHLMSFPQSAPHGVVFLHVTYVPAQEKNFTTAPAICHDGKAHFPREGVFVSNGTHWFVTQRNFYEPQIITTDNTFVSGNCDVVIGIVNNTVYDPLQPELDSFKEELDKYFKNHTSPDVDLGDISGINASVVNIQKEIDRLNEVAKNLNESLIDLQELGKYEQYIKGGGGSDIDPYKEFGSSYQLLNFLPLDFFPDLNALVDTATALYEEELTGREHCSPHHTAIRQALVCWDELTKLIAWMSSNITSEQVRTIIVNHVNDTWGLKVRQSLWFHLSCLTFGQHTVQEFLVSFGVWIRTPAPYRPPNAPILSTLPEHTVIC

SEQ ID NO: 6694 - protein, 1365 aa, Artificial Sequence
  SARS-CoV-2/Greece/16/2020__EPI_ISL_418265 spike protein (1-1211) WhcAg construct
MFVFLVLLPLVSSQCVNLTTRTQLPPAYTNSFTRGVYYPDKVFRSSVLHSTQDLFLPFFSNVTWFHAIHVSGTNGTKRFDNPVLPFNDGVYFASTEKSNIIRGWIFGTTLDSKTQSLLIVNNATNVVIKVCEFQFCNDPFLGVYYHKNNKSWMESEFRVYSSANNCTFEYVSQPFLMDLEGKQGNFKNLREFVFKNVDGYFKIYSKHTPINLVRDLPQGFSALEPLVDLPIGINITRFQTLLALHRSYLTPGDSSSGWTAGAAAYYVGYLQPRTFLLKYNENGTITDAVDCALDPLSETKCTLKSFTVEKGIYQTSNFRVQPTESIVRFPNITNLCPFGEVFNATRFASVYAWNRKRISNCVADYSVLYNSASFSTFKCYGVSPTKLNDLCFTNVYADSFVIRGDEVRQIAPGQTGKIADYNYKLPDDFTGCVIAWNSNNLDSKVGGNYNYLYRLFRKSNLKPFERDISTEIYQAGSTPCNGVEGFNCYFPLQSYGFQPTNGVGYQPYRVVVLSFELLHAPATVCGPKKSTNLVKNKCVNFNFNGLTGTGVLTESNKKFLPFQQFGRDIADTTDAVRDPQTLEILDITPCSFGGVSVITPGTNTSNQVAVLYQDVNCTEVPVAIHADQLTPTWRVYSTGSNVFQTRAGCLIGAEHVNNSYECDIPIGAGICASYQTQTNSPRRARSVASQSIIAYTMSLGAENSVAYSNNSIAIPTNFTISVTTEILPVSMTKTSVDCTMYICGDSTECSNLLLQYGSFCTQLNRALTGIAVEQDKNTQEVFAQVKQIYKTPPIKDFGGFNFSQILPDPSKPSKRSFIEDLLFNKVTLADAGFIKQYGDCLGDIAARDLICAQKFNGLTVLPPLLTDEMIAQYTSALLAGTITSGWTFGAGAALQIPFAMQMAYRFNGIGVTQNVLYENQKLIANQFNSAIGKIQDSLSSTASALGKLQDVVNQNAQALNTLVKQLSSNFGAISSVLNDILSRLDKVEAEVQIDRLITGRLQSLQTYVTQQLIRAAEIRASANLAATKMSECVLGQSKRVDFCGKGYHLMSFPQSAPHGVVFLHVTYVPAQEKNFTTAPAICHDGKAHFPREGVFVSNGTHWFVTQRNFYEPQIITTDNTFVSGNCDVVIGIVNNTVYDPLQPELDSFKEELDKYFKNHTSPDVDLGDISGINASVVNIQKEIDRLNEVAKNLNESLIDLQELGKYEQYIKGGGGSDIDPYKEFGSSYQLLNFLPLDFFPDLNALVDTATALYEEELTGREHCSPHHTAIRQALVCWDELTKLIAWMSSNITSEQVRTIIVNHVNDTWGLKVRQSLWFHLSCLTFGQHTVQEFLVSFGVWIRTPAPYRPPNAPILSTLPEHTVIC

SEQ ID NO: 6695 - protein, 1365 aa, Artificial Sequence
  SARS-CoV-2/Iceland/319/2020__EPI_ISL_417648 spike protein (1-1211) WhcAg construct
MFVFLVLLPLVSSQCVNLTTRTQLPPAYTNSFTRGVYYPDKVFRSSVLHSTQDLFLPFFSNVTWFHAIHVSGTNGTKRFDNPVLPFNDGVYFASTEKSNIIRGWIFGTTLDSKTQSLLIVNNATNVVIKVCEFQFCNDPFLGVYYHKNNKSWMESEFRVYSSANNCTFEYVSQPFLIDLEGKQGNFKNLREFVFKNIDGYFKIYSKHTPINLVRDLPQGFSALEPLVDLPIGINITRFQTLLALHRSYLTPGDSSSGWTAGAAAYYVGYLQPRTFLLKYNENGTITDAVDCALDPLSETKCTLKSFTVEKGIYQTSNFRVQPTESIVRFPNITNLCPFGEVFNATRFASVYAWNRKRISNCVADYSVLYNSASFSTFKCYGVSPTKLNDLCFTNVYADSFVIRGDEVRQIAPGQTGKIADYNYKLPDDFTGCVIAWNSNNLDSKVGGNYNYLYRLFRKSNLKPFERDISTEIYQAGSTPCNGVEGFNCYFPLQSYGFQPTNGVGYQPYRVVVLSFELLHAPATVCGPKKSTNLVKNKCVNFNFNGLTGTGVLTESNKKFLPFQQFGRDIADTTDAVRDPQTLEILDITPCSFGGVSVITPGTNTSNQVAVLYQGVNCTEVPVAIHADQLTPTWRVYSTGSNVFQTRAGCLIGAEHVNNSYECDIPIGAGICASYQTQTNSPRRARSVASQSIIAYTMSLGAENSVAYSNNSIAIPTNFTISVTTEILPVSMTKTSVDCTMYICGDSTECSNLLLQYGSFCTQLNRALTGIAVEQDKNTQEVFAQVKQIYKTPPIKDFGGFNFSQILPDPSKPSKRSFIEDLLFNKVTLADAGFIKQYGDCLGDIAARDLICAQKFNGLTVLPPLLTDEMIAQYTSALLAGTITSGWTFGAGAALQIPFAMQMAYRFNGIGVTQNVLYENQKLIANQFNSAIGKIQDSLSSTASALGKLQDVVNQNAQALNTLVKQLSSNFGAISSVLNDILSRLDKVEAEVQIDRLITGRLQSLQTYVTQQLIRAAEIRASANLAATKMSECVLGQSKRVDFCGKGYHLMSFPQSAPHGVVFLHVTYVPAQEKNFTTAPAICHDGKAHFPREGVFVSNGTHWFVTQRNFYEPQIITTDNTFVSGNCDVVIGIVNNTVYDPLQPELDSFKEELDKYFKNHTSPDVDLGDISGINASVVNIQKEIDRLNEVAKNLNESLIDLQELGKYEQYIKGGGGSDIDPYKEFGSSYQLLNFLPLDFFPDLNALVDTATALYEEELTGREHCSPHHTAIRQALVCWDELTKLIAWMSSNITSEQVRTIIVNHVNDTWGLKVRQSLWFHLSCLTFGQHTVQEFLVSFGVWIRTPAPYRPPNAPILSTLPEHTVIC

SEQ ID NO: 6696 - protein, 1365 aa, Artificial Sequence
  SARS-CoV-2/Congo/94/2020__EPI_ISL_417947 spike protein (1-1211) WhcAg construct
MFVFLVLLPLVSSQCVNLTTRTQLPPAYTNSFTRGVYYPDKVFRSSVLHSTQDLFLPFFSNVTWFHAIHVSGTNGTKRFDNPVLPFNDGVYFASTEKSNIIRGWIFGTTLDSKTQSLLIVNNATNVVIKVCEFQFCNDPFLGVYYHKNNKSWMESEFRVYSSANNCTFEYVSQPFLMDLEGKQGNFKNLREFVFKNIDGYFKIYSKHTPINLVRDLPQGFSALEPLVDLPIGINITRFQTLLALHRSYLTPGDSSSGWTAGAAAYYVGYLQPRTFLLKYNENGTITDAVDCALDPLSETKCTLKSFTVEKGIYQTSNFRVQPTESIVRFPNITNLCPFGEVFNATRFASVYAWNRKRISNCVADYSVLYNSASFSTFKCYGVSPTKLNDLCFTNVYADSFVIRGDEVRQIAPGQTGKIADYNYKLPDDFTGCVIAWNSNNLDSKVGGNYNYLYRLFRKSNLKPFERDISTEIYQAGSTPCNGVEGFNCYFPLQSYGFQPTNGVGYQPYRVVVLSFELLHAPATVCGPKKSTNLVKNKCVNFNFNGLTGTGVLTESNKKFLPFQQFGRDIADTTDAVRDPQTLEILDITPCSFGGVSVITPGTNTSNQVAVLYQGVNCTEVPVAIHADQLTPTWRVYSTGSNVFQTRAGCLIGAEHVNNSYECDIPIGAGICASYQTQTNSPRRARSVASQSIIAYTMSLGAENSVAYSNNSIAIPTNFTISVTTEILPVSMTKTSVDCTMYICGDSTECSNLLLQYGSFCTQLNRALTGIAVEQDKNTQEVFAQVKQIYKTPPIKDFGGFNFSQILPDPSKPSKRSFIEDILFNKVTLADAGFIKQYGDCLGDIAARDLICAQKFNGLTVLPPLLTDEMIAQYTSALLAGTITSGWTFGAGAALQIPFAMQMAYRFNGIGVTQNVLYENQKLIANQFNSAIGKIQDSLSSTASALGKLQDVVNQNAQALNTLVKQLSSNFGAISSVLNDILSRLDKVEAEVQIDRLITGRLQSLQTYVTQQLIRAAEIRASANLAATKMSECVLGQSKRVDFCGKGYHLMSFPQSAPHGVVFLHVTYVPAQEKNFTTAPAICHDGKAHFPREGVFVSNGTHWFVTQRNFYEPQIITTDNTFVSGNCDVVIGIVNNTVYDPLQPELDSFKEELDKYFKNHTSPDVDLGDISGINASVVNIQKEIDRLNEVAKNLNESLIDLQELGKYEQYIKGGGGSDIDPYKEFGSSYQLLNFLPLDFFPDLNALVDTATALYEEELTGREHCSPHHTAIRQALVCWDELTKLIAWMSSNITSEQVRTIIVNHVNDTWGLKVRQSLWFHLSCLTFGQHTVQEFLVSFGVWIRTPAPYRPPNAPILSTLPEHTVIC

SEQ ID NO: 6697 - protein, 1365 aa, Artificial Sequence
  SARS-CoV-2/Congo/158/2020__EPI_ISL_417950 spike protein (1-1211) WhcAg construct
MFVFLVLLPLVSSQCVNLTTRTQLPPAYTNSFTRGVYYPDKVFRSSVLHSTQDLFLPFFSNVTWFHAIHVSGTNGTKRFDNPVLPFNDGVYFASTEKSNIIRGWIFGTTLDSKTQSLLIVNNATNVVIKVCEFQFCNDPFLGVYYHKNNKSWMESEFRVYSSANNCTFEYVSQPFLMDLEGKQGNFKNLREFVFKNIDGYFKIYSKHTPINLVRDLPQGFSALEPLVDLPIGINITRFQTLLALHRSYLTPGDSSSGWTAGAAAYYVGYLQPRTFLLKYNENGTITDAVDCALDPLSETKCTLKSFTVEKGIYQTSNFRVQPTESIVRFPNITNLCPFGEVFNATRFASVYAWNRKRISNCVADYSVLYNSASFSTFKCYGVSPTKLNDLCFTNVYADSFVIRGDEVRQIAPGQTGKIADYNYKLPDDFTGCVIAWNSNNLDSKVGGNYNYLYRLFRKSNLKPFERDISTEIYQAGSTPCNGVEGFNCYFPLQSYGFQPTNGVGYQPYRVVVLSFELLHAPATVCGPKKSTNLVKNKCVNFNFNGLTGTGVLTESNKKFLPFQQFGRDIADTTDAVRDPQTLEILDITPCSFGGVSVITPGTNTSNQVAVLYQDVNCTEVPVAIHADQLTPTWRVYSTGSNVFQTRAGCLIGAEHVNNSYECDIPIGAGICASYQTQTNSPRRARSVASQSIIAYTMSLGAENSVAYSNNSIAIPTNFTISVTTEILPVSMTKTSVDCTMYICGDSTECSNLLLQYGSFCTQLNRALTGIAVEQDKNTQEVFAQVKQIYKTPPIKDFGGFNFSQILPDPSKPSKRSFIEDLLFNKVTLADAGFIKQYGDCLGDIAARDLICAQKFNGLTVLPPLLTDEMIAQYTSALLAGTITSGWTFGAGAALQIPFAMQMAYRFNGIGVTQNVLYENQKLIANQFNSAIGKIQDSLSSTASALGKLQDVVNQNAQALNTLVKQLSSNFGAISSVLNDILSRLDKVEAEVQIDRLITGRLQSLQTYVTQQLIRAAEIRASANLAATKMSECVLGQSKRVDFCGKGYHLMSFPQSAPHGVVFLHVTYVPAQEKNFTTAPAICHDGKAHFPREGVFVSNGTHWFVTQRNFYEPQIITTDNTFLSGNCDVVIGIVNNTVYDPLQPELDSFKEELDKYFKNHTSPDVDLGDISGINASVVNIQKEIDRLNEVAKNLNESLIDLQELGKYEQYIKGGGGSDIDPYKEFGSSYQLLNFLPLDFFPDLNALVDTATALYEEELTGREHCSPHHTAIRQALVCWDELTKLIAWMSSNITSEQVRTIIVNHVNDTWGLKVRQSLWFHLSCLTFGQHTVQEFLVSFGVWIRTPAPYRPPNAPILSTLPEHTVIC

SEQ ID NO: 6698 - protein, 1365 aa, Artificial Sequence
  SARS-CoV-2/USA/UT-00034/2020__EPI_ISL_417977 spike protein (1-1211) WhcAg construct
MFVFLVLLPLVSSQCVNLTTRTQLPPAYTNSFTRGVYYPDKVFRSSVLHSTQDLFLPFFSNVTWFHAIHVSGTNGTKRFDNPVLPFNDGVYFASTEKSNIIRGWIFGTTLDSKTQSLLIVNNATNVVIKVCEFQFCNDPFLGVYYYKNNKSWMESEFRVYSSANNCTFEYVSQPFLMDLEGKQGNFKNLREFVFKNIDGYFKIYSKHTPINLVRDLPQGFSALEPLVDLPIGINITRFQTLLALHRSYLTPGDSSSGWTAGAAAYYVGYLQPRTFLLKYNENGTITDAVDCALDPLSETKCTLKSFTVEKGIYQTSNFRVQPTESIVRFPNITNLCPFGEVFNATRFASVYAWNRKRISNCVADYSVLYNSASFSTFKCYGVSPTKLNDLCFTNVYADSFVIRGDEVRQIAPGQTGKIADYNYKLPDDFTGCVIAWNSNNLDSKVGGNYNYLYRLFRKSNLKPFERDISTEIYQAGSTPCNGVEGFNCYFPLQSYGFQPTNGVGYQPYRVVVLSFELLHAPATVCGPKKSTNLVKNKCVNFNFNGLTGTGVLTESNKKFLPFQQFGRDIADTTDAVRDPQTLEILDITPCSFGGVSVITPGTNTSNQVAVLYQGVNCTEVPVAIHADQLTPTWRVYSTGSNVFQTRAGCLIGAEHVNNSYECDIPIGAGICASYQTQTNSPRRARSVASQSIIAYTMSLGAENSVAYSNNSIAIPTNFTISVTTEILPVSMTKTSVDCTMYICGDSTECSNLLLQYGSFCTQLNRALTGIAVEQDKNTQEVFAQVKQIYKTPPIKDFGGFNFSQILPDPSKPSKRSFIEDLLFNKVTLADAGFIKQYGDCLGDIAARDLICAQKFNGLTVLPPLLTDEMIAQYTSALLAGTITSGWTFGAGAALQIPFAMQMAYRFNGIGVTQNVLYENQKLIANQFNSAIGKIQDSLSSTASALGKLQDVVNQNAQALNTLVKQLSSNFGAISSVLNDILSRLDKVEAEVQIDRLITGRLQSLQTYVTQQLIRAAEIRASANLAATKMSECVLGQSKRVDFCGKGYHLMSFPQSAPHGVVFLHVTYVPAQEKNFTTAPAICHDGKAHFPREGVFVSNGTHWFVTQRNFYEPQIITTDNTFVSGNCDVVIGIVNNTVYDPLQPELDSFKEELDKYFKNHTSPDVDLGDISGINASVVNIQKEIDRLNEVAKNLNESLIDLQELGKYEQYIKGGGGSDIDPYKEFGSSYQLLNFLPLDFFPDLNALVDTATALYEEELTGREHCSPHHTAIRQALVCWDELTKLIAWMSSNITSEQVRTIIVNHVNDTWGLKVRQSLWFHLSCLTFGQHTVQEFLVSFGVWIRTPAPYRPPNAPILSTLPEHTVIC

SEQ ID NO: 6699 - protein, 1365 aa, Artificial Sequence
  SARS-CoV-2/USA/UT-00033/2020__EPI_ISL_417976 spike protein (1-1211) WhcAg construct
MFVFLVLLPLVSSQCVNLTTRTQLPPAYTNSFTRGVYYPDKVFRSSVLHSTQDLFLPFFSNVTWFHAIHVSGTNGTKRFDNPVLPFNDGVYFASTEKSNIIRGWIFGTTLDSKTQSLLIVNNATNVVIKVCEFQFCNDPFLGVYYHKNNKSWMESEFRVYSSANNCTFEYVSQPFLMDLEGKQGNFKNLREFVFKNIDGYFKIYSKHTPINLVRDLPQGFSALEPLVDLPIGINITRFQTLLALHRSYLTPGDSSSGLTAGAAAYYVGYLQPRTFLLKYNENGTITDAVDCALDPLSETKCTLKSFTVEKGIYQTSNFRVQPTESIVRFPNITNLCPFGEVFNATRFASVYAWNRKRISNCVADYSVLYNSASFSTFKCYGVSPTKLNDLCFTNVYADSFVIRGDEVRQIAPGQTGKIADYNYKLPDDFTGCVIAWNSNNLDSKVGGNYNYLYRLFRKSNLKPFERDISTEIYQAGSTPCNGVEGFNCYFPLQSYGFQPTNGVGYQPYRVVVLSFELLHAPATVCGPKKSTNLVKNKCVNFNFNGLTGTGVLTESNKKFLPFQQFGRDIADTTDAVRDPQTLEILDITPCSFGGVSVITPGTNTSNQVAVLYQGVNCTEVPVAIHADQLTPTWRVYSTGSNVFQTRAGCLIGAEHVNNSYECDIPIGAGICASYQTQTNSPRRARSVASQSIIAYTMSLGAENSVAYSNNSIAIPTNFTISVTTEILPVSMTKTSVDCTMYICGDSTECSNLLLQYGSFCTQLNRALTGIAVEQDKNTQEVFAQVKQIYKTPPIKDFGGFNFSQILPDPSKPSKRSFIEDLLFNKVTLADAGFIKQYGDCLGDIAARDLICAQKFNGLTVLPPLLTDEMIAQYTSALLAGTITSGWTFGAGAALQIPFAMQMAYRFNGIGVTQNVLYENQKLIANQFNSAIGKIQDSLSSTASALGKLQDVVNQNAQALNTLVKQLSSNFGAISSVLNDILSRLDKVEAEVQIDRLITGRLQSLQTYVTQQLIRAAEIRASANLAATKMSECVLGQSKRVDFCGKGYHLMSFPQSAPHGVVFLHVTYVPAQEKNFTTAPAICHDGKAHFPREGVFVSNGTHWFVTQRNFYEPQIITTDNTFVSGNCDVVIGIVNNTVYDPLQPELDSFKEELDKYFKNHTSPDVDLGDISGINASVVNIQKEIDRLNEVAKNLNESLIDLQELGKYEQYIKGGGGSDIDPYKEFGSSYQLLNFLPLDFFPDLNALVDTATALYEEELTGREHCSPHHTAIRQALVCWDELTKLIAWMSSNITSEQVRTIIVNHVNDTWGLKVRQSLWFHLSCLTFGQHTVQEFLVSFGVWIRTPAPYRPPNAPILSTLPEHTVIC

SEQ ID NO: 6700 - protein, 1365 aa, Artificial Sequence
  SARS-CoV-2/USA/WI-13/2020__EPI_ISL_417516 spike protein (1-1211) WhcAg construct
MFVFLVLLPLVSSQCVNLTTRTQLPPAYTNSFTRGVYYPDKVFRSSVLHSTQDLFLPFFSNVTWFHAIHVSGTNGTKRFDNPVLPFNDGVYFASTEKSNIIRGWIFGTTLDSKTQSLLIVNNATNVVIKVCEFQFCNDPFLGVYYHKNNKSWMESEFRVYSSANNCTFEYVSQPFLMDLEGKQGNFKNLREFVFKNIDGYFKIYSKHTPINLVRDLPQGFSALEPLVDLPIGINITRFQTLLALHRSYLTPGDSSSGWTAGAAAYYVGYLQPRTFLLKYNENGTITDAVDCALDPLSETKCTLKSFTVEKGIYQTSNFRVLPTESIVRFPNITNLCPFGEVFNATRFASVYAWNRKRISNCVADYSVLYNSASFSTFKCYGVSPTKLNDLCFTNVYADSFVIRGDEVRQIAPGQTGKIADYNYKLPDDFTGCVIAWNSNNLDSKVGGNYNYLYRLFRKSNLKPFERDISTEIYQAGSTPCNGVEGFNCYFPLQSYGFQPTNGVGYQPYRVVVLSFELLHAPATVCGPKKSTNLVKNKCVNFNFNGLTGTGVLTESNKKFLPFQQFGRDIADTTDAVRDPQTLEILDITPCSFGGVSVITPGTNTSNQVAVLYQGVNCTEVPVAIHADQLTPTWRVYSTGSNVFQTRAGCLIGAEHVNNSYECDIPIGAGICASYQTQTNSPRRARSVASQSIIAYTMSLGAENSVAYSNNSIAIPTNFTISVTTEILPVSMTKTSVDCTMYICGDSTECSNLLLQYGSFCTQLNRALTGIAVEQDKNTQEVFAQVKQIYKTPPIKDFGGFNFSQILPDPSKPSKRSFIEDLLFNKVTLADAGFIKQYGDCLGDIAARDLICAQKFNGLTVLPPLLTDEMIAQYTSALLAGTITSGWTFGAGAALQIPFAMQMAYRFNGIGVTQNVLYENQKLIANQFNSAIGKIQDSLSSTASALGKLQDVVNQNAQALNTLVKQLSSNFGAISSVLNDILSRLDKVEAEVQIDRLITGRLQSLQTYVTQQLIRAAEIRASANLAATKMSECVLGQSKRVDFCGKGYHLMSFPQSAPHGVVFLHVTYVPAQEKNFTTAPAICHDGKAHFPREGVFVSNGTHWFVTQRNFYEPQIITTDNTFVSGNCDVVIGIVNNTVYDPLQPELDSFKEELDKYFKNHTSPDVDLGDISGINASVVNIQKEIDRLNEVAKNLNESLIDLQELGKYEQYIKGGGGSDIDPYKEFGSSYQLLNFLPLDFFPDLNALVDTATALYEEELTGREHCSPHHTAIRQALVCWDELTKLIAWMSSNITSEQVRTIIVNHVNDTWGLKVRQSLWFHLSCLTFGQHTVQEFLVSFGVWIRTPAPYRPPNAPILSTLPEHTVIC

SEQ ID NO: 6701 - protein, 1364 aa, Artificial Sequence
  SARS-CoV-2/India/1-27/2020__EPI_ISL_413522 spike protein (1-1210) WhcAg construct
MFVFLVLLPLVSSQCVNLTTRTQLPPAYTNSFTRGVYYPDKVFRSSVLHSTQDLFLPFFSNVTWFHAIHVSGTNGTKRFDNPVLPFNDGVYFASTEKSNIIRGWIFGTTLDSKTQSLLIVNNATNVVIKVCEFQFCNDPFLGVYHKNNKSWMESEFRVYSSANNCTFEYVSQPFLMDLEGKQGNFKNLREFVFKNIDGYFKIYSKHTPINLVRDLPQGFSALEPLVDLPIGINITRFQTLLALHRSYLTPGDSSSGWTAGAAAYYVGYLQPRTFLLKYNENGTITDAVDCALDPLSETKCTLKSFTVEKGIYQTSNFRVQPTESIVRFPNITNLCPFGEVFNATRFASVYAWNRKRISNCVADYSVLYNSASFSTFKCYGVSPTKLNDLCFTNVYADSFVIRGDEVIQIAPGQTGKIADYNYKLPDDFTGCVIAWNSNNLDSKVGGNYNYLYRLFRKSNLKPFERDISTEIYQAGSTPCNGVEGFNCYFPLQSYGFQPTNGVGYQPYRVVVLSFELLHAPATVCGPKKSTNLVKNKCVNFNFNGLTGTGVLTESNKKFLPFQQFGRDIADTTDAVRDPQTLEILDITPCSFGGVSVITPGTNTSNQVAVLYQDVNCTEVPVAIHADQLTPTWRVYSTGSNVFQTRAGCLIGAEHVNNSYECDIPIGAGICASYQTQTNSPRRARSVASQSIIAYTMSLGAENSVAYSNNSIAIPTNFTISVTTEILPVSMTKTSVDCTMYICGDSTECSNLLLQYGSFCTQLNRALTGIAVEQDKNTQEVFAQVKQIYKTPPIKDFGGFNFSQILPDPSKPSKRSFIEDLLFNKVTLADAGFIKQYGDCLGDIAARDLICAQKFNGLTVLPPLLTDEMIAQYTSALLAGTITSGWTFGAGAALQIPFAMQMAYRFNGIGVTQNVLYENQKLIANQFNSAIGKIQDSLSSTASALGKLQDVVNQNAQALNTLVKQLSSNFGAISSVLNDILSRLDKVEAEVQIDRLITGRLQSLQTYVTQQLIRAAEIRASANLAATKMSECVLGQSKRVDFCGKGYHLMSFPQSAPHGVVFLHVTYVPAQEKNFTTAPAICHDGKAHFPREGVFVSNGTHWFVTQRNFYEPQIITTDNTFVSGNCDVVIGIVNNTVYDPLQPELDSFKEELDKYFKNHTSPDVDLGDISGINASVVNIQKEIDRLNEVAKNLNESLIDLQELGKYEQYIKGGGGSDIDPYKEFGSSYQLLNFLPLDFFPDLNALVDTATALYEEELTGREHCSPHHTAIRQALVCWDELTKLIAWMSSNITSEQVRTIIVNHVNDTWGLKVRQSLWFHLSCLTFGQHTVQEFLVSFGVWIRTPAPYRPPNAPILSTLPEHTVIC

SEQ ID NO: 6702 - protein, 1359 aa, Artificial Sequence
  SARS-CoV-2/pangolin/Guangxi/P4L/2017__EPI_ISL_410538 spike protein (1-1205) WhcAg construct
MFVFLFVLPLVSSQCVNLTTRTGIPPGYTNSSTRGVYYPDKVFRSSILHLTQDLFLPFFSNVTWFNTINYQGGFKKFDNPVLPFNDGVYFASTEKSNIIRGWIFGTTLDARTQSLLIVNNATNVVIKVCEFQFCTDPFLGVYYHNNNKTWVENEFRVYSSANNCTFEYISQPFLMDLEGKQGNFKNLREFVFKNVDGYFKIYSKHTPIDLVRDLPRGFAALEPLVDLPIGINITRFQTLLALHRSYLTPGNLESGWTTGAAAYYVGYLQQRTFLLSYNQNGTITDAVDCSLDPLSETKCTLKSLTVEKGIYQTSNFRVQPTISIVRFPNITNLCPFGEVFNASKFASVYAWNRKRISNCVADYSVLYNSTSFSTFKCYGVSPTKLNDLCFTNVYADSFVVKGDEVRQIAPGQTGVIADYNYKLPDDFTGCVIAWNSVKQDALTGGNYGYLYRLFRKSKLKPFERDISTEIYQAGSTPCNGQVGLNCYYPLERYGFHPTTGVNYQPFRVVVLSFELLNGPATVCGPKLSTTLVKDKCVNFNFNGLTGTGVLTTSKKQFLPFQQFGRDISDTTDAVRDPQTLEILDITPCSFGGVSVITPGTNTSNQVAVLYQDVNCTEVPMAIHAEQLTPAWRVYSAGANVFQTRAGCLVGAEHVNNSYECDIPVGAGICASYHSMSSLRSVNQRSIIAYTMSLGAENSVAYSNNSIAIPTNFTISVTTEILPVSMTKTSVDCTMYICGDSIECSNLLLQYGSFCTQLNRALTGIAVEQDKNTQEVFAQVKQIYKTPPIKDFGGFNFSQILPDPSKPSKRSFIEDLLFNKVTLADAGFIKQYGDCLGDIAARDLICAQKFNGLTVLPPLLTDEMIAQYTSALLAGTITSGWTFGAGAALQIPFAMQMAYRFNGIGVTQNVLYENQKLIANQFNSAIGKIQDSLSSTASALGKLQDVVNQNAQALNTLVKQLSSNFGAISSVLNDILSRLDKVEAEVQIDRLITGRLQSLQTYVTQQLIRAAEIRASANLAATKMSECVLGQSKRVDFCGKGYHLMSFPQSAPHGVVFLHVTYVPAQEKNFTTAPAICHEGKAHFPREGVFVSNGTHWFITQRNFYEPQIITTDNTFVSGSCDVVIGIVNNTVYDPLQPELDSFKEELDKYFKNHTSPDVDLGDISGINASVVNIQKEIDRLNEVAKNLNESPIDLQELGKYEQYIKGGGGSDIDPYKEFGSSYQLLNFLPLDFFPDLNALVDTATALYEEELTGREHCSPHHTAIRQALVCWDELTKLIAWMSSNITSEQVRTIIVNHVNDTWGLKVRQSLWFHLSCLTFGQHTVQEFLVSFGVWIRTPAPYRPPNAPILSTLPEHTVIC

SEQ ID NO: 6703 - protein, 1359 aa, Artificial Sequence
  SARS-CoV-2/pangolin/Guangxi/P5L/2017__EPI_ISL_410540 spike protein (1-1205) WhcAg construct
MFVFLFVLPLVSSQCVNLTTRTGIPPGYTNSSTRGVYYPDKVFRSSILHLTQDLFLPFFSNVTWFNTINYQGGFKKFDNPVLPFNDGVYFASTEKSNIIRGWIFGTTLDARTQSLLIVNNATNVVIKVCEFQFCTDPFLGVYYHNNNKTWVENEFRVYSSANNCTFEYISQPFLMDLEGKQGNFKNLREFVFKNVDGYFKIYSKHTPIDLVRDLPRGFAALEPLVDLPIGINITRFQTLLALHRSYLTPGKLESGWTTGAAAYYVGYLQQRTFLLSYNQNGTITDAVDCSLDPLSETKCTLKSLTVEKGIYQTSNFRVQPTISIVRFPNITNLCPFGEVFNASKFASVYAWNRKRISNCVADYSVLYNSTSFSTFKCYGVSPTKLNDLCFTNVYADSFVVKGDEVRQIAPGQTGVIADYNYKLPDDFTGCVIAWNSVKQDALTGGNYGYLYRLFRKSKLKPFERDISTEIYQAGSTPCNGQVGLNCYYPLERYGFHPTTGVNYQPFRVVVLSFELLNGPATVCGPKLSTTLVKDKCVNFNFNGLTGTGVLTTSKKQFLPFQQFGRDISDTTDAVRDPQTLEILDITPCSFGGVSVITPGTNTSNQVAVLYQDVNCTEVPMAIHAEQLTPAWRVYSAGANVFQTRAGCLVGAEHVNNSYECDIPVGAGICASYHSMSSFRSVNQRSIIAYTMSLGAENSVAYSNNSIAIPTNFTISVTTEILPVSMTKTSVDCTMYICGDSIECSNLLLQYGSFCTQLNRALTGIAVEQDKNTQEVFAQVKQIYKTPPIKDFGGFNFSQILPDPSKPSKRSFIEDLLFNKVTLADAGFIKQYGDCLGDIAARDLICAQKFNGLTVLPPLLTDEMIAQYTSALLAGTITSGWTFGAGAALQIPFAMQMAYRFNGIGVTQNVLYENQKLIANQFNSAIGKIQDSLSSTASALGKLQDVVNQNAQALNTLVKQLSSNFGAISSVLNDILSRLDKVEAEVQIDRLITGRLQSLQTYVTQQLIRAAEIRASANLAATKMSECVLGQSKRVDFCGKGYHLMSFPQSAPHGVVFLHVTYVPAQEKNFTTAPAICHEGKAHFPREGVFVSNGTHWFITQRNFYEPQIITTDNTFVSGSCDVVIGIVNNTVYDPLQPELDSFKEELDKYFKNHTSPDVDLGDISGINASVVNIQKEIDRLNEVAKNLNESLIDLQELGKYEQYIKGGGGSDIDPYKEFGSSYQLLNFLPLDFFPDLNALVDTATALYEEELTGREHCSPHHTAIRQALVCWDELTKLIAWMSSNITSEQVRTIIVNHVNDTWGLKVRQSLWFHLSCLTFGQHTVQEFLVSFGVWIRTPAPYRPPNAPILSTLPEHTVIC

SEQ ID NO: 6704 - protein, 1359 aa, Artificial Sequence
  SARS-CoV-2/pangolin/Guangxi/P5E/2017__EPI_ISL_410541 spike protein (1-1205) WhcAg construct
MFVFLFVLPLVSSQCVNLTTRTGIPPGYTNSSTRGVYYPDKVFRSSILHLTQDLFLPFFSNVTWFNTITYQGGSKKFDNPVLPFNDGVYFASTEKSNIIRGWIFGTTLDARTQSLLIVNNATNVVIKVCEFQFCTDPFLGVYYHNNNKTWVENEFRVYSSANNCTFEYISQPFLMDLEGKQGNFKNLREFVFKNVDGYFKIYSKHTPIDLVRDLPRGFAALEPLVDLPIGINITRFQTLLALHRSYLTPGKLESGWTTGAAAYYVGYLQQRTFLLSYNQNGTITDAVDCSLDPLSETKCTLKSLTVEKGIYQTSNFRVQPTISIVRFPNITNLCPFGEVFNASKFASVYAWNRKRISNCVADYSVLYNSTSFSTFKCYGVSPTKLNDLCFTNVYADSFVVKGDEVRQIAPGQTGVIADYNYKLPDDFTGCVIAWNSVKQDALTGDNYGYLYRLFRKSKLKPFERDISTEIYQAGSTPCNGQVGLNCYYPLERYGFHPTTGVNYQPFRVVVLSFELLNGPATVCGPKLSTTLVKDKCVNFNFNGLTGTGVLTTSKKQFLPFQQFGRDISDTTDAVRDPQTLEILDITPCSFGGVSVITPGTNTSNQVAVLYQDVNCTEVPMAIHAEQLTPAWRVYSAGANVFQTRAGCLVGAEHVNNSYECDIPVGAGICASYHSMSSFRSVNQRSIIAYTMSLGAENSVAYSNNSIAIPTNFTISVTTEILPVSMTKTSVDCTMYICGDSIECSNLLLQYGSFCTQLNRALTGIAVEQDKNTQEVFAQVKQIYKTPPIKDFGGFNFSQILPDPSKPSKRSFIEDLLFNKVTLADAGFIKQYGDCLGDIAARDLICAQKFNGLTVLPPLLTDEMIAQYTSALLAGTITSGWTFGAGAALQIPFAMQMAYRFNGIGVTQNVLYENQKLIANQFNSAIGKIQDSLSSTASALGKLQDVVNQNAQALNTLVKQLSSNFGAISSVLNDILSRLDKVEAEVQIDRLITGRLQSLQTYVTQQLIRAAEIRASANLAATKMSECVLGQSKRVDFCGKGYHLMSFPQSAPHGVVFLHVTYVPAQEKNFTTAPAICHEGKAHFPREGVFVSNGTHWFITQRNFYEPQIITTDNTFVSGSCDVVIGIVNNTVYDPLQPELDSFKEELDKYFKNHTSPDVDLGDISGINASVVNIQKEIDRLNEVAKNLNESLIDLQELGKYEQYIKGGGGSDIDPYKEFGSSYQLLNFLPLDFFPDLNALVDTATALYEEELTGREHCSPHHTAIRQALVCWDELTKLIAWMSSNITSEQVRTIIVNHVNDTWGLKVRQSLWFHLSCLTFGQHTVQEFLVSFGVWIRTPAPYRPPNAPILSTLPEHTVIC

SEQ ID NO: 6705 - protein, 1357 aa, Artificial Sequence
  SARS-CoV-2/pangolin/Guangxi/P1E/2017__EPI_ISL_410539 spike protein (1-1203) WhcAg construct
MFVFLFVLPLVSSQCVNLTTRTGIQPGYTNSSTRGVYYPDKVFRSSILHLTQDLFLPFFSNVTWFNTINYQGGFKKFDNPVLPFNDGVYFASTEKSNIIRGWIFGTTLDARTQSLLIVNNATNVVIKVCEFQFCTDPFLGVYYHNNNKTWVENEFRVYSSANNCTFEYISQPFLMDLEGKQGNFKNLREFVFKNVDGYFKIYSKHTPIDLVRDLPRGFAALEPLVDLPIGINITRFQTLLALHRSYLTPGKLESGWTTGAAAYYVGYLQQRTFLLSYNQNGTITDAVDCSLDPLSETKCTLKSLTVEKGIYQTSNFRVQPTISIVRFPNITNLCPFGEVFNASKFASVYAWNRKRISNCVADYSVLYNSTSFSTFKCYGVSPTKLNDLCFTNVYADSFVVKGDEVRQIAPGQTGVIADYNYKLPDDFTGCVIAWNSVKQDALTGGNYLYRLFRKSKLKPFERDISTEIYQAGSTPCNGQVGLNCYYPLERYGFHPTTGVNYQPFRVVVLSFELLNGPATVCGPKLSTTLVKDKCVNFNFNGLTGTGVLTTSKKQFLPFQQFGRDISDTTDAVRDPQTLEILDITPCSFGGVSVITPGTNTSNQVAVLYQDVNCTEVPMAIHAEQLTPAWRVYSAGANVFQTRAGCLVGAEHVNNSYECDIPVGAGICASYHSMSSLRSVNQRSIIAYTMSLGAENSVAYSNNSIAIPTNFTISVTTEILPVSMTKTSVDCTMYICGDSIECSNLLLQYGSFCTQLNRALTGIAVEQDKNTQEVFAQVKQIYKTPPIKDFGGFNFSQILPDPSKPSKRSFIEDLLFNKVTLADAGFIKQYGDCLGDIAARDLICAQKFNGLTVLPPLLTDEMIAQYTSALLAGTITSGWTFGAGAALQIPFAMQMAYRFNGIGVTQNVLYENQKLIANQFNSAIGKIQDSLSSTASALGKLQDVVNQNAQALNTLVKQLSSNFGAISSVLNDILSRLDKVEAEVQIDRLITGRLQSLQTYVTQQLIRAAEIRASANLAATKMSECVLGQSKRVDFCGKGYHLMSFPQSAPHGVVFLHVTYVPAQEKNFTTAPAICHEGKAHFPREGVFVSNGTHWFITQRNFYEPQIITTDNTFVSGSCDVVIGIVNNTVYDPLQPELDSFKEELDKYFKNHTSPDVDLGDISGINASVVNIQKEIDRLNEVAKNLNESLIDLQELGKYEQYIKGGGGSDIDPYKEFGSSYQLLNFLPLDFFPDLNALVDTATALYEEELTGREHCSPHHTAIRQALVCWDELTKLIAWMSSNITSEQVRTIIVNHVNDTWGLKVRQSLWFHLSCLTFGQHTVQEFLVSFGVWIRTPAPYRPPNAPILSTLPEHTVIC

SEQ ID NO: 6706 - protein, 1365 aa, Artificial Sequence
  SARS-CoV-2/Wuhan/WIV05/2019__EPI_ISL_402128 spike protein (1-1211)(K986P_V987P) WhcAg construct
MFVFLVLLPLVSSQCVNLTTRTQLPPAYTNSFTRGVYYPDKVFRSSVLHSTQDLFLPFFSNVTWFHAIHVSGTNGTKRFDNPVLPFNDGVYFASTEKSNIIRGWIFGTTLDSKTQSLLIVNNATNVVIKVCEFQFCNDPFLGVYYHKNNKSWMESEFRVYSSANNCTFEYVSQPFLMDLEGKQGNFKNLREFVFKNIDGYFKIYSKHTPINLVRDLPQGFSALEPLVDLPIGINITRFQTLLALHRSYLTPGDSSSGWTAGAAAYYVGYLQPRTFLLKYNENGTITDAVDCALDPLSETKCTLKSFTVEKGIYQTSNFRVQPTESIVRFPNITNLCPFGEVFNATRFASVYAWNRKRISNCVADYSVLYNSASFSTFKCYGVSPTKLNDLCFTNVYADSFVIRGDEVRQIAPGQTGKIADYNYKLPDDFTGCVIAWNSNNLDSKVGGNYNYLYRLFRKSNLKPFERDISTEIYQAGSTPCNGVEGFNCYFPLQSYGFQPTNGVGYQPYRVVVLSFELLHAPATVCGPKKSTNLVKNKCVNFNFNGLTGTGVLTESNKKFLPFQQFGRDIADTTDAVRDPQTLEILDITPCSFGGVSVITPGTNTSNQVAVLYQDVNCTEVPVAIHADQLTPTWRVYSTGSNVFQTRAGCLIGAEHVNNSYECDIPIGAGICASYQTQTNSPRRARSVASQSIIAYTMSLGAENSVAYSNNSIAIPTNFTISVTTEILPVSMTKTSVDCTMYICGDSTECSNLLLQYGSFCTQLNRALTGIAVEQDKNTQEVFAQVKQIYKTPPIKDFGGFNFSQILPDPSKPSKRSFIEDLLFNKVTLADAGFIKQYGDCLGDIAARDLICAQKFNGLTVLPPLLTDEMIAQYTSALLAGTITSGWTFGAGAALQIPFAMQMAYRFNGIGVTQNVLYENQKLIANQFNSAIGKIQDSLSSTASALGKLQDVVNQNAQALNTLVKQLSSNFGAISSVLNDILSRLDPPEAEVQIDRLITGRLQSLQTYVTQQLIRAAEIRASANLAATKMSECVLGQSKRVDFCGKGYHLMSFPQSAPHGVVFLHVTYVPAQEKNFTTAPAICHDGKAHFPREGVFVSNGTHWFVTQRNFYEPQIITTDNTFVSGNCDVVIGIVNNTVYDPLQPELDSFKEELDKYFKNHTSPDVDLGDISGINASVVNIQKEIDRLNEVAKNLNESLIDLQELGKYEQYIKGGGGSDIDPYKEFGSSYQLLNFLPLDFFPDLNALVDTATALYEEELTGREHCSPHHTAIRQALVCWDELTKLIAWMSSNITSEQVRTIIVNHVNDTWGLKVRQSLWFHLSCLTFGQHTVQEFLVSFGVWIRTPAPYRPPNAPILSTLPEHTVIC

SEQ ID NO: 6707 - protein, 1361 aa, Artificial Sequence
  SARS-CoV-2/bat/Yunnan/RaTG13/2013__EPI_ISL_402131 spike protein (1-1207)(K982P_V983P) WhcAg construct
MFVFLVLLPLVSSQCVNLTTRTQLPPAYTNSSTRGVYYPDKVFRSSVLHLTQDLFLPFFSNVTWFHAIHVSGTNGIKRFDNPVLPFNDGVYFASTEKSNIIRGWIFGTTLDSKTQSLLIVNNATNVVIKVCEFQFCNDPFLGVYYHKNNKSWMESEFRVYSSANNCTFEYVSQPFLMDLEGKQGNFKNLREFVFKNIDGYFKIYSKHTPINLVRDLPPGFSALEPLVDLPIGINITRFQTLLALHRSYLTPGDSSSGWTAGAAAYYVGYLQPRTFLLKYNENGTITDAVDCALDPLSETKCTLKSFTVEKGIYQTSNFRVQPTDSIVRFPNITNLCPFGEVFNATTFASVYAWNRKRISNCVADYSVLYNSTSFSTFKCYGVSPTKLNDLCFTNVYADSFVITGDEVRQIAPGQTGKIADYNYKLPDDFTGCVIAWNSKHIDAKEGGNFNYLYRLFRKANLKPFERDISTEIYQAGSKPCNGQTGLNCYYPLYRYGFYPTDGVGHQPYRVVVLSFELLNAPATVCGPKKSTNLVKNKCVNFNFNGLTGTGVLTESNKKFLPFQQFGRDIADTTDAVRDPQTLEILDITPCSFGGVSVITPGTNASNQVAVLYQDVNCTEVPVAIHADQLTPTWRVYSTGSNVFQTRAGCLIGAEHVNNSYECDIPIGAGICASYQTQTNSRSVASQSIIAYTMSLGAENSVAYSNNSIAIPTNFTISVTTEILPVSMTKTSVDCTMYICGDSTECSNLLLQYGSFCTQLNRALTGIAVEQDKNTQEVFAQVKQIYKTPPIKDFGGFNFSQILPDPSKPSKRSFIEDLLFNKVTLADAGFIKQYGDCLGDIAARDLICAQKFNGLTVLPPLLTDEMIAQYTSALLAGTITSGWTFGAGAALQIPFAMQMAYRFNGIGVTQNVLYENQKLIANQFNSAIGKIQDSLSSTASALGKLQDVVNQNAQALNTLVKQLSSNFGAISSVLNDILSRLDPPEAEVQIDRLITGRLQSLQTYVTQQLIRAAEIRASANLAATKMSECVLGQSKRVDFCGKGYHLMSFPQSAPHGVVFLHVTYVPAQEKNFTTAPAICHDGKAHFPREGVFVSNGTHWFVTQRNFYEPQIITTDNTFVSGSCDVVIGIVNNTVYDPLQPELDSFKEELDKYFKNHTSPDVDLGDISGINASVVNIQKEIDRLNEVAKNLNESLIDLQELGKYEQYIKGGGGSDIDPYKEFGSSYQLLNFLPLDFFPDLNALVDTATALYEEELTGREHCSPHHTAIRQALVCWDELTKLIAWMSSNITSEQVRTIIVNHVNDTWGLKVRQSLWFHLSCLTFGQHTVQEFLVSFGVWIRTPAPYRPPNAPILSTLPEHTVIC

SEQ ID NO: 6708 - protein, 1365 aa, Artificial Sequence
  SARS-CoV-2/Wuhan/HBCDC-HB-01/2019__EPI_ISL_402132 spike protein (1-1211)(K986P_V987P) WhcAg construct
MFVFLVLLPLVSSQCVNLTTRTQLPPAYTNSITRGVYYPDKVFRSSVLHSTQDLFLPFFSNVTWFHAIHVSGTNGTKRFDNPVLPFNDGVYFASTEKSNIIRGWIFGTTLDSKTQSLLIVNNATNVVIKVCEFQFCNDPFLGVYYHKNNKSWMESEFRVYSSANNCTFEYVSQPFLMDLEGKQGNFKNLREFVFKNIDGYFKIYSKHTPINLVRDLPQGFSALEPLVDLPIGINITRFQTLLALHRSYLTPGDSSSGWTAGAAAYYVGYLQPRTFLLKYNENGTITDAVDCALDPLSETKCTLKSFTVEKGIYQTSNFRVQPTESIVRFPNITNLCPFGEVFNATRFASVYAWNRKRISNCVADYSVLYNSASFSTFKCYGVSPTKLNDLCFTNVYADSFVIRGDEVRQIAPGQTGKIADYNYKLPDDFTGCVIAWNSNNLDSKVGGNYNYLYRLFRKSNLKPFERDISTEIYQAGSTPCNGVEGFNCYFPLQSYGFQPTNGVGYQPYRVVVLSFELLHAPATVCGPKKSTNLVKNKCVNFNFNGLTGTGVLTESNKKFLPFQQFGRDIADTTDAVRDPQTLEILDITPCSFGGVSVITPGTNTSNQVAVLYQDVNCTEVPVAIHADQLTPTWRVYSTGSNVFQTRAGCLIGAEHVNNSYECDIPIGAGICASYQTQTNSPRRARSVASQSIIAYTMSLGAENSVAYSNNSIAIPTNFTISVTTEILPVSMTKTSVDCTMYICGDSTECSNLLLQYGSFCTQLNRALTGIAVEQDKNTQEVFAQVKQIYKTPPIKDFGGFNFSQILPDPSKPSKRSFIEDLLFNKVTLADAGFIKQYGDCLGDIAARDLICAQKFNGLTVLPPLLTDEMIAQYTSALLAGTITSGWTFGAGAALQIPFAMQMAYRFNGIGVTQNVLYENQKLIANQFNSAIGKIQDSLSSTASALGKLQDVVNQNAQALNTLVKQLSSNFGAISSVLNDILSRLDPPEAEVQIDRLITGRLQSLQTYVTQQLIRAAEIRASANLAATKMSECVLGQSKRVDFCGKGYHLMSFPQSAPHGVVFLHVTYVPAQEKNFTTAPAICHDGKAHFPREGVFVSNGTHWFVTQRNFYEPQIITTDNTFVSGNCDVVIGIVNNTVYDPLQPELDSFKEELDKYFKNHTSPDVDLGDISGINASVVNIQKEIDRLNEVAKNLNESLIDLQELGKYEQYIKGGGGSDIDPYKEFGSSYQLLNFLPLDFFPDLNALVDTATALYEEELTGREHCSPHHTAIRQALVCWDELTKLIAWMSSNITSEQVRTIIVNHVNDTWGLKVRQSLWFHLSCLTFGQHTVQEFLVSFGVWIRTPAPYRPPNAPILSTLPEHTVIC

SEQ ID NO: 6709 - protein, 1365 aa, Artificial Sequence
  SARS-CoV-2/Guangdong/20SF028/2020__EPI_ISL_403936 spike protein (1-1211)(K986P_V987P) WhcAg construct
MFVFLVLLPLVSSQCVNLTTRTQLPPAYTNSFTRGVYYPDKVFRSSVLYSTQDLFLPFFSNVTWFHAIHVSGTNGTKRFDNPVLPFNDGVYFASTEKSNIIRGWIFGTTLDSKTQSLLIVNNATNVVIKVCEFQFCNDPFLGVYYHKNNKSWMESEFRVYSSANNCTFEYVSQPFLMDLEGKQGNFKNLREFVFKNIDGYFKIYSKHTPINLVRDLPQGFSALEPLVDLPIGINITRFQTLLALHRSYLTPGDSSSGWTAGAAAYYVGYLQPRTFLLKYNENGTITDAVDCALDPLSETKCTLKSFTVEKGIYQTSNFRVQPTESIVRFPNITNLCPFGEVFNATRFASVYAWNRKRISNCVADYSVLYNSASFSTFKCYGVSPTKLNDLCFTNVYADSFVIRGDEVRQIAPGQTGKIADYNYKLPDDFTGCVIAWNSNNLDSKVGGNYNYLYRLFRKSNLKPFERDISTEIYQAGSTPCNGVEGFNCYFPLQSYGFQPTNGVGYQPYRVVVLSFELLHAPATVCGPKKSTNLVKNKCVNFNFNGLTGTGVLTESNKKFLPFQQFGRDIADTTDAVRDPQTLEILDITPCSFGGVSVITPGTNTSNQVAVLYQDVNCTEVPVAIHADQLTPTWRVYSTGSNVFQTRAGCLIGAEHVNNSYECDIPIGAGICASYQTQTNSPRRARSVASQSIIAYTMSLGAENSVAYSNNSIAIPTNFTISVTTEILPVSMTKTSVDCTMYICGDSTECSNLLLQYGSFCTQLNRALTGIAVEQDKNTQEVFAQVKQIYKTPPIKDFGGFNFSQILPDPSKPSKRSFIEDLLFNKVTLADAGFIKQYGDCLGDIAARDLICAQKFNGLTVLPPLLTDEMIAQYTSALLAGTITSGWTFGAGAALQIPFAMQMAYRFNGIGVTQNVLYENQKLIANQFNSAIGKIQDSLSSTASALGKLQDVVNQNAQALNTLVKQLSSNFGAISSVLNDILSRLDPPEAEVQIDRLITGRLQSLQTYVTQQLIRAAEIRASANLAATKMSECVLGQSKRVDFCGKGYHLMSFPQSAPHGVVFLHVTYVPAQEKNFTTAPAICHDGKAHFPREGVFVSNGTHWFVTQRNFYEPQIITTDNTFVSGNCDVVIGIVNNTVYDPLQPELDSFKEELDKYFKNHTSPDVDLGDISGINASVVNIQKEIDRLNEVAKNLNESLIDLQELGKYEQYIKGGGGSDIDPYKEFGSSYQLLNFLPLDFFPDLNALVDTATALYEEELTGREHCSPHHTAIRQALVCWDELTKLIAWMSSNITSEQVRTIIVNHVNDTWGLKVRQSLWFHLSCLTFGQHTVQEFLVSFGVWIRTPAPYRPPNAPILSTLPEHTVIC
